United States Patent Application Publication US 2011/0183924 A1 - sequence listing, part 176

SEQ ID NO: 437643 - DNA, 5150 bp, Homo sapiens
gcgggaagggtcctgggccccgggcggcggtcgccaggtctcagggccgggggtacccgagtctcgtttcctctcagtccatccacccttcatggggccagagccctctctccagaatctgagcagcaatgccgtttgctgaagacaagacctataagtatatctgccgcaatttcagcaatttttgcaatgtggatgttgtagagattctgccttacctgccctgcctcacagcaagagaccaggatcgactgcgggccacctgcacactctcagggaaccgggacaccctctggcatctcttcaatacccttcagcggcggcccggctgggtggagtacttcattgcggcactgaggggctgtgagctagttgatctcgcggacgaagtggcctctgtctaccagagctaccagcctcggacctcggaccgtcccccagacccactggagccaccgtcacttcctgctgagaggccagggccccccacacctgctgcggcccacagcatcccctacaacagctgcagagagaaggagccaagttaccccatgcctgtccaggagacccaggcgccagagtccccaggagagaattcagagcaagccctgcagacgctcagccccagagccatcccaaggaatccagatggtggccccctggagtcctcctctgacctggcagccctcagccctctgacctccagcgggcatcaggagcaggacacagaactgggcagtacccacacagcaggtgcgacctccagcctcacaccatcccgtgggcctgtgtctccatctgtctccttccagcccctggcccgttccacccccagggcaagccgcttgcctggacccacagggtcagttgtatctactggcacctccttctcctcctcatcccctggcttggcctctgcaggggctgcagagggtaaacagggtgcagagagtgaccaggccgagcctatcatctgctccagtggggcagaggcacctgccaactctctgccctccaaagtgcctaccaccttgatgcctgtgaacacagtggccctgaaagtgcctgccaacccagcatctgtcagcacagtgccctccaagttgccaactagctcaaagccccctggtgcagtgccttctaatgcgctcaccaatccagcaccatccaaattgcccatcaactcaacccgtgctggcatggtgccatccaaagtgcctactagcatggtgctcaccaaggtgtctgccagcacagtccccactgacgggagcagcagaaatgaggagaccccagcagctccaacacccgccggcgccactggaggcagctcagcctggctagacagcagctctgagaataggggccttgggtcggagctgagtaagcctggcgtgctggcatcccaggtagacagcccgttctcgggctgcttcgaggatcttgccatcagtgccagcacctccttgggcatggggccctgccatggcccagaggagaatgagtataagtccgagggcacctttgggatccacgtggctgagaaccccagcatccagctcctggagggcaaccctgggccacctgcggacccggatggcggccccaggccacaagccgaccggaagttccaggagagggaggtgccatgccacaggccctcacctggggctctgtggctccaggtggctgtgacaggggtgctggtagtcacactcctggtggtgctgtaccggcggcgtctgcactagtgaagccctgggctcttcccaccacccatctgttccgttcctgcagtatacctggcccctctccgaagccccttgtccctttcttggggattgtggaggctgggtcagaggggagttaagggactgcaggcctggcagcaggacatgccttggctgaaccaagtcctgagagcagcatctctgtccccacggtgccttgtgtgggtccccgtccttggctttctgggtcctgggctgcccccagtgctccagaccttccccactggcaatccaggttatcatccatgtcctccagaggagcttcctcctccaggcctcagccctgttggcccaggtggagcaggagggaccactggaacatgtggtgcttgggaatgcctctcctgttgcattggtccctgaaggcctcagggcaggtatgtggtgtgtgggcgactccacaagacctgcctcccatcctggcagcccagcctgagaccgttgcattgaggcaggcaggagcggcagggtggctgctctccaggagcccaactgccttgagttcctgccccactgggccccctcccctgctgggcaatcctgggaaggtctggaggttcctgtggacctcagggaagccaggggcagctgtcaggcctgaggaagacctgtggagctcctctccagcctcctctttccctcccctctggtctccattctcttcagctccctacatgggctggggaggagacacctggtgggcagagctcaggcagaggtttggatttcagctccctcacttccggggctgtgtggctttggcagatgtcagacttctggtcttgcttctccacgtggacagtgagtatctggctcattcttcactgggttcttctgagattgaacctacaggtgtttgccaagtgcctggcccagagcaagtggccactgcttctcccatctctctcctgcccaacctggtagagctgagggcatgagaggcagagtgcacagtggtcaagggtgcagctctgcagcacaggcagcctaggcctgcgtcccaacctgcctctcaccagctctgtgaccttgggcaagggatttatctgtctgtcccttagttttctcacctgtaaaaggaggataagtatatatatatatttcccagtgttgtgaagattaaaggagtttatcgatgtaggtcttaggatgagtcctggcatttaccaagggttggatatatgttattatcactattaagtgttgagggtccaggcatgctgggcaacagggtgacagagcgagactccatctcaaaaaaataataaagatgtggggcctgtgggaggtggttaggtcatgagggtggagatcatgaatggggttagcaccttataaaacaggcttgagggagcccttctgtcccttctaccatgtgtggatgcagtgagaaggcaccgtatctctgaagcagagagcccgccctggacactggatctgctggcaccttgatcttggacttcccagcctctagaactgtgagaaataattttttgttgtttacaaattacccaggctaaggtgtttcattgtaacctgaatggaccaagctggtgtgaccctgttggaaaactggcagtatctaccaaaagccgaacatacgtataaactgatccagcagttccactcctgggtatgtacaccacagaaagctatgtccaccgagacattggcaagaatgtttctaaccacacgctgactgtagccccaaacctgaaacaacccaaatgtccatccaccaacccaaatgtccatccacagttgaagctacagtgaagtcacagggtcgaatactactgcacagcaacgaatatgaatgaaaatatcgctatgcacagcaacatggataaatttcacagacatgaggtcaagcaaaagaggtcagagtcctcatcatcaagagagaattcattgtatgattctcttcctacaaaaagtacagaaataagcaaaactgatccatggtgttagaagccaggggaacagttaacaggggagggatactggggaggggcatcctggagtgctggtctacctcatctgggtgttgatttcacgagtattgtcagtttgtttccagactccctgttggagatgtggaaataaaaaccacctaaacaagagcagagaggccatttggtcaaagtttgcaaaggagtcagccatgattgcttgtatttggcaggggtcaaaggcaggcagggactgtgaaatgttatagtggaaaaaaagggaaggctctgggtgtgctgtgattggagattgttggcatggggacagagcggactaactggaggggcatctttggttggttgggggggtatatttggctttctctggttggtctggagttggaagagggggtgtggtggctggggattgggaagaagctggcagccactaagttcagactgttctgggtccgattgctgctgaggctgtggtttggcttccttggcttcccaggctggttatgggtttctggccagagtctattgtcatatgtggcctggccattgtccagttgtatgttcagtctcttggaaggaagggtattgactctgagaggggccaccatcgctggaatgggggacacacagtacttcctccagctgcctacacccccctagggtcagtggcgcctgcctgtgagggtgagcccaatggctagagggctctgctccaagtcattgcttactacacccacaaacattcttcgttctttaaggcctaacttaaagcccagatcctacaggaaaccttgattagacccctctctttattaagcttcctaagatcaaaccctgcttttgtgtaaatgctgacctccttgcctacattttaaaaacctagagctgggcatgatggccccagcctgtaatcccagtgattcaggagactgaggtgggaggattgctagaagccaggagttcgagaccagcctgggtaacatagctagaccacatctcttaaaataaaatagttaatttagccaggcatgatgatatatgcctgtagtcccaactacttggaaggctgaggtgtgaggatctttgagcccgggaggtcgaggctacagtaagctatgatctcaccactgtactccagcctgggtgacagagcgagacccagactcaaaaaataaaaataaaaaccctgaatatcttccttctgcaaaaaaaaaaaaaaaaaaaaaaaaaaaaaaaaaaaaaaatctaggagatgctctttaccctgcctggcctcaaactattaatagcttcctttgagcaacattatttattatgaactttcaaacacaaaaaagtagagatagaataacaaatccccatgactccatctacccatctggaccactat

SEQ ID NO: 437644 - DNA, 4257 bp, Homo sapiens
atcgagccgtgaccccccgactagcccgacaggctcacaacctcagaaacctaaactatatagcagcggggtggtggcagcagccacccacaaaaagcaagaggcaggtgaattcccagcatccccctccacccacctgcctcctctgcttctgagagttaaggtcacgccaccaccttggtccctattctcacacactagaagacgggttagcagtttggcactccatgtggaaaagtggccaacccctgtccttcaggccttgagtcccacattttccatgatgctccattaagcagctgatagcacccccacctccagggaaagtgagttcagagtccttggtctaatgcatctgtgttgaaattgaggccttcccctgtgttcacctttctgctctttttcttttagcccaaggctatgaaggcctcattcggtgctgggcatggtcactcctagcattcctcactctgttgctaacagcaacagcaataataataagggttacaacttactccataccttactgtctgccaggcattaagctaagtgctttacatatattaagtcatttaatcctcataatgaccctatgaaagagataccatctcaacccaattgacagctggtttgcaagattaggagggatgaaggacccaggggacaatgcgagggaaaactctgaccccggggccccaggctggatgttctttatgcctgtgaaccacagcttatcacatgtctggagttagggaccccacttaaagtgagattttggctggaggtggtggatcatacctataatcccagcactttgggagaccaaggcagaaggactgcttgaggccaggagttcaaaaccagtgtaggtaacagctagaccctatctctacaaaaaatttaaaaattagctgggtgtggtggtatgtgcctcaagttccagctactcaggaggctgaggtgggaggatcacttgagcacaggagtttgaagttacagtgagctatgatggcaccactgcacttcagcctaggcaacagagggagaccctgtctttaaagtacatagaggtttttcacaccaacacatctctgcccagtgtgccaacatctgccacctgctataatagtactataacactcaatatgtaattaatgtagtctcagggatgttatgacaatatgattacaactatcacgtgtgtgcccagccaggctcaatgccccaggctgggcgaggtggggcaggggacacagcctaaaatgccaggcctcaggaagccatttggtttagcagacattgtttattaaaggagttacctatgccagatcgaaggcctaagatgattaagacactatgagtgccttcaagtggttggggacgttcatgattgtggtacagacaaataggctttcacatcattcttttatgtaatcatacaacagatatttgcacctacatgtgcagagcactgtgataggcctcagtgacacagaataatacggcaaagaccccacccgatgagccccctcccaccacccaccagtacagtagggggtggtttaatggagtgttcctggaatatgaagtgggggcaggcattaggggtggcaaagggacaagtgtttatctgatcagttatgtactgtttataataagtaaatcagcagagggggaataatacttagaacctatagagagtaaatctgacaagatgaaatgctgatgaaaatatggaggaaatgaaactctcatgggttttgcagggaatctaagtcagtgctgtgttgtgaatgtaggtgtaccctttgaattcatatgttgaatcctaacccccaaagcaatggcattaagaggtggggcctttggggctgggtatggtggctcatgactgtaatcccagcactttgggatgctggcagggggcagatcacttgaagccaggagtctgagatcagcctggccaacatggtgaaaccccatctgtactaaaaatacaaaaattagccaggtgtgatggcgtacatctgtaatttcagccactcgggaggctgagacaggagaatagcttgaacccagtaggtggagatttcagtgagccgagatcgtgccactgcactccagcctgggtgacagagcgagactccatctcaaaaaaataataaagatgtggggcctgtgggaggtggttaggtcatgagggtggagatcatgaatggggttagcaccttataaaacaggcttgagggagcccttctgtcccttctaccatgtgtggatgcagtgagaaggcaccgtatctctgaagcagagagcccgccctggacactggatctgctggcaccttgatcttggacttcccagcctctagaactgtgagaaataattttttgttgtttacaaattacccaggctaaggtgtttcattgtaacctgaatggaccaagctggtgtgaccctgttggaaaactggcagtatctaccaaaagccgaacatacgtataaactgatccagcagttccactcctgggtatgtacaccacagaaagctatgtccaccgagacattggcaagaatgtttctaaccacacgctgactgtagccccaaacctgaaacaacccaaatgtccatccaccaacccaaatgtccatccacagttgaagctacagtgaagtcacagggtcgaatactactgcacagcaacgaatatgaatgaaaatatcgctatgcacagcaacatggataaatttcacagacatgaggtcaagcaaaagaggtcagagtcctcatcatcaagagagaattcattgtatgattctcttcctacaaaaagtacagaaataagcaaaactgatccatggtgttagaagccaggggaacagttaacaggggagggatactggggaggggcatcctggagtgctggtctacctcatctgggtgttgatttcacgagtattgtcagtttgtttccagactccctgttggagatgtggaaataaaaaccacctaaacaagagcagagaggccatttggtcaaagtttgcaaaggagtcagccatgattgcttgtatttggcaggggtcaaaggcaggcagggactgtgaaatgttatagtggaaaaaaagggaaggctctgggtgtgctgtgattggagattgttggcatggggacagagcggactaactggaggggcatctttggttggttgggggggtatatttggctttctctggttggtctggagttggaagagggggtgtggtggctggggattgggaagaagctggcagccactaagttcagactgttctgggtccgattgctgctgaggctgtggtttggcttccttggcttcccaggctggttatgggtttctggccagagtctattgtcatatgtggcctggccattgtccagttgtatgttcagtctcttggaaggaagggtattgactctgagaggggccaccatcgctggaatgggggacacacagtacttcctccagctgcctacacccccctagggtcagtggcgcctgcctgtgagggtgagcccaatggctagagggctctgctccaagtcattgcttactacacccacaaacattcttcgttctttaaggcctaacttaaagcccagatcctacaggaaaccttgattagacccctctctttattaagcttcctaagatcaaaccctgcttttgtgtaaatgctgacctccttgcctacattttaaaaacctagagctgggcatgatggccccagcctgtaatcccagtgattcaggagactgaggtgggaggattgctagaagccaggagttcgagaccagcctgggtaacatagctagaccacatctcttaaaataaaatagttaatttagccaggcatgatgatatatgcctgtagtcccaactacttggaaggctgaggtgtgaggatctttgagcccgggaggtcgaggctacagtaagctatgatctcaccactgtactccagcctgggtgacagagcgagacccagactcaaaaaataaaaataaaaaccctgaatatcttccttctgcaaaaaaaaaaaaaaaaaaaaaaaaaaaaaaaaaaaaaaatctaggagatgctctttaccctgcctggcctcaaactattaatagcttcctttgagcaacattatttattatgaactttcaaacacaaaaaagtagagatagaataacaaatccccatgactccatctacccatctggaccactat

SEQ ID NO: 437645 - DNA, 2668 bp, Homo sapiens
acactaccagcctaggtaaaaaatacaaaaagtaactgggcatggcggcgcccatctatagtcccacctccagagtagctgggactacaggcgcctgccaccacgcctggctaatttttttgcacttttagtagagacggggtttcactgtgttagccaggatggtctcgatctcctgaccttgtgatccgcccgcctcggcctcccaaagtgctgggattacaggcgtgagccaccgcgcccagccaaattaaattttttatagagatgaggtcatgctgttatgttgcccaggttggcctcatgagatccagcactttgggatgctggcagggggcagatcacttgaagccaggagtctgagatcagcctggccaacatggtgaaaccccatctgtactaaaaatacaaaaattagccaggtgtgatggcgtacatctgtaatttcagccactcgggaggctgagacaggagaatagcttgaacccagtaggtggagatttcagtgagccgagatcgtgccactgcactccagcctgggtgacagagcgagactccatctcaaaaaaataataaagatgtggggcctgtgggaggtggttaggtcatgagggtggagatcatgaatggggttagcaccttataaaacaggcttgagggagcccttctgtcccttctaccatgtgtggatgcagtgagaaggcaccgtatctctgaagcagagagcccgccctggacactggatctgctggcaccttgatcttggacttcccagcctctagaactgtgagaaataattttttgttgtttacaaattacccaggctaaggtgtttcattgtaacctgaatggaccaagctggtgtgaccctgttggaaaactggcagtatctaccaaaagccgaacatacgtataaactgatccagcagttccactcctgggtatgtacaccacagaaagctatgtccaccgagacattggcaagaatgtttctaaccacacgctgactgtagccccaaacctgaaacaacccaaatgtccatccaccaacccaaatgtccatccacagttgaagctacagtgaagtcacagggtcgaatactactgcacagcaacgaatatgaatgaaaatatcgctatgcacagcaacatggataaatttcacagacatgaggtcaagcaaaagaggtcagagtcctcatcatcaagagagaattcattgtatgattctcttcctacaaaaagtacagaaataagcaaaactgatccatggtgttagaagccaggggaacagttaacaggggagggatactggggaggggcatcctggagtgctggtctacctcatctgggtgttgatttcacgagtattgtcagtttgtttccagactccctgttggagatgtggaaataaaaaccacctaaacaagagcagagaggccatttggtcaaagtttgcaaaggagtcagccatgattgcttgtatttggcaggggtcaaaggcaggcagggactgtgaaatgttatagtggaaaaaaagggaaggctctgggtgtgctgtgattggagattgttggcatggggacagagcggactaactggaggggcatctttggttggttgggggggtatatttggctttctctggttggtctggagttggaagagggggtgtggtggctggggattgggaagaagctggcagccactaagttcagactgttctgggtccgattgctgctgaggctgtggtttggcttccttggcttcccaggctggttatgggtttctggccagagtctattgtcatatgtggcctggccattgtccagttgtatgttcagtctcttggaaggaagggtattgactctgagaggggccaccatcgctggaatgggggacacacagtacttcctccagctgcctacacccccctagggtcagtggcgcctgcctgtgagggtgagcccaatggctagagggctctgctccaagtcattgcttactacacccacaaacattcttcgttctttaaggcctaacttaaagcccagatcctacaggaaaccttgattagacccctctctttattaagcttcctaagatcaaaccctgcttttgtgtaaatgctgacctccttgcctacattttaaaaacctagagctgggcatgatggccccagcctgtaatcccagtgattcaggagactgaggtgggaggattgctagaagccaggagttcgagaccagcctgggtaacatagctagaccacatctcttaaaataaaatagttaatttagccaggcatgatgatatatgcctgtagtcccaactacttggaaggctgaggtgtgaggatctttgagcccgggaggtcgaggctacagtaagctatgatctcaccactgtactccagcctgggtgacagagcgagacccagactcaaaaaataaaaataaaaaccctgaatatcttccttctgcaaaaaaaaaaaaaaaaaaaaaaaaaaaaaaaaaaaaaaatctaggagatgctctttaccctgcctggcctcaaactattaatagcttcctttgagcaacattatttattatgaactttcaaacacaaaaaagtagagatagaataacaaatccccatgactccatctacccatctggaccactat

SEQ ID NO: 437646 - DNA, 2141 bp, Homo sapiens
tattcgtagctgtgcagtagaattcgaccctgtgacttgactgtagcttaaatgtggggcctgtgggaggtggttaggtcatgagggtggagatcatgaatggggttagcaccttataaaacaggcttgagggagcccttctgtcccttctaccatgtgtggatgcagtgagaaggcaccgtatctctgaagcagagagcccgccctggacactggatctgctggcaccttgatcttggacttcccagcctctagaactgtgagaaataattttttgttgtttacaaattacccaggctaaggtgtttcattgtaacctgaatggaccaagctggtgtgaccctgttggaaaactggcagtatctaccaaaagccgaacatacgtataaactgatccagcagttccactcctgggtatgtacaccacagaaagctatgtccaccgagacattggcaagaatgtttctaaccacacgctgactgtagccccaaacctgaaacaacccaaatgtccatccaccaacccaaatgtccatccacagttgaagctacagtgaagtcacagggtcgaatactactgcacagcaacgaatatgaatgaaaatatcgctatgcacagcaacatggataaatttcacagacatgaggtcaagcaaaagaggtcagagtcctcatcatcaagagagaattcattgtatgattctcttcctacaaaaagtacagaaataagcaaaactgatccatggtgttagaagccaggggaacagttaacaggggagggatactggggaggggcatcctggagtgctggtctacctcatctgggtgttgatttcacgagtattgtcagtttgtttccagactccctgttggagatgtggaaataaaaaccacctaaacaagagcagagaggccatttggtcaaagtttgcaaaggagtcagccatgattgcttgtatttggcaggggtcaaaggcaggcagggactgtgaaatgttatagtggaaaaaaagggaaggctctgggtgtgctgtgattggagattgttggcatggggacagagcggactaactggaggggcatctttggttggttgggggggtatatttggctttctctggttggtctggagttggaagagggggtgtggtggctggggattgggaagaagctggcagccactaagttcagactgttctgggtccgattgctgctgaggctgtggtttggcttccttggcttcccaggctggttatgggtttctggccagagtctattgtcatatgtggcctggccattgtccagttgtatgttcagtctcttggaaggaagggtattgactctgagaggggccaccatcgctggaatgggggacacacagtacttcctccagctgcctacacccccctagggtcagtggcgcctgcctgtgagggtgagcccaatggctagagggctctgctccaagtcattgcttactacacccacaaacattcttcgttctttaaggcctaacttaaagcccagatcctacaggaaaccttgattagacccctctctttattaagcttcctaagatcaaaccctgcttttgtgtaaatgctgacctccttgcctacattttaaaaacctagagctgggcatgatggccccagcctgtaatcccagtgattcaggagactgaggtgggaggattgctagaagccaggagttcgagaccagcctgggtaacatagctagaccacatctcttaaaataaaatagttaatttagccaggcatgatgatatatgcctgtagtcccaactacttggaaggctgaggtgtgaggatctttgagcccgggaggtcgaggctacagtaagctatgatctcaccactgtactccagcctgggtgacagagcgagacccagactcaaaaaataaaaataaaaaccctgaatatcttccttctgcaaaaaaaaaaaaaaaaaaaaaaaaaaaaaaaaaaaaaaatctaggagatgctctttaccctgcctggcctcaaactattaatagcttcctttgagcaacattatttattatgaactttcaaacacaaaaaagtagagatagaataacaaatccccatgactccatctacccatctggaccactat

SEQ ID NO: 437647 - DNA, 1444 bp, Homo sapiens
gcggccgccggggtcggcagcctggggctccgctgatctagggcaacgagcgggggacgcttcgagcccgcagcgagagtgaccagcatggtccctgccggcagctcggggccggagggttttgactgcaaggccagcccacgccgagggtccaagcatcgggatatgccgccagcacctggctgctgcagcaccgcgctggacatgagcgctccgcccaacccgacggcgtcagctggcgcgcgcgcccgcgaccgacgtgcgcaggcgcccacgggccgcgcagccgccattgctctcctgccacggaggggagcgcttggtggcagtccgcgggcccggacggaaggctgaggcgacgcctcgacgacagcggaccggagctgcaggggcaacacattcagggcggggtgccccatttaggcctggctgaccggagtaagaaactacaacccccgaagtgccttgcgcctcaaggttacggaggcagtgacgtaagctgtcttgaccgctaccatttctctagtagaggcgggacgcggcggcgcggagtgatgacgcgctctgctggcggctggagggttgcggagcacccaccctggagccatggtccacgccttcctcattcacaccttgagggccccgaatactgaggacacgggcctttgccgagtgctgtactcctgcgtcttcggtgctgagaagtcacctgatgacccacggccgcatggtgccgagagggacaggcttctccggaaggaacagattttagctgtggccagcggcaggtgacgagccacacagtgtcctgaggcctgatgaaagggctatgccaaccacagtcccagaggaggagctggctgtagcagcgactgacccaggagctgaagtgagccaagccccctcctcctgagacccctgagagtctcgtttcctctcagtccatccacccttcatggggccagagccctctctccagaatctgagcagcaatgccgtttgctgaagacaagacctataagtatatctgccgcaatttcagcaatttttgcaatgtggatgttgtagagattctgccttacctgccctgcctcacagcaagagaccaggatcgactgcgggccacctgcacactctcagggaaccgggacaccctctggcatctcttcaatacccttcagcggcggcccggctgggtggagtacttcattgcggcactgaggggctgtgagctagttgatctcgcggacgaagtggcctctgtctaccagagctaccagcctcgtgagcgtcctgcccttgccctcctggacccccagcctgctccctggcctccgctctccttttctctctccctgtacttcctgcctttctctgtcatcctctttcttgtcactgtgaagcgatgaataaacctgggtgtagatccaggctgagccactta

SEQ ID NO: 437648 - DNA, 209 bp, Homo sapiens
tccagcctgggcgacagagtggtattctgtttcaaaaaaaaaaaaaaaggcagtatgtagccccgaagactgttgcccaagtggtagaatgttagcacactaccagcctaggtaaaaaatacaaaaagtaactgggcatggcggcgcccatctatagtcccagctacatgggaggctgaggtgggaagataagtcacttgagcccgcca

SEQ ID NO: 437649 - DNA, 4237 bp, Homo sapiens
  misc_feature (4052)..(4052): n is a, c, g, or t
  misc_feature (4117)..(4118): n is a, c, g, or t
gcgggaagggtcctgggccccgggcggcggtcgccaggtctcagggccgggggtacccgagtctcgtttcctctcagtccatccacccttcatggggccagagccctctctccagaatctgagcagcaatgccgtttgctgaagacaagacctataagtatatctgccgcaatttcagcaatttttgcaatgtggatgttgtagagattctgccttacctgccctgcctcacagcaagagaccaggatcgactgcgggccacctgcacactctcagggaaccgggacaccctctggcatctcttcaatacccttcagcggcggcccggctgggtggagtacttcattgcggcactgaggggctgtgagctagttgatctcgcggacgaagtggcctctgtctaccagagctaccagcctcggacctcggaccgtcccccagacccactggagccaccgtcacttcctgctgagaggccagggccccccacacctgctgcggcccacagcatcccctacaacagctgcagagagaaggagccaagttaccccatgcctgtccaggagacccaggcgccagagtccccaggagagaattcagagcaagccctgcagacgctcagccccagagccatcccaaggaatccagatggtggccccctggagtcctcctctgacctggcagccctcagccctctgacctccagcgggcatcaggagcaggacacagaactgggcagtacccacacagcaggtgcgacctccagcctcacaccatcccgtgggcctgtgtctccatctgtctccttccagcccctggcccgttccacccccagggcaagccgcttgcctggacccacagggtcagttgtatctactggcacctccttctcctcctcatcccctggcttggcctctgcaggggctgcagagggtaaacagggtgcagagagtgaccaggccgagcctatcatctgctccagtggggcagaggcacctgccaactctctgccctccaaagtgcctaccaccttgatgcctgtgaacacagtggccctgaaagtgcctgccaacccagcatctgtcagcacagtgccctccaagttgccaactagctcaaagccccctggtgcagtgccttctaatgcgctcaccaatccagcaccatccaaattgcccatcaactcaacccgtgctggcatggtgccatccaaagtgcctactagcatggtgctcaccaaggtgtctgccagcacagtccccactgacgggagcagcagaaatgaggagaccccagcagctccaacacccgccggcgccactggaggcagctcagcctggctagacagcagctctgagaataggggccttgggtcggagctgagtaagcctggcgtgctggcatcccaggtagacagcccgttctcgggctgcttcgaggatcttgccatcagtgccagcacctccttgggcatggggccctgccatggcccagaggagaatgagtataagtccgagggcacctttgggatccacgtggctgagaaccccagcatccagctcctggagggcaaccctgggccacctgcggacccggatggcggccccaggccacaagccgaccggaagttccaggagagggaggtgccatgccacaggccctcacctggggctctgtggctccaggtggctgtgacaggggtgctggtagtcacactcctggtggtgctgtaccggcggcgtctgcactagtgaagccctgggctcttcccaccacccatctgttccgttcctgcagtatacctggcccctctccgaagccccttgtccctttcttggggattgtggaggctgggtcagaggggagttaagggactgcaggcctggcagcaggacatgccttggctgaaccaagtcctgagagcagcatctctgtccccacggtgccttgtgtgggtccccgtccttggctttctgggtcctgggctgcccccagtgctccagaccttccccactggcaatccaggttatcatccatgtcctccagaggagcttcctcctccaggcctcagccctgttggcccaggtggagcaggagggaccactggaacatgtggtgcttgggaatgcctctcctgttgcattggtccctgaaggcctcagggcaggtatgtggtgtgtgggcgactccacaagacctgcctcccatcctggcagcccagcctgagaccgttgcattgaggcaggcaggagcggcagggtggctgctctccaggagcccaactgccttgagttcctgccccactgggccccctcccctgctgggcaatcctgggaaggtctggaggttcctgtggacctcagggaagccaggggcagctgtcaggcctgaggaagacctgtggagctcctctccagcctcctctttccctcccctctggtctccattctcttcagctccctacatgggctggggaggagacacctggtgggcagagctcaggcagaggtttggatttcagctccctcacttccggggctgtgtggctttggcagatgtcagacttctggtcttgcttctccacgtggacagtgagtatctggctcattcttcactgggttcttctgagattgaacctacaggtgtttgccaagtgcctggcccagagcaagtggccactgcttctcccatctctctcctgcccaacctggtagagctgagggcatgagaggcagagtgcacagtggtcaagggtgcagctctgcagcacaggcagcctaggcctgcgtcccaacctgcctctcaccagctctgtgaccttgggcaagggatttatctgtctgtcccttagttttctcacctgtaaaaggaggataagtatatatatatatttcccagtgttgtgaagattaaaggagtttatcgatgtaggtcttaggatgagtcctggcatttaccaagggttggatatatgttattatcactattaagtgttgagggtccaggcatgctgggcaacagggaccccatctctacaaaaaagtttaaaaaattagccaggcgtggtggtgcacctgtcgtcttagctacttgggaggctgaggtgggaggatcacttgagcccagaagcttgaagctgcagtgagctaggatcgtgccactgcactccaacctgggtgagagagcgagaccctgtctcaagaaaaagaaaaatgcagagaaacaggagtcttggctactcctttagaggcagactcagaccctcctgcctcacagctttatctttgtatttgccccttactttatcttgtgccttgagaaattgctggggagagaggtatgtccactgggcagctgtacaggatggaggatatagggcgtttccactcccagcagccaggttccctcaccccaagctcacccactgttggggagattatctacaataacaccagaaacacattggggtggattgggggtatccttatgggttcttttcagggaaccattgctggacaaggcacaggagccacctccatttctgagctctgcaagggacaagaactagagccatcaggggctgggctcactgtggccccaccccaagccgtcagcctccagggatctacaccctgccttggctgctacagctttttcactccactgccctaggggagttcagcaacctaatgatctctatctctgaacatctcttcatcccatgctccaagtccagcaacctgcaccctggaaccaggagtggaccctacccgagctgtctgtattaatccccatcccccaccaccaatcttaaaaagccctctgtccccctaccctaaaccccagttaggtacccatgctgggcaggtcagttaacaatttatgcacaggtactagttttattgtattaccgttccagggtagctttgaaaaaagtatctcaaaaaggcaacatgggccgagcgcagtggctcgcgcctgtggtcccagcactttgggaggccaaggtgggcagatcgcctgaggtctggagttcaagaccagcctggccnacggggtgaaaccccgtctctacaaaaataagaaaattggccaggtgtggtggcagacgtctgtnntcccagctattcaggaggctgaggcacgagaattccatgaacccaggatgcggaggttgcagtgagccgagattgtgccactgcgctccagcctgggcgacagagtggtattctgtttc

SEQ ID NO: 437650 - DNA, 7837 bp, Homo sapiens
gcggccgccggggtcggcagcctggggctccgctgatctagggcaacgagcgggggacgcttcgagcccgcagcgagagtgaccagcatggtccctgccggcagctcggggccggagggttttgactgcaaggccagcccacgccgagggtccaagcatcgggatatgccgccagcacctggctgctgcagcaccgcgctggacatgagccgcttggtggcagtccgcgggcccggacggaaggctgaggcgacgcctcgacgacagcggaccggagctgcaggggcaacacattcagggcggggtgccccatttaggcctggctgaccggagtaagaaactacaacccccgaagtgccttgcgcctcaaggttacggaggcagtgaccacccaccctggagccatggtccacgccttcctcattcacaccttgagggccccgaatactgaggacacgggcctttgccgagtgctgtactcctgcgtcttcggtgctgagaagtcacctgatgacccacggccgcatggtgccgagagggacaggcttctccggaaggaacagattttagctgtggccaggcaggtagagtcaatgtgtcggctgcagcagcaggcatctggccggccccccatggacctgcagccgcaatcctcagatgagcaagtgccgctgcacgaggccccacgtggggctttccgcctggcagcagagaaccctttccaggagccacggacggtggtgtggctgggcgtgctctcgttaggctttgccctggtgctggatgcccatgagaacctgctactggctgagggcacgctccggctgctgacacgcctcctccttgaccacctccggctgctggcgcccagcaccagccttctgctgcgggctgaccgcattgagggcatcctcacccgcttcctgccacatggtcagctgcttttcctcaacgaccagtttgtccaaggcctggagaaggaattcagtgccgcttggccccgctgattcctcgttgggatggtgcttctgagggcaggcagagggtagacacacagccagatgaagcttggcatctccctcctacccagcagctctgatgtgctgctataccaggacaagtgggtgacacaagcctgcagaaagggggctgggcagagggtggaggaggtcctgcctgtcctcaggttagtggaaccacagaacttcctgagcctagagctgctgtgttacttagaccgctgccgtgcggcagccacgcttgtccttgaacccaccttcctccatccctgccagccgatagtgctagggtgaggagctgcctggagctcaccccgctcttcttccaaacccacagtcaaggccaggcgcggtggctcacgcctgtaatcccagcactttgcggggctgaggtggttggaccacctcaggtcgggagttcaagaccagcctggccaacatagtgaaaccccatctctactaaaaatacaaaaattagctgggtgtatggcgcccacctgtaatcctagctgctcagggggctgagtcatgggaatcacttgaacctgggaggcagagtttgcagtgagccgagagtgcgccacttcactccagcctgggtgaccgagtgatactctgtctcaaagaaaaaaaattataattttagcacagtaaccagccatgatgggagataccctgggtaaggcatgtagaaagggttgagggaccttcccagtcccctagccccgcctcccatcctcccatctttttcttttttcttttttttagagaatcacccagcctggagcgaagtggtgcaatcataactcactgtatccttaaactcccgggcttaagcgatcctcctgcctcagccttctgagtaactaggacttcaggtacctaacctccgcctcccgggttcaagcaattctcctgcctcagcctcccgagtagctgggattacagaggcctgccaccacacccgactaattttcgtatttttagtagagacggggtttctccatgttggccaggctgttcttgaactcctgacctcaagtgctccacctgcgttggcttcccaaagtgctgggatacaggagtgagccactgcgcctggctgatcccagcacttttcaaatgatgccgctcaaagccgtgacttggcctactttgaacagcaaacttgttgctgctgttgtcaacctgaaggcctctcaaatgccagcttcaagcagggtgtgaattggccagtgtcagatctcaggagtcctgtgttgagagtgtggctttcagctgcggggagctgcacttggtggggaaagccaggcaggtcaccctcacagccagataatgtggaggtcagaacccaaggaagggagtgagacctccactcccagtgggggacctggccacccatccttggggacctgagaaagcgtacttcaccttggggtgaaggctgggtggggccagagggaccagtgccctcctcagtgcttaggggcagagccacctgcagcaatggtatctgcatattagcccctctccaccttctttctcccgctgaatcatttccctcaaagcccaagagctgtcactgcttctttctccctgggaagaatgcgtggactctgcctggtgatagactgaagccagaacagtgccacaccctcgccttaattccttgctaggtgttctcagatttatgagacttcttagtcaaatatgagggaggttggatgtggtggcttgtgcctgtaatcccagcattttgggaggccgaggtgggaggatcccttgaagccaggagtttgagacaagcctgggcaacaaagcaagaccctatctctaaaaaaaaaaaaaaaaaaaaatctaggagatgctctttaccctgcctggcctcaaactattaatagcttcctttgagcaacattatttattatgaactttcaaacacaaaaaagtagagagagtagaataacaaatccccatgagcccatcacccaacttcagtaattatcaattcatggccatcttgttcacccctgcctgcttccctgcttcccctcattctgcagaggttcttttcttttgagacagagtgttgctctgttgcccaggctggagtgcagtggtgcaacttcggctcactgcaacctccgcctcccaggttcaagtgattctcctgcttcagcctctcaagtagctgggattacagatgcccgccaccacacctggctaattttcgtatttttgttagagatggggtttcaccatgttggccaggctggtctcgaactcctgacctcaagtgatccgcccgccttggcctcccaaaatgctgggattacaggtgtgaaccacggtgcctggccactgtacaggttatttatagaagttggagagtgaagggttgagaaagccaaggggcagatgcgggtctggaggattttgtgcctaaggccctctctttgctcccagacagcatgaagtaacaatgaggcatccacctcttggttttgtggcctctgtggatgacgtctctcaccttgaaccagttcagagttggagtagcgcaggatcctgtcttcagaggaggggccgaagcgggttcctctgttgtcaagctctttggaggtgcctggctgctactactgtcccagagaggtgatgatgaatgatgggtgtgtccagtggcagtttgccccactgaggcaggggcttccactaggccctgacagagcccttccagcaggcagaaatccctgtgctaggcaagattcaaactccgtagcatgtctcctgctcccatctcttaggaatggagtccttcaggccttgagtcccacattttccatgatgctccattaagcagctgatagcacccccacctccagggaaagtgagttcagagtccttggtctaatgcatctgtgttgaaattgaggccttcccctgtgttcacctttctgctctttttcttttagcccaaggctatgaaggcctcattcggtgctgggcatggtcactcctagcattcctcactctgttgctaacagcaacagcaataataataagggttacaacttactccataccttactgtctgccaggcattaagctaagtgctttacatatattaagtcatttaatcctcataatgaccctatgaaagagataccatctcaacccaattgacagctggtttgcaagattaggagggatgaaggacccaggggacaatgcgagggaaaactctgaccccggggccccaggctggatgttctttatgcctgtgaaccacagcttatcacatgtctggagttagggaccccacttaaagtgagattttggctggaggtggtggatcatacctataatcccagcactttgggagaccaaggcagaaggactgcttgaggccaggagttcaaaaccagtgtaggtaacagctagaccctatctctacaaaaaatttaaaaattagctgggtgtggtggtatgtgcctcaagttccagctactcaggaggctgaggtgggaggatcacttgagcacaggagtttgaagttacagtgagctatgatggcaccactgcacttcagcctaggcaacagagggagaccctgtctttaaagtacatagaggtttttcacaccaacacatctctgcccagtgtgccaacatctgccacctgctataatagtactataacactcaatatgtaattaatgtagtctcagggatgttatgacaatatgattacaactatcacgtgtgtgcccagccaggctcaatgccccaggctgggcgaggtggggcaggggacacagcctaaaatgccaggcctcaggaagccatttggtttagcagacattgtttattaaaggagttacctatgccagatcgaaggcctaagatgattaagacactatgagtgccttcaagtggttggggacgttcatgattgtggtacagacaaataggctttcacatcattcttttatgtaatcatacaacagatatttgcacctacatgtgcagagcactgtgataggcctcagtgacacagaataatacggcaaagaccccacccgatgagccccctcccaccacccaccagtacagtagggggtggtttaatggagtgttcctggaatatgaagtgggggcaggcattaggggtggcaaagggacaagtgtttatctgatcagttatgtactgtttataataagtaaatcagcagagggggaataatacttagaacctatagagagtaaatctgacaagatgaaatgctgatgaaaatatggaggaaatgaaactctcatgggttttgcagggaatctaagtcagtgctgtgttgtgaatgtaggtgtaccctttgaattcatatgttgaatcctaacccccaaagcaatggcattaagaggtggggcctttggggctgggtatggtggctcatgactgtaatcccagcactttgggatgctggcagggggcagatcacttgaagccaggagtctgagatcagcctggccaacatggtgaaaccccatctgtactaaaaatacaaaaattagccaggtgtgatggcgtacatctgtaatttcagccactcgggaggctgagacaggagaatagcttgaacccagtaggtggagatttcagtgagccgagatcgtgccactgcactccagcctgggtgacagagcgagactccatctcaaaaaaataataaagatgtggggcctgtgggaggtggttaggtcatgagggtggagatcatgaatggggttagcaccttataaaacaggcttgagggagcccttctgtcccttctaccatgtgtggatgcagtgagaaggcaccgtatctctgaagcagagagcccgccctggacactggatctgctggcaccttgatcttggacttcccagcctctagaactgtgagaaataattttttgttgtttacaaattacccaggctaaggtgtttcattgtaacctgaatggaccaagctggtgtgaccctgttggaaaactggcagtatctaccaaaagccgaacatacgtataaactgatccagcagttccactcctgggtatgtacaccacagaaagctatgtccaccgagacattggcaagaatgtttctaaccacacgctgactgtagccccaaacctgaaacaacccaaatgtccatccaccaacccaaatgtccatccacagttgaagctacagtgaagtcacagggtcgaatactactgcacagcaacgaatatgaatgaaaatatcgctatgcacagcaacatggataaatttcacagacatgaggtcaagcaaaagaggtcagagtcctcatcatcaagagagaattcattgtatgattctcttcctacaaaaagtacagaaataagcaaaactgatccatggtgttagaagccaggggaacagttaacaggggagggatactggggaggggcatcctggagtgctggtctacctcatctgggtgttgatttcacgagtattgtcagtttgtttccagactccctgttggagatgtggaaataaaaaccacctaaacaagagcagagaggccatttggtcaaagtttgcaaaggagtcagccatgattgcttgtatttggcaggggtcaaaggcaggcagggactgtgaaatgttatagtggaaaaaaagggaaggctctgggtgtgctgtgattggagattgttggcatggggacagagcggactaactggaggggcatctttggttggttgggggggtatatttggctttctctggttggtctggagttggaagagggggtgtggtggctggggattgggaagaagctggcagccactaagttcagactgttctgggtccgattgctgctgaggctgtggtttggcttccttggcttcccaggctggttatgggtttctggccagagtctattgtcatatgtggcctggccattgtccagttgtatgttcagtctcttggaaggaagggtattgactctgagaggggccaccatcgctggaatgggggacacacagtacttcctccagctgcctacacccccctagggtcagtggcgcctgcctgtgagggtgagcccaatggctagagggctctgctccaagtcattgcttactacacccacaaacattcttcgttctttaaggcctaacttaaagcccagatcctacaggaaaccttgattagacccctctctttattaagcttcctaagatcaaaccctgcttttgtgtaaatgctgacctccttgcctacattttaaaaacctagagctgggcatgatggccccagcctgtaatcccagtgattcaggagactgaggtgggaggattgctagaagccaggagttcgagaccagcctgggtaacatagctagaccacatctcttaaaataaaatagttaatttagccaggcatgatgatatatgcctgtagtcccaactacttggaaggctgaggtgtgaggatctttgagcccgggaggtcgaggctacagtaagctatgatctcaccactgtactccagcctgggtgacagagcgagacccagactcaaaaaataaaaataaaaaccctgaatatcttccttctgcaaaaaaaaaaaaaaaaaaaaaaaaaaaaaaaaaaaaaaatctaggagatgctctttaccctgcctggcctcaaactattaatagcttcctttgagcaacattatttattatgaactttcaaacacaaaaaagtagagatagaataacaaatccccatgactccatctacccatctggaccactat

SEQ ID NO: 437651 - DNA, 6337 bp, Homo sapiens
  misc_feature (4052)..(4052): n is a, c, g, or t
  misc_feature (4117)..(4118): n is a, c, g, or t
gcgggaagggtcctgggccccgggcggcggtcgccaggtctcagggccgggggtacccgagtctcgtttcctctcagtccatccacccttcatggggccagagccctctctccagaatctgagcagcaatgccgtttgctgaagacaagacctataagtatatctgccgcaatttcagcaatttttgcaatgtggatgttgtagagattctgccttacctgccctgcctcacagcaagagaccaggatcgactgcgggccacctgcacactctcagggaaccgggacaccctctggcatctcttcaatacccttcagcggcggcccggctgggtggagtacttcattgcggcactgaggggctgtgagctagttgatctcgcggacgaagtggcctctgtctaccagagctaccagcctcggacctcggaccgtcccccagacccactggagccaccgtcacttcctgctgagaggccagggccccccacacctgctgcggcccacagcatcccctacaacagctgcagagagaaggagccaagttaccccatgcctgtccaggagacccaggcgccagagtccccaggagagaattcagagcaagccctgcagacgctcagccccagagccatcccaaggaatccagatggtggccccctggagtcctcctctgacctggcagccctcagccctctgacctccagcgggcatcaggagcaggacacagaactgggcagtacccacacagcaggtgcgacctccagcctcacaccatcccgtgggcctgtgtctccatctgtctccttccagcccctggcccgttccacccccagggcaagccgcttgcctggacccacagggtcagttgtatctactggcacctccttctcctcctcatcccctggcttggcctctgcaggggctgcagagggtaaacagggtgcagagagtgaccaggccgagcctatcatctgctccagtggggcagaggcacctgccaactctctgccctccaaagtgcctaccaccttgatgcctgtgaacacagtggccctgaaagtgcctgccaacccagcatctgtcagcacagtgccctccaagttgccaactagctcaaagccccctggtgcagtgccttctaatgcgctcaccaatccagcaccatccaaattgcccatcaactcaacccgtgctggcatggtgccatccaaagtgcctactagcatggtgctcaccaaggtgtctgccagcacagtccccactgacgggagcagcagaaatgaggagaccccagcagctccaacacccgccggcgccactggaggcagctcagcctggctagacagcagctctgagaataggggccttgggtcggagctgagtaagcctggcgtgctggcatcccaggtagacagcccgttctcgggctgcttcgaggatcttgccatcagtgccagcacctccttgggcatggggccctgccatggcccagaggagaatgagtataagtccgagggcacctttgggatccacgtggctgagaaccccagcatccagctcctggagggcaaccctgggccacctgcggacccggatggcggccccaggccacaagccgaccggaagttccaggagagggaggtgccatgccacaggccctcacctggggctctgtggctccaggtggctgtgacaggggtgctggtagtcacactcctggtggtgctgtaccggcggcgtctgcactagtgaagccctgggctcttcccaccacccatctgttccgttcctgcagtatacctggcccctctccgaagccccttgtccctttcttggggattgtggaggctgggtcagaggggagttaagggactgcaggcctggcagcaggacatgccttggctgaaccaagtcctgagagcagcatctctgtccccacggtgccttgtgtgggtccccgtccttggctttctgggtcctgggctgcccccagtgctccagaccttccccactggcaatccaggttatcatccatgtcctccagaggagcttcctcctccaggcctcagccctgttggcccaggtggagcaggagggaccactggaacatgtggtgcttgggaatgcctctcctgttgcattggtccctgaaggcctcagggcaggtatgtggtgtgtgggcgactccacaagacctgcctcccatcctggcagcccagcctgagaccgttgcattgaggcaggcaggagcggcagggtggctgctctccaggagcccaactgccttgagttcctgccccactgggccccctcccctgctgggcaatcctgggaaggtctggaggttcctgtggacctcagggaagccaggggcagctgtcaggcctgaggaagacctgtggagctcctctccagcctcctctttccctcccctctggtctccattctcttcagctccctacatgggctggggaggagacacctggtgggcagagctcaggcagaggtttggatttcagctccctcacttccggggctgtgtggctttggcagatgtcagacttctggtcttgcttctccacgtggacagtgagtatctggctcattcttcactgggttcttctgagattgaacctacaggtgtttgccaagtgcctggcccagagcaagtggccactgcttctcccatctctctcctgcccaacctggtagagctgagggcatgagaggcagagtgcacagtggtcaagggtgcagctctgcagcacaggcagcctaggcctgcgtcccaacctgcctctcaccagctctgtgaccttgggcaagggatttatctgtctgtcccttagttttctcacctgtaaaaggaggataagtatatatatatatttcccagtgttgtgaagattaaaggagtttatcgatgtaggtcttaggatgagtcctggcatttaccaagggttggatatatgttattatcactattaagtgttgagggtccaggcatgctgggcaacagggaccccatctctacaaaaaagtttaaaaaattagccaggcgtggtggtgcacctgtcgtcttagctacttgggaggctgaggtgggaggatcacttgagcccagaagcttgaagctgcagtgagctaggatcgtgccactgcactccaacctgggtgagagagcgagaccctgtctcaagaaaaagaaaaatgcagagaaacaggagtcttggctactcctttagaggcagactcagaccctcctgcctcacagctttatctttgtatttgccccttactttatcttgtgccttgagaaattgctggggagagaggtatgtccactgggcagctgtacaggatggaggatatagggcgtttccactcccagcagccaggttccctcaccccaagctcacccactgttggggagattatctacaataacaccagaaacacattggggtggattgggggtatccttatgggttcttttcagggaaccattgctggacaaggcacaggagccacctccatttctgagctctgcaagggacaagaactagagccatcaggggctgggctcactgtggccccaccccaagccgtcagcctccagggatctacaccctgccttggctgctacagctttttcactccactgccctaggggagttcagcaacctaatgatctctatctctgaacatctcttcatcccatgctccaagtccagcaacctgcaccctggaaccaggagtggaccctacccgagctgtctgtattaatccccatcccccaccaccaatcttaaaaagccctctgtccccctaccctaaaccccagttaggtacccatgctgggcaggtcagttaacaatttatgcacaggtactagttttattgtattaccgttccagggtagctttgaaaaaagtatctcaaaaaggcaacatgggccgagcgcagtggctcgcgcctgtggtcccagcactttgggaggccaaggtgggcagatcgcctgaggtctggagttcaagaccagcctggccnacggggtgaaaccccgtctctacaaaaataagaaaattggccaggtgtggtggcagacgtctgtnntcccagctattcaggaggctgaggcacgagaattccatgaacccaggatgcggaggttgcagtgagccgagattgtgccactgcgctccagctgacagagcgagactccatctcaaaaaaataataaagatgtggggcctgtgggaggtggttaggtcatgagggtggagatcatgaatggggttagcaccttataaaacaggcttgagggagcccttctgtcccttctaccatgtgtggatgcagtgagaaggcaccgtatctctgaagcagagagcccgccctggacactggatctgctggcaccttgatcttggacttcccagcctctagaactgtgagaaataattttttgttgtttacaaattacccaggctaaggtgtttcattgtaacctgaatggaccaagctggtgtgaccctgttggaaaactggcagtatctaccaaaagccgaacatacgtataaactgatccagcagttccactcctgggtatgtacaccacagaaagctatgtccaccgagacattggcaagaatgtttctaaccacacgctgactgtagccccaaacctgaaacaacccaaatgtccatccaccaacccaaatgtccatccacagttgaagctacagtgaagtcacagggtcgaatactactgcacagcaacgaatatgaatgaaaatatcgctatgcacagcaacatggataaatttcacagacatgaggtcaagcaaaagaggtcagagtcctcatcatcaagagagaattcattgtatgattctcttcctacaaaaagtacagaaataagcaaaactgatccatggtgttagaagccaggggaacagttaacaggggagggatactggggaggggcatcctggagtgctggtctacctcatctgggtgttgatttcacgagtattgtcagtttgtttccagactccctgttggagatgtggaaataaaaaccacctaaacaagagcagagaggccatttggtcaaagtttgcaaaggagtcagccatgattgcttgtatttggcaggggtcaaaggcaggcagggactgtgaaatgttatagtggaaaaaaagggaaggctctgggtgtgctgtgattggagattgttggcatggggacagagcggactaactggaggggcatctttggttggttgggggggtatatttggctttctctggttggtctggagttggaagagggggtgtggtggctggggattgggaagaagctggcagccactaagttcagactgttctgggtccgattgctgctgaggctgtggtttggcttccttggcttcccaggctggttatgggtttctggccagagtctattgtcatatgtggcctggccattgtccagttgtatgttcagtctcttggaaggaagggtattgactctgagaggggccaccatcgctggaatgggggacacacagtacttcctccagctgcctacacccccctagggtcagtggcgcctgcctgtgagggtgagcccaatggctagagggctctgctccaagtcattgcttactacacccacaaacattcttcgttctttaaggcctaacttaaagcccagatcctacaggaaaccttgattagacccctctctttattaagcttcctaagatcaaaccctgcttttgtgtaaatgctgacctccttgcctacattttaaaaacctagagctgggcatgatggccccagcctgtaatcccagtgattcaggagactgaggtgggaggattgctagaagccaggagttcgagaccagcctgggtaacatagctagaccacatctcttaaaataaaatagttaatttagccaggcatgatgatatatgcctgtagtcccaactacttggaaggctgaggtgtgaggatctttgagcccgggaggtcgaggctacagtaagctatgatctcaccactgtactccagcctgggtgacagagcgagacccagactcaaaaaataaaaataaaaaccctgaatatcttccttctgcaaaaaaaaaaaaaaaaaaaaaaaaaaaaaaaaaaaaaaatctaggagatgctctttaccctgcctggcctcaaactattaatagcttcctttgagcaacattatttattatgaactttcaaacacaaaaaagtagagatagaataacaaatccccatgactccatctacccatctggaccactat

SEQ ID NO: 437652 - DNA, 5987 bp, Homo sapiens
gcgggaagggtcctgggccccgggcggcggtcgccaggtctcagggccgggggtacccgagtctcgtttcctctcagtccatccacccttcatggggccagagccctctctccagaatctgagcagcaatgccgtttgctgaagacaagacctataagtatatctgccgcaatttcagcaatttttgcaatgtggatgttgtagagattctgccttacctgccctgcctcacagcaagagaccaggatcgactgcgggccacctgcacactctcagggaaccgggacaccctctggcatctcttcaatacccttcagcggcggcccggctgggtggagtacttcattgcggcactgaggggctgtgagctagttgatctcgcggacgaagtggcctctgtctaccagagctaccagcctcggacctcggaccgtcccccagacccactggagccaccgtcacttcctgctgagaggccagggccccccacacctgctgcggcccacagcatcccctacaacagctgcagagagaaggagccaagttaccccatgcctgtccaggagacccaggcgccagagtccccaggagagaattcagagcaagccctgcagacgctcagccccagagccatcccaaggaatccagatggtggccccctggagtcctcctctgacctggcagccctcagccctctgacctccagcgggcatcaggagcaggacacagaactgggcagtacccacacagcaggtgcgacctccagcctcacaccatcccgtgggcctgtgtctccatctgtctccttccagcccctggcccgttccacccccagggcaagccgcttgcctggacccacagggtcagttgtatctactggcacctccttctcctcctcatcccctggcttggcctctgcaggggctgcagagggtaaacagggtgcagagagtgaccaggccgagcctatcatctgctccagtggggcagaggcacctgccaactctctgccctccaaagtgcctaccaccttgatgcctgtgaacacagtggccctgaaagtgcctgccaacccagcatctgtcagcacagtgccctccaagttgccaactagctcaaagccccctggtgcagtgccttctaatgcgctcaccaatccagcaccatccaaattgcccatcaactcaacccgtgctggcatggtgccatccaaagtgcctactagcatggtgctcaccaaggtgtctgccagcacagtccccactgacgggagcagcagaaatgaggagaccccagcagctccaacacccgccggcgccactggaggcagctcagcctggctagacagcagctctgagaataggggccttgggtcggagctgagtaagcctggcgtgctggcatcccaggtagacagcccgttctcgggctgcttcgaggatcttgccatcagtgccagcacctccttgggcatggggccctgccatggcccagaggagaatgagtataagtccgagggcacctttgggatccacgtggctgagaaccccagcatccagctcctggagggcaaccctgggccacctgcggacccggatggcggccccaggccacaagccgaccggaagttccaggagagggaggtgccatgccacaggccctcacctggggctctgtggctccaggtggctgtgacaggggtgctggtagtcacactcctggtggtgctgtaccggcggcgtctgcactagtgaagccctgggctcttcccaccacccatctgttccgttcctgcagtatacctggcccctctccgaagccccttgtccctttcttggggattgtggaggctgggtcagaggggagttaagggactgcaggcctggcagcaggacatgccttggctgaaccaagtcctgagagcagcatctctgtccccacggtgccttgtgtgggtccccgtccttggctttctgggtcctgggctgcccccagtgctccagaccttccccactggcaatccaggttatcatccatgtcctccagaggagcttcctcctccaggcctcagccctgttggcccaggtggagcaggagggaccactggaacatgtggtgcttgggaatgcctctcctgttgcattggtccctgaaggcctcagggcaggtatgtggtgtgtgggcgactccacaagacctgcctcccatcctggcagcccagcctgagaccgttgcattgaggcaggcaggagcggcagggtggctgctctccaggagcccaactgccttgagttcctgccccactgggccccctcccctgctgggcaatcctgggaaggtctggaggttcctgtggacctcagggaagccaggggcagctgtcaggcctgaggaagacctgtggagctcctctccagcctcctctttccctcccctctggtctccattctcttcagctccctacatgggctggggaggagacacctggtgggcagagctcaggcagaggtttggatttcagctccctcacttccggggctgtgtggctttggcagatgtcagacttctggtcttgcttctccacgtggacagtgagtatctggctcattcttcactgggttcttctgagattgaacctacaggtgtttgccaagtgcctggcccagagcaagtggccactgcttctcccatctctctcctgcccaacctggtagagctgagggcatgagaggcagagtgcacagtggtcaagggtgcagctctgcagcacaggcagcctaggcctgcgtcccaacctgcctctcaccagctctgtgaccttgggcaagggatttatctgtctgtcccttagttttctcacctgtaaaaggaggataagtatatatatatatttcccagtgttgtgaagattaaaggagtttatcgatgtaggtcttaggatgagtcctggcatttaccaagggttggatatatgttattatcactattaagtgttgagggtccaggcatgctgggcaacagggaccccatctctacaaaaaagtttaaaaaattagccaggcgtggtggtgcacctgtcgtcttagctacttgggaggctgaggtgggaggatcacttgagcccagaagcttgaagctgcagtgagctaggatcgtgccactgcactccaacctgggtgagagagcgagaccctgtctcaagaaaaagaaaaatgcagagaaacaggagtcttggctactcctttagaggcagactcagaccctcctgcctcacagctttatctttgtatttgccccttactttatcttgtgccttgagaaattgctggggagagaggtatgtccactgggcagctgtacaggatggaggatatagggcgtttccactcccagcagccaggttccctcaccccaagctcacccactgttggggagattatctacaataacaccagaaacacattggggtggattgggggtatccttatgggttcttttcagggaaccattgctggacaaggcacaggagccacctccatttctgagctctgcaagggacaagaactagagccatcaggggctgggctcactgtggccccaccccaagccgtcagcctccagggatctacaccctgccttggctgctacagctttttcactccactgccctaggggagttcagcaacctaatgatctctatctctgaacatctcttcatcccatgctccaagtccagcaacctgcaccctggaaccaggagtggaccctacccgagctgtctgtattaatccccatcccccaccaccaatcttaaaaagccctctgtccccctaccctaaaccccagttaggtacccatgctgggcaggtcagttaacaatttatgcacaggtactagttttattgtattaccgttccagggtagctttgaaaaaagtatctcaaaaaggcaacaccaccgcgcccagccaaattaaattttttatagagatgaggtcatgctgttatgttgcccaggttggcctcatgagatcttgccttagcctcccaaagtgctgggattacagatgtgagacactgcacccaaaccccaccacttttttttttcctttttctttttttgagacagtcttactccgttgcccaggctggagtgtagtggcatgatctcagctcactgcaacctccgcctcccgggttcaagcaattctcctgcctcagcctcccgagtagctgggattacagaggcctgccaccacacccgactaattttcgtatttttagtagagacggggtttctccatgttggccaggctgttcttgaactcctgacctcaagtgctccacctgcgttggcttcccaaagtgctgggatacaggagtgagccactgcgcctggctgatcccagcacttttcaaatgatgccgctcaaagccgtgacttggcctactttgaacagcaaacttgttgctgctgttgtcaacctgaaggcctctcaaatgccagcttcaagcagggtgtgaattggccagtgtcagatctcaggagtcctgtgttgagagtgtggctttcagctgcggggagctgcacttggtggggaaagccaggcaggtcaccctcacagccagataatgtggaggtcagaacccaaggaagggagtgagacctccactcccagtgggggacctggccacccatccttggggacctgagaaagcgtacttcaccttggggtgaaggctgggtggggccagagggaccagtgccctcctcagtgcttaggggcagagccacctgcagcaatggtatctgcatattagcccctctccaccttctttctcccgctgaatcatttccctcaaagcccaagagctgtcactgcttctttctccctgggaagaatgcgtggactctgcctggtgatagactgaagccagaacagtgccacaccctcgccttaattccttgctaggtgttctcagatttatgagacttcttagtcaaatatgagggaggttggatgtggtggcttgtgcctgtaatcccagcattttgggaggccgaggtgggaggatcccttgaagccaggagtttgagacaagcctgggcaacaaagcaagaccctatctctaaaaaaaaaaaaaaaaaaaaatctaggagatgctctttaccctgcctggcctcaaactattaatagcttcctttgagcaacattatttattatgaactttcaaacacaaaaaagtagagagagtagaataacaaatccccatgagcccatcacccaacttcagtaattatcaattcatggccatcttgttcacccctgcctgcttccctgcttcccctcattctgcagaggttcttttcttttgagacagagtgttgctctgttgcccaggctggagtgcagtggtgcaacttcggctcactgcaacctccgcctcccaggttcaagtgattctcctgcttcagcctctcaagtagctgggattacagatgcccgccaccacacctggctaattttcgtatttttgttagagatggggtttcaccatgttggccaggctggtctcgaactcctgacctcaagtgatccgcccgccttggcctcccaaaatgctgggattacaggtgtgaaccacggtgcctggccactgtacaggttatttatagaagttggagagtgaagggttgagaaagccaaggggcagatgcgggtctggaggattttgtgcctaaggccctctctttgctcccagacagcatgaagtaacaatgaggcatccacctcttggttttgtggcctctgtggatgacgtctctcaccttgaaccagttcagagttggagtagcgcaggatcctgtcttcagaggaggggccgaagcgggttcctctgttgtcaagctctttggaggtgcctggctgctactactgtcccagagaggtgagagacgtcatccgaagcagtcgacaaagatcctct

SEQ ID NO: 437653 - DNA, 5917 bp, Homo sapiens
  misc_feature (3632)..(3632): n is a, c, g, or t
  misc_feature (3697)..(3698): n is a, c, g, or t
gcgggaagggtcctgggccccgggcggcggtcgccaggtctcagggccgggggtacccgagtctcgtttcctctcagtccatccacccttcatggggccagagccctctctccagaatctgagcagcaatgccgtttgctgaagacaagacctataagtatatctgccgcaatttcagcaatttttgcaatgtggatgttgtagagattctgccttacctgccctgcctcacagcaagagaccaggatcgactgcgggccacctgcacactctcagggaaccgggacaccctctggcatctcttcaatacccttcagcggcggcccggctgggtggagtacttcattgcggcactgaggggctgtgagctagttgatctcgcggacgaagtggcctctgtctaccagagctaccagcctcggacctcggaccgtcccccagacccactggagccaccgtcacttcctgctgagaggccagggccccccacacctgctgcggcccacagcatcccctacaacagctgcagagagaaggagccaagttaccccatgcctgtccaggagacccaggcgccagagtccccaggagagaattcagagcaagccctgcagacgctcagccccagagccatcccaaggaatccagatggtggccccctggagtcctcctctgacctggcagccctcagccctctgacctccagcgggcatcaggagcaggacacagaactgggcagtacccacacagcaggtgcgacctccagcctcacaccatcccgtgggcctgtgtctccatctgtctccttccagcccctggcccgttccacccccagggcaagccgcttgcctggacccacagggtcagttgtatctactggcacctccttctcctcctcatcccctggcttggcctctgcaggggctgcagagggtaaacagggtgcagagagtgaccaggccgagcctatcatctgctccagtggggcagaggcacctgccaactctctgccctccaaagtgcctaccaccttgatgcctgtgaacacagtggccctgaaagtgcctgccaacccagcatctgtcagcacagtgccctccaagttgccaactagctcaaagccccctggtgcagtgccttctaatgcgctcaccaatccagcaccatccaaattgcccatcaactcaacccgtgctggcatggtgccatccaaagtgcctactagcatggtgctcaccaaggtgtctgccagcacagtccccactgacgggagcagcagaaatgaggagaccccagcagctccaacacccgccggcgccactggaggcagctcagcctggctagacagcagctctgagaataggggccttgggtcggagctgagtaagcctggcgtgctggcatcccaggtagacagcccgttctcgggctgcttcgaggatcttgccatcagtgccagcacctccttgggcatggggccctgccatggcccagaggagaatgagtataagtccgagggcacctttgggatccacgtggctgagaaccccagcatccagctcctggagggcaaccctgggccacctgcggacccggatggcggccccaggccacaagccgaccggaagttccaggagagggaggtgccatgccacaggccctcacctggggctctgtggctccaggtggctgtgacaggggtgctggtagtcacactcctggtggtgctgtaccggcggcgtctgcactagtgaagccctgggctcttcccaccacccatctgttccgttcctgcagtatacctggcccctctccgaagccccttgtccctttcttggggattgtggaggctgggtcagaggggagttaagggactgcaggcctggcagcaggacatgccttggctgaaccaagtcctgagagcagcatctctgtccccacggtgccttgtgtgggtccccgtccttggctttctgggtcctgggctgcccccagtgctccagaccttccccactggcaatccaggttatcatccatgtcctccagaggagcttcctcctccaggcctcagccctgttggcccaggtggagcaggagggaccactggaacatgtggtgcttgggaatgcctctcctgttgcattggtccctgaaggcctcagggcaggtatgtggtgtgtgggcgactccacaagacctgcctcccatcctggcagcccagcctgagaccgttgcattgaggcaggcaggagcggcagggtggctgctctccaggagcccaactgccttgagttcctgccccactgggccccctcccctgctgggcaatcctgggaaggtctggaggttcctgtggacctcagggaagccaggggcagctgtcaggcctgaggaagacctgtggagctcctctccagcctcctctttccctcccctctggtctccattctcttcagctccctacatgggctggggaggagacacctggtgggcagagctcaggcagaggtttggatttcagctccctcacttccggggctgtgtggctttggcagatgtcagacttctggtcttgcttctccacgtggacagtgagtatctggctcattcttcactgggttcttctgagattgaacctacaggtgtttgccaagtgcctggcccagagcaagtggccactgcttctcccatctctctcctgcccaacctggtagagctgagggcatgagaggcagagtgcacagtggtcaagggtgcagctctgcagcacaggcagcctaggcctgcgtcccaacctgcctctcaccagctctgtgaccttgggcaagggatttatctgtctgtcccttagttttctcacctgtaaaaggaggataagtatatatatatatttcccagtgttgtgaagattaaaggagtttatcgatgtaggtcttaggatgagtcctggcatttaccaagggttggatatatgttattatcactattaagtgttgagggtccaggcatgctgggcaacagggaccccatctctacaaaaaagtttaaaaaattagccaggcgtggtggtgcacctgtcgtcttagctacttgggaggctgaggtgggaggatcacttgagcccagaagcttgaagctgcagtgagctaggatcgtgccactgcactccaacctgggtgagagagcgagaccctgtctcaagaaaaagaaaaatgcagagaaacaggagtcttggctactcctttagaggcagactcagaccctcctgcctcacagctttatctttgtatttgccccttactttatcttgtgccttgagaaattgctggggagagaggtatgtccactgggcagctgtacaggatggaggatatagggcgtttccactcccagcagccaggttccctcaccccaagctcaccccagttaggtacccatgctgggcaggtcagttaacaatttatgcacaggtactagttttattgtattaccgttccagggtagctttgaaaaaagtatctcaaaaaggcaacatgggccgagcgcagtggctcgcgcctgtggtcccagcactttgggaggccaaggtgggcagatcgcctgaggtctggagttcaagaccagcctggccnacggggtgaaaccccgtctctacaaaaataagaaaattggccaggtgtggtggcagacgtctgtnntcccagctattcaggaggctgaggcacgagaattccatgaacccaggatgcggaggttgcagtgagccgagattgtgccactgcgctccagctgacagagcgagactccatctcaaaaaaataataaagatgtggggcctgtgggaggtggttaggtcatgagggtggagatcatgaatggggttagcaccttataaaacaggcttgagggagcccttctgtcccttctaccatgtgtggatgcagtgagaaggcaccgtatctctgaagcagagagcccgccctggacactggatctgctggcaccttgatcttggacttcccagcctctagaactgtgagaaataattttttgttgtttacaaattacccaggctaaggtgtttcattgtaacctgaatggaccaagctggtgtgaccctgttggaaaactggcagtatctaccaaaagccgaacatacgtataaactgatccagcagttccactcctgggtatgtacaccacagaaagctatgtccaccgagacattggcaagaatgtttctaaccacacgctgactgtagccccaaacctgaaacaacccaaatgtccatccaccaacccaaatgtccatccacagttgaagctacagtgaagtcacagggtcgaatactactgcacagcaacgaatatgaatgaaaatatcgctatgcacagcaacatggataaatttcacagacatgaggtcaagcaaaagaggtcagagtcctcatcatcaagagagaattcattgtatgattctcttcctacaaaaagtacagaaataagcaaaactgatccatggtgttagaagccaggggaacagttaacaggggagggatactggggaggggcatcctggagtgctggtctacctcatctgggtgttgatttcacgagtattgtcagtttgtttccagactccctgttggagatgtggaaataaaaaccacctaaacaagagcagagaggccatttggtcaaagtttgcaaaggagtcagccatgattgcttgtatttggcaggggtcaaaggcaggcagggactgtgaaatgttatagtggaaaaaaagggaaggctctgggtgtgctgtgattggagattgttggcatggggacagagcggactaactggaggggcatctttggttggttgggggggtatatttggctttctctggttggtctggagttggaagagggggtgtggtggctggggattgggaagaagctggcagccactaagttcagactgttctgggtccgattgctgctgaggctgtggtttggcttccttggcttcccaggctggttatgggtttctggccagagtctattgtcatatgtggcctggccattgtccagttgtatgttcagtctcttggaaggaagggtattgactctgagaggggccaccatcgctggaatgggggacacacagtacttcctccagctgcctacacccccctagggtcagtggcgcctgcctgtgagggtgagcccaatggctagagggctctgctccaagtcattgcttactacacccacaaacattcttcgttctttaaggcctaacttaaagcccagatcctacaggaaaccttgattagacccctctctttattaagcttcctaagatcaaaccctgcttttgtgtaaatgctgacctccttgcctacattttaaaaacctagagctgggcatgatggccccagcctgtaatcccagtgattcaggagactgaggtgggaggattgctagaagccaggagttcgagaccagcctgggtaacatagctagaccacatctcttaaaataaaatagttaatttagccaggcatgatgatatatgcctgtagtcccaactacttggaaggctgaggtgtgaggatctttgagcccgggaggtcgaggctacagtaagctatgatctcaccactgtactccagcctgggtgacagagcgagacccagactcaaaaaataaaaataaaaaccctgaatatcttccttctgcaaaaaaaaaaaaaaaaaaaaaaaaaaaaaaaaaaaaaaatctaggagatgctctttaccctgcctggcctcaaactattaatagcttcctttgagcaacattatttattatgaactttcaaacacaaaaaagtagagatagaataacaaatccccatgactccatctacccatctggaccactat

SEQ ID NO: 437654 - DNA, 2124 bp, Homo sapiens
gcggccgccggggtcggcagcctggggctccgctgatctagggcaacgagcgggggacgcttcgagcccgcagcgagagtgaccagcatggtccctgccggcagctcggggccggagggttttgactgcaaggccagcccacgccgagggtccaagcatcgggatatgccgccagcacctggctgctgcagcaccgcgctggacatgagcgctccgcccaacccgacggcgtcagctggcgcgcgcgcccgcgaccgacgtgcgcaggcgcccacgggccgcgcagccgccattgctctcctgccacggaggggagcgcttggtggcagtccgcgggcccggacggaaggctgaggcgacgcctcgacgacagcggaccggagctgcaggggcaacacattcagggcggggtgccccatttaggcctggctgaccggagtaagaaactacaacccccgaagtgccttgcgcctcaaggttacggaggcagtgaccacccaccctggagccatggtccacgccttcctcattcacaccttgagggccccgaatactgaggacacgggcctttgccgagtgctgtactcctgcgtcttcggtgctgagaagtcacctgatgacccacggccgcatggtgccgagagggacaggcttctccggaaggaacagattttagctgtggccaggcaggtagagtcaatgtgtcggctgcagcagcaggcatctggccggccccccatggacctgcagccgcaatcctcagatgagcaagtgccgctgcacgaggccccacgtggggctttccgcctggcagcagagaaccctttccaggagccacggacggtggtgtggctgggcgtgctctcgttaggctttgccctggtgctggatgcccatgagaacctgctactggctgagggcacgctccggctgctgacacgcctcctccttgaccacctccggctgctggcgcccagcaccagccttctgctgcgggctgaccgcattgagggcatcctcacccgcttcctgccacatggtcagctgcttttcctcaacgaccagtttgtccaaggcctggagaaggaattcagtgccgcttggccccgctgattcctcgttgggatggtgcttctgagggcaggcagagggtagacacacagccagatgaagcttggcatctccctcctacccagcagctctgatgtgctgctataccaggacaagtgggtgacacaagcctgcagaaagggggctgggcagagggtggaggaggtcctgcctgtcctcaggttagtggaaccacagaacttcctgagcctagagctgctgtgttacttagaccgctgccgtgcggcagccacgcttgtccttgaacccaccttcctccatccctgccagccgatagtgctagggtgaggagctgcctggagctcaccccgctcttcttccaaacccacagtcaaggccaggcgcggtggctcacgcctgtaatcccagcactttgcggggctgaggtggttggaccacctcaggtcgggagttcaagaccagcctggccaacatagtgaaaccccatctctactaaaaatacaaaaattagctgggtgtatggcgcccacctgtaatcctagctgctcagggggctgagtcatgggaatcacttgaacctgggaggcagagtttgcagtgagccgagagtgcgccacttcactccagcctgggcaacagagtgagactccatctcaaaaaaaaaaaaaaaatcccacagtcatcgaaacacaaaaggggtctcagactcccctgagggtggaggagctgtgcctgcatgctggcaggccacagcccctggctttgtgcccacttaggcagtattatcaacaaggtcctgctcagtgtccagcccccgctgagttcagaaatgcatctgccaatcagcagcaggattctgcagctccttttgtgccaagcccgttcccaccaggcaggctcgagataaagtcatcacagccttccctcatctgcagggagagaagttgctgtcagatgaatgtgagcagtctagcctggatgacatatttttcgttttgaattaaaagcactggctgtgtgattttaccctct

SEQ ID NO: 437655 - DNA, 152 bp, Homo sapiens
gcggccgcctactactactactgctcgaattcaagcttctaacgatgtacggggacatgccacacaccgtctctcgaggaaacgcggttcagcgattctttgactgcggaccctgtgggaaaccccgtcaataaatgttaaagacacactcc

SEQ ID NO: 437656 - DNA, 1804 bp, Homo sapiens
agccgagggggcgcggagaaggcggggaatcatggccgcccccagtgttccgcgtccgggggtttgtgggagttgccttgacctgcagctccgccaccgcggacccgccttctgccctcagcagcagacgctctgtcccgcccgggcagctctgcgaggcagcggctggagagggaaccatggggactgtgcacgcccggagtttggagcctcttccatcaagtggacctgattttggaggattaggagaagaagctgaatttgttgaagttgagcctgaagctaaacaggaaattcttgaaaacaaagatgtggttgttcaacatgttcattttgatggacttggaaggactaaagatgatatcatcatttgtgaaattggagatgttttcaaggccaaaaacctaattgaggtaatgcggaaatctcatgaagcccgtgaaaaattgctccgtcttggaatttttagacaagtggatgttttgattgacacatgtcaaggtgatgacgcacttccaaatgggttagacgttacctttgaagtaactgaattgaggagattaacgggcagttataacaccatggttgggaacaatgaaggcagtatggtacttggcctcaagcttcctaatcttcttggtcgtgcagaaaaggtgacctttcagttttcctatggaacaaaagaaacttcgtatggcctgtccttcttcaaaccacggcccggaaacttcgaaagaaatttctctgtaaacttatataaagttactggacagttcccttggagctcactgcgggagacggacagaggaatgtcagctgagtacagttttcccatatggaagaccagccacactgtcaagtgggaaggcgtatggcgagaactgggctgcctctcaaggacggcgtcatttgctgttcgaaaagaaagcggacattcactgaaatcatctctttcgcacgccatggtcatcgattctcggaattcttccatcttaccaaggagaggtgctttgctgaaagttaaccaggaactggcaggctacactggcggggatgtgagcttcatcaaagaagattttgaacttcagttgaacaagcaactcatatttgattcagttttttcagcgtctttctggggcggaatgttggtacccattggtgataagccgtcaagcattgctgataggttttacctcgggggacccacaagcgtccgcggattcagcatgcacagcatcgggccacagagcgaaggagactacctaggtggagaagcgtactgggccggcggcctgcacctctacaccccattacctttccggccaggccagggtggctttggagaacttttccgaacacacttctttctcaacgcaggaaacctctgcaacctcaactatggggagggccccaaagctcatattcgtaagctggctgagtgcatccgctggtcgtacggggccgggattgtcctcaggcttggcaacatcgctcggttggaacttaattactgcgtccccatgggagtacagacaggcgacaggatatgtgatggcgtccagtttggagctgggataaggttcctgtagccgacacccctacaggagaagctctgggactggggcagcagcaaggcgcccatgccacacaccgtctctcgaggaaacgcggttcagcgattctttgactgcggaccctgtgggaaaccccgtcaataaatgttaaagacacactccacgcacacaaacacacggggggcgcccaaaataccccgggggccagctacgtaccccctctgtcaagg

SEQ ID NO: 437657 - DNA, 1000 bp, Homo sapiens
cattggccttgccccatgcacaggctccaggcggacagagctgctgcaggcatgctgtcagggggacaggctgccccccagctgtgcatggcagtgtgtcggaaagaacaaggcctgtgggtgcccctgagccgggtctggagtcctgtcctgccacttctcagccgtgtgactggagcctctttgctcctctctgaaaatgggtctggtggtttgttcccaggttcttaaccactgtgtggagtcacacctgcagaaggtcagctcataacagatatggcaaccaatgtgacctttgcatccttccttcctggggtcaggagcaggtctaagaggtggtcaggctaaacccctgtagggctgtgggtactgctggtttcctaagccccgggaccttctgggggccgggcggaccttaagttctgtccacctgcctctcctccatcctcactacccaccttgtccttccggctccttccctccctgctccgcctctcatcggccctctgtcctctccgtccggagaggggaacgtgaaggaggtgaggagggagtagtgcaggaggatttgggtctctccttctttcccttttccattctccgagggcttaaccagctggtgaaggttcttaaccagcaaaggaggaagcagccggggccggtgagggtgaggccggcagccaggcaggaaggcagcaggaggaggaggaagcggaggcggcaccttctgagaggcgcatgctcagtgagtcgtgaagatggcagggctggcggagcggccgcatctgatctctcccctttttttaggatatgtgatggcgtccagtttggagctgggataaggttcctgtagccgacacccctacaggagaagctctgggactggggcagcagcaaggcgcccatgccacacaccgtctctcgaggaaacgcggttcagcgattctttgactgcggaccctgtgggaaaccccgtcaataaatgttaaagacacactcc

SEQ ID NO: 437658 - DNA, 1068 bp, Homo sapiens
agccgagggggcgcggagaaggcggggaatcatggccgcccccagtgttccgcgtccgggggtttgtgggagttgccttgacctgcagctccgccaccgcggacccgccttctgccctcagcagcagacgctctgtcccgcccgggcagctctgcgaggcagcggctggagagggaaccatggggactgtgcacgcccggtgaccaccagtgagttaaccaccaagccaagaacttgctcattagcaatagctgacggcacctttttactccctggtccctattcctgcccctacctctacttgaagggaacaactactgaattttctgcagcaccatctaaagacaaaactcaaaggtggttgttcaacatgttcattttgatggacttggaaggactaaagatgatatcatcatttgtgaaattggagatgttttcaaggccaaaaacctaattgaggtaatgcggaaatctcatgaagcccgtgaaaaattgctccgtcttggaatttttagacaagtggatgttttgattgacacatgtcaaggtgatgacgcacttccaaatgggttagacgttacctttgaagtaactgaattgaggagattaacgggcagttataacaccatggttgggaacaatgaaggcagtatggtacttggcctcaagcttcctaatcttcttggtcgtgcagaaaaggtgacctttcagttttcctatggaacaaaagaaacttcgtatggcctgtccttcttcaaaccacggcccggaaacttcgaaagaaatttctctgtaaacttatataaagttactggacagttcccttgggcgcctaagtggaactgctccgtgtacctctgtgaggctgagggtggagtccatttgctgaccccacagcctgcatcctacccagatgtgtccagctgcagggggagcctcaggaaaaccggctgctgctactcctgtgaggaggactcctgtcaagtccgcatcaacacgaccatcctgtggcaccagggctgcgagaccgaggtcaacatcaccttctgcgagggctcacttcctcgt

SEQ ID NO: 437659 - DNA, 1134 bp, Homo sapiens
agccgagggggcgcggagaaggcggggaatcatggccgcccccagtgttccgcgtccgggggtttgtgggagttgccttgacctgcagctccgccaccgcggacccgccttctgccctcagcagcagacgctctgtcccgcccgggcagctctgcgaggcagcggctggagagggaaccatggggactgtgcacgcccggagtttggagcctcttccatcaagtggacctgattttggaggattaggagaagaagctgaatttgttgaagttgagcctgaagctaaacaggaaattcttgaaaacaaagatgtggttgttcaacatgttcattttgatggacttggaaggactaaagatgatatcatcatttgtgaaattggagatgttttcaaggccaaaaacctaattgaggtaatgcggaaatctcatgaagcccgtgaaaaattgctccgtcttggaatttttagacaagtggatgttttgattgacacatgtcaaggtgatgacgcacttccaaatgggttagacgttacctttgaagtaactgaattgaggagattaacgggcagttataacaccatggttgggaacaatgaaggcagtatggtacttggcctcaagcttcctaatcttcttggtcgtgcagaaaaggtgacctttcagttttcctatggaacaaaagaaacttcgtatggcctgtccttcttcaaaccacggcccggaaacttcgaaagaaatttctctgtaaacttatataaagttactggacagttcccttggagctcactgcgggagacggacagaggaatgtcagctgagtacagttttcccatatggaagaccagccacactgtcaagtgggaaggcgtatggcgagaactgggctgcctctcaaggacggcgtcatttgctgttcgaaaagaaagcggacattcactgaaatcatctctttcgcacgccatggtcatcgattctcggaattcttccatcttaccaaggagaggtgctttgctgaaagttaaccaggaactggcaggctacactggcggggatgtgagcttcatcaaagaagattttgaacttcagttgaacaagcaactcatatttgattcagtgagtatctaacggatgc

SEQ ID NO: 437660 - DNA, 1671 bp, Homo sapiens
gagctcctgcagcagagggtcccgtgtctgtgctactgaagtctacgcttgtgctcgatccggttgcttctcgttagatagtagtgtgactacgagatgccctgctgagtgtacccgtccgcattatggaatcctcttccatatattggtcctgaataaagagaggatataaggagaagaagctgaatttgtttgagtgttgagccatgaagcgtaaagaggagaatacttggaacaataacagatgtggttgttcaacatgttcattttgatggacttggaaggactaaagatgatatcatcatttgtgaaattggagatgttttcaaggccaaaaacctaattgaggtaatgcggaaatctcatgaagcccgtgaaaaattgctccgtcttggaatttttagacaagtggatgttttgattgacacatgtcaaggtgatgacgcacttccaaatgggttagacgttacctttgaagtaactgaattgaggagattaacgggcagttataacaccatggttgggaacaatgaaggcagtatggtacttggcctcaagcttcctaatcttcttggtcgtgcagaaaaggtgacctttcagttttcctatggaacaaaagaaacttcgtatggcctgtccttcttcaaaccacggcccggaaacttcgaaagaaatttctctgtaaacttatataaagttactggacagttcccttggagctcactgcgggagacggacagaggaatgtcagctgagtacagttttcccatatggaagaccagccacactgtcaagtgggaaggcgtatggcgagaactgggctgcctctcaaggacggcgtcatttgctgttcgaaaagaaagcggacattcactgaaatcatctctttcgcacgccatggtcatcgattctcggaattcttccatcttaccaaggagaggtgctttgctgaaagttaaccaggaactggcaggctacactggcggggatgtgagcttcatcaaagaagattttgaacttcagttgaacaagcaactcatatttgattcagttttttcagcgtctttctggggcggaatgttggtacccattggtgataagccgtcaagcattgctgataggttttacctcgggggacccacaagcgtccgcggattcagcatgcacagcatcgggccacagagcgaaggagactacctaggtggagaagcgtactgggccggcggcctgcacctctacaccccattacctttccggccaggccagggtggctttggagaacttttccgaacacacttctttctcaacgcaggaaacctctgcaacctcaactatggggagggccccaaagctcatattcgtaagctggctgagtgcatccgctggtcgtacggggccgggattgtcctcaggcttggcaacatcgctcggttggaacttaattactgcgtccccatgggagtacagacaggcgacaggatatgtgatggcgtccagtttggagctgggataaggttcctgtagccgacacccctacaggagaagctctgggactggggcagcagcaaggcgcccatgccacacaccgtctctcgaggaaacgcggttcagcgattctttgactgcggaccctgtgggaaaccccgtcaataaatgttaaagacacactcc

SEQ ID NO: 437661 - DNA, 1634 bp, Homo sapiens
agccgagggggcgcggagaaggcggggaatcatggccgcccccagtgttccgcgtccgggggtttgtgggagttgccttgacctgcagctccgccaccgcggacccgccttctgccctcagcagcagacgctctgtcccgcccgggcagctctgcgaggcagcggctggagagggaaccatggggactgtgcacgcccggagtttggagcctcttccatcaagtggacctgattttggaggattaggagaagaagctgaatttgttgaagttgagcctgaagctaaacaggaaattcttgaaaacaaagatgtaatgcggaaatctcatgaagcccgtgaaaaattgctccgtcttggaatttttagacaagtggatgttttgattgacacatgtcaaggtgatgacgcacttccaaatgggttagacgttacctttgaagtaactgaattgaggagattaacgggcagttataacaccatggttgggaacaatgaaggcagtatggtacttggcctcaagcttcctaatcttcttggtcgtgcagaaaaggtgacctttcagttttcctatggaacaaaagaaacttcgtatggcctgtccttcttcaaaccacggcccggaaacttcgaaagaaatttctctgtaaacttatataaagttactggacagttcccttggagctcactgcgggagacggacagaggaatgtcagctgagtacagttttcccatatggaagaccagccacactgtcaagtgggaaggcgtatggcgagaactgggctgcctctcaaggacggcgtcatttgctgttcgaaaagaaagcggacattcactgaaatcatctctttcgcacgccatggtcatcgattctcggaattcttccatcttaccaaggagaggtgctttgctgaaagttaaccaggaactggcaggctacactggcggggatgtgagcttcatcaaagaagattttgaacttcagttgaacaagcaactcatatttgattcagttttttcagcgtctttctggggcggaatgttggtacccattggtgataagccgtcaagcattgctgataggttttacctcgggggacccacaagcgtccgcggattcagcatgcacagcatcgggccacagagcgaaggagactacctaggtggagaagcgtactgggccggcggcctgcacctctacaccccattacctttccggccaggccagggtggctttggagaacttttccgaacacacttctttctcaacgcaggaaacctctgcaacctcaactatggggagggccccaaagctcatattcgtaagctggctgagtgcatccgctggtcgtacggggccgggattgtcctcaggcttggcaacatcgctcggttggaacttaattactgcgtccccatgggagtacagacaggcgacaggatatgtgatggcgtccagtttggagctgggataaggttcctgtagccgacacccctacaggagaagctctgggactggggcagcagcaaggcgcccatgccacacaccgtctctcgaggaaacgcggttcagcgattctttgactgcggaccctgtgggaaaccccgtcaataaatgttaaagacacactcc

SEQ ID NO: 437662 - DNA, 1022 bp, Homo sapiens
agccgagggggcgcggagaaggcggggaatcatggccgcccccagtgttccgcgtccgggggtttgtgggagttgccttgacctgcagctccgccaccgcggacccgccttctgccctcagcagcagacgctctgtcccgcccgggcagctctgcgaggcagcggctggagagggaaccatggggactgtgcacgcccggagtttggagcctcttccatcaagtggacctgattttggaggattaggagaagaagctgaatttgttgaagttgagcctgaagctaaacaggaaattcttgaaaacaaagatgtggttgttcaacatgttcattttgatggacttggaaggactaaagatgatatcatcatttgtgaaattggagatgttttcaaggccaaaaacctaattgaggtaatgcggaaatctcatgaagcccgtgaaaaattgctccgtcttggaatttttagacaagtggatgttttgattgacacatgtcaaggtgatgacgcacttccaaatgggttagacgttacctttgaagtaactgaattgaggagattaacgggcagttataacaccatggttgggaacaatgaaggcagtatggtacttggcctcaagcttcctaatcttcttggtcgtgcagaaaaggtgacctttcagttttcctatggaacaaaagaaacttcgtatggcctgtccttcttcaaaccacggcccggaaacttcgaaagaaatttctctgtaaacttatataaagttactggacagttcccttgggcgcctaagtggaactgctccgtgtacctctgtgaggctgagggtggagtccatttgctgaccccacagcctgcatcctacccagatgtgtccagctgcagggggagcctcaggaaaaccggctgctgctactcctgtgaggaggactcctgtcaagtccgcatcaacacgaccatcctgtggcaccagggctgcgagaccgaggtcaacatcaccttctgcgagggctcacttcctcgt

SEQ ID NO: 437663 - DNA, 1267 bp, Homo sapiens
agttagtcttgaagacatcagtattttcccatttcatggtctgtcattttgtattagaggagagtaagacactgtataaatggtattttgcaacaaagtataaacctttgggttgtatgttttctgttgctttatagtttaaaatggaatggacaggaacgtttttagaaatatgcaaatacatgctctcagtggataggcttacactttggcaaaagtaacctaaatccaagcggtcatgaaccgttgagaattgtctcttctctggagacactgagctggaacctggtctcgctgtgcagtgggtggcaggcagcctctgccttttgattaatcatgtgcagctgtctccacacactgcagagacgctttctgcattttgtctctattgcgctctcgaaaatttggcaaaataatgcatttcatttgcaggtggaagtgagttggtcatctacatttgtggataaagttattgtcatgagactcatttcttcaaagcatttcacagatacgatgaatgacagagtgcattccttcctcaacgacattggctttgtttgcctcctcagttaaatcaaggtgtgaaacaaaccaggagaaaaagaaagattatttaaaatgaggccatcagtatcaggaatgagaagaacagctgctgtgcaaactccagcacttgtgtggcgttgtttacaggacagaaatcttgcttctgtaagttgtggaaagttaacgtgatgttaaccttgtcggaccttgtttttgttctgcacccctcctttgcttaggagactacctaggtggagaagcgtactgggccggcggcctgcacctctacaccccattacctttccggccaggccagggtggctttggagaacttttccgaacacacttctttctcaacgcaggaaacctctgcaacctcaactatggggagggccccaaagctcatattcgtaagctggctgagtgcatccgctggtcgtacggggccgggattgtcctcaggcttggcaacatcgctcggttggaacttaattactgcgtccccatgggagtacagacaggcgacaggatatgtgatggcgtccagtttggagctgggataaggttcctgtagccgacacccctacaggagaagctctgggactggggcagcagcaaggcgcccatgccacacaccgtctctcgaggaaacgcggttcagcgattctttgactgcggaccctgtgggaaaccccgtcaataaatgttaaagacacactcc

SEQ ID NO: 437664 - DNA, 437 bp, Homo sapiens
tggccttttctagaaattgcccacagcttgcaaaaaggctgtgttccctggccccggctgcggctgtgtaggagtctgaatatcattttccccagaagttgagggtgaggccggcagccaggcaggaaggcagcaggaggaggaggaagcggaggcggcaccttctgagaggcgcatgctcagtgagtcgtgaagatggcagggctggcggagcggccgcatctgatctctcccctttttttaggatatgtgatggcgtccagtttggagctgggataaggttcctgtagccgacacccctacaggagaagctctgggactggggcagcagcaaggcgcccatgccacacaccgtctctcgaggaaacgcggttcagcgattctttgactgcggaccctgtgggaaaccccgtcaataaatgttaaagacacactcc

SEQ ID NO: 437665 - DNA, 1736 bp, Homo sapiens
agccgagggggcgcggagaaggcggggaatcatggccgcccccagtgttccgcgtccgggggtttgtgggagttgccttgacctgcagctccgccaccgcggacccgccttctgccctcagcagcagacgctctgtcccgcccgggcagctctgcgaggcagcggctggagagggaaccatggggactgtgcacgcccggagtttggagcctcttccatcaagtggacctgattttggaggattaggagaagaagctgaatttgttgaagttgagcctgaagctaaacaggaaattcttgaaaacaaagatgtggttgttcaacatgttcattttgatggacttggaaggactaaagatgatatcatcatttgtgaaattggagatgttttcaaggccaaaaacctaattgaggtaatgcggaaatctcatgaagcccgtgaaaaattgctccgtcttggaatttttagacaagtggatgttttgattgacacatgtcaaggtgatgacgcacttccaaatgggttagacgttacctttgaagtaactgaattgaggagattaacgggcagttataacaccatggttgggaacaatgaaggcagtatggtacttggcctcaagcttcctaatcttcttggtcgtgcagaaaaggtgacctttcagttttcctatggaacaaaagaaacttcgtatggcctgtccttcttcaaaccacggcccggaaacttcgaaagaaatttctctgtaaacttatataaagttactggacagttcccttggagctcactgcgggagacggacagaggaatgtcagctgagtacagttttcccatatggaagaccagccacactgtcaagtgggaaggcgtatggcgagaactgggctgcctctcaaggacggcgtcatttgctgttcgaaaagaaagcggacattcactgaaatcatctctttcgcacgccatggtcatcgattctcggaattcttccatcttaccaaggagaggtgctttgctgaaagttaaccaggaactggcaggctacactggcggggatgtgagcttcatcaaagaagattttgaacttcagttgaacaagcaactcatatttgattcagttttttcagcgtctttctggggcggaatgttggtacccattggtgataagccgtcaagcattgctgataggttttacctcgggggacccacaagcgtccgcggattcagcatgcacagcatcgggccacagagcgaaggagactacctaggtggagaagcgtactgggccggcggcctgcacctctacaccccattacctttccggccaggccagggtggctttggagaacttttccgaacacacttctttctcaacgcaggaaacctctgcaacctcaactatggggagggccccaaagctcatattcgtaagctggctgagtgcatccgctggtcgtacggggccgggattgtcctcaggcttggcaacatcgctcggttggaacttaattactgcgtccccatgggagtacagacaggcgacaggatatgtgatggcgtccagtttggagctgggataaggttcctgtagccgacacccctacaggagaagctctgggactggggcagcagcaaggcgcccatgccacacaccgtctctcgaggaaacgcggttcagcgattctttgactgcggaccctgtgggaaaccccgtcaataaatgttaaagacacactcc

SEQ ID NO: 437666 - DNA, 394 bp, Homo sapiens
  misc_feature (47)..(48): n is a, c, g, or t
  misc_feature (50)..(50): n is a, c, g, or t
  misc_feature (56)..(56): n is a, c, g, or t
cgccaggaggggcccgcccggggccggacccgtatagtcttaaaaanngngtttcngtggggagggccccaaagctcatattcgtaagctggctgagtgcatccgctggtcgtacggggccgggattgtcctcaggcttggcaacatcgctcggttggaacttaattactgcgtccccatgggagtacagacaggcgacaggatatgtgatggcgtccagtttggagctgggataaggttcctgtagccgacacccctacaggagaagctctgggactggggcagcagcaaggcgcccatgccacacaccgtctctcgaggaaacgcggttcagcgattctttgactgcggaccctgtgggaaaccccgtcaataaatgttaaagacacactcc

SEQ ID NO: 437667 - DNA, 1733 bp, Homo sapiens
aaagataaaatctcaaatctggctagttagcaggtatgtctccatggttccgcggtcgggcagatatgggagtaaggacctgcagctccgccaccgcggacccgccttctgccctcagcagcagacgctctgtcccgcccgggcagctctgcgaggcagcggctggagagggaaccatggggactgtgcacgcccggagtttggagcctcttccatcaagtggacctgattttggaggattaggagaagaagctgaatttgttgaagttgagcctgaagctaaacaggaaattcttgaaaacaaagatgtggttgttcaacatgttcattttgatggacttggaaggactaaagatgatatcatcatttgtgaaattggagatgttttcaaggccaaaaacctaattgaggtaatgcggaaatctcatgaagcccgtgaaaaattgctccgtcttggaatttttagacaagtggatgttttgattgacacatgtcaaggtgatgacgcacttccaaatgggttagacgttacctttgaagtaactgaattgaggagattaacgggcagttataacaccatggttgggaacaatgaaggcagtatggtacttggcctcaagcttcctaatcttcttggtcgtgcagaaaaggtgacctttcagttttcctatggaacaaaagaaacttcgtatggcctgtccttcttcaaaccacggcccggaaacttcgaaagaaatttctctgtaaacttatataaagttactggacagttcccttggagctcactgcgggagacggacagaggaatgtcagctgagtacagttttcccatatggaagaccagccacactgtcaagtgggaaggcgtatggcgagaactgggctgcctctcaaggacggcgtcatttgctgttcgaaaagaaagcggacattcactgaaatcatctctttcgcacgccatggtcatcgattctcggaattcttccatcttaccaaggagaggtgctttgctgaaagttaaccaggaactggcaggctacactggcggggatgtgagcttcatcaaagaagattttgaacttcagttgaacaagcaactcatatttgattcagttttttcagcgtctttctggggcggaatgttggtacccattggtgataagccgtcaagcattgctgataggttttacctcgggggacccacaagcgtccgcggattcagcatgcacagcatcgggccacagagcgaaggagactacctaggtggagaagcgtactgggccggcggcctgcacctctacaccccattacctttccggccaggccagggtggctttggagaacttttccgaacacacttctttctcaacgcaggaaacctctgcaacctcaactatggggagggccccaaagctcatattcgtaagctggctgagtgcatccgctggtcgtacggggccgggattgtcctcaggcttggcaacatcgctcggttggaacttaattactgcgtccccatgggagtacagacaggcgacaggatatgtgatggcgtccagtttggagctgggataaggttcctgtagccgacacccctacaggagaagctctgggactggggcagcagcaaggcgcccatgccacacaccgtctctcgaggaaacgcggttcagcgattctttgactgcggaccctgtgggaaaccccgtcaataaatgttaaagacacactcc

SEQ ID NO: 437668 - DNA, 1970 bp, Homo sapiens
agccgagggggcgcggagaaggcggggaatcatggccgcccccagtgttccgcgtccgggggtttgtgggagttgccttgacctgcagctccgccaccgcggacccgccttctgccctcagcagcagacgctctgtcccgcccgggcagctctgcgaggcagcggctggagagggaaccatggggactgtgcacgcccggagtttggagcctcttccatcaagtggacctgattttggaggattaggagaagaagctgaatttgttgaagttgagcctgaagctaaacaggaaattcttgaaaacaaagatgtggttgttcaacatgttcattttgatggacttggaaggactaaagatgatatcatcatttgtgaaattggagatgttttcaaggccaaaaacctaattgaggtaatgcggaaatctcatgaagcccgtgaaaaattgctccgtcttggaatttttagacaagtggatgttttgattgacacatgtcaaggtgatgacgcacttccaaatgggttagacgttacctttgaagtaactgaattgaggagattaacgggcagttataacaccatggttgggaacaatgaaggcagtatggtacttggcctcaagcttcctaatcttcttggtcgtgcagaaaaggtgacctttcagttttcctatggaacaaaagaaacttcgtatggcctgtccttcttcaaaccacggcccggaaacttcgaaagaaagtaggaagcccaacagatcattgagtacactggcctgatagaaaagttaaaataggtggcttatttgtgaaaagaaccatgacagaatcagctgccacttctgcagtgaccacatgctgtagatttcctcttgaagatgagccctacgggcgtagtgttaagtctgttgatttaaatgtgtgcaagttctaatcactgtttcagcttttaaagctctatcccattgtctcctagtttctctgtaaacttatataaagttactggacagttcccttggagctcactgcgggagacggacagaggaatgtcagctgagtacagttttcccatatggaagaccagccacactgtcaagtgggaaggcgtatggcgagaactgggctgcctctcaaggacggcgtcatttgctgttcgaaaagaaagcggacattcactgaaatcatctctttcgcacgccatggtcatcgattctcggaattcttccatcttaccaaggagaggtgctttgctgaaagttaaccaggaactggcaggctacactggcggggatgtgagcttcatcaaagaagattttgaacttcagttgaacaagcaactcatatttgattcagttttttcagcgtctttctggggcggaatgttggtacccattggtgataagccgtcaagcattgctgataggttttacctcgggggacccacaagcgtccgcggattcagcatgcacagcatcgggccacagagcgaaggagactacctaggtggagaagcgtactgggccggcggcctgcacctctacaccccattacctttccggccaggccagggtggctttggagaacttttccgaacacacttctttctcaacgcaggaaacctctgcaacctcaactatggggagggccccaaagctcatattcgtaagctggctgagtgcatccgctggtcgtacggggccgggattgtcctcaggcttggcaacatcgctcggttggaacttaattactgcgtccccatgggagtacagacaggcgacaggatatgtgatggcgtccagtttggagctgggataaggttcctgtagccgacacccctacaggagaagctctgggactggggcagcagcaaggcgcccatgccacacaccgtctctcgaggaaacgcggttcagcgattctttgactgcggaccctgtgggaaaccccgtcaataaatgttaaagacacactcc

SEQ ID NO: 437669 - DNA, 977 bp, Homo sapiens
taacggctaggtaggaggctgggtgttgaatcggccgaggggacagaggaatgtcagctgagtacagttttcccatatggaagaccagccacactgtcaagtgggaaggcgtatggcgagaactgggctgcctctcaaggacggcgtcatttgctgttcgaaaagaaagcggacattcactgaaatcatctctttcgcacgccatggtcatcgattctcggaattcttccatcttaccaaggagaggtgctttgctgaaagttaaccaggaactggcaggctacactggcggggatgtgagcttcatcaaagaagattttgaacttcagttgaacaagcaactcatatttgattcagttttttcagcgtctttctggggcggaatgttggtacccattggtgataagccgtcaagcattgctgataggttttacctcgggggacccacaagcgtccgcggattcagcatgcacagcatcgggccacagagcgaaggagactacctaggtggagaagcgtactgggccggcggcctgcacctctacaccccattacctttccggccaggccagggtggctttggagaacttttccgaacacacttctttctcaacgcaggaaacctctgcaacctcaactatggggagggccccaaagctcatattcgtaagctggctgagtgcatccgctggtcgtacggggccgggattgtcctcaggcttggcaacatcgctcggttggaacttaattactgcgtccccatgggagtacagacaggcgacaggatatgtgatggcgtccagtttggagctgggataaggttcctgtagccgacacccctacaggagaagctctgggactggggcagcagcaaggcgcccatgccacacaccgtctctcgaggaaacgcggttcagcgattctttgactgcggaccctgtgggaaaccccgtcaataaatgttaaagacacactcc

SEQ ID NO: 437670 - DNA, 776 bp, Homo sapiens
agccgagggggcgcggagaaggcggggaatcatggccgcccccagtgttccgcgtccgggggtttgtgggagttgccttgacctgcagctccgccaccgcggacccgccttctgccctcagcagcagacgctctgtcccgcccgggcagctctgcgaggcagcggctggagagggaaccatggggactgtgcacgcccggagtttggagcctcttccatcaagtggacctgattttggaggattaggagaagaagctgaatttgttgaagttgagcctgaagctaaacaggaaattcttgaaaacaaagatgtggttgttcaacatgttcattttgatggacttggaaggactaaagatgatatcatcatttgtgaaattggagaacttttccgaacacacttctttctcaacgcaggaaacctctgcaacctcaactatggggagggccccaaagctcatattcgtaagctggctgagtgcatccgctggtcgtacggggccgggattgtcctcaggcttggcaacatcgctcggttggaacttaattactgcgtccccatgggagtacagacaggcgacaggatatgtgatggcgtccagtttggagctgggataaggttcctgtagccgacacccctacaggagaagctctgggactggggcagcagcaaggcgcccatgccacacaccgtctctcgaggaaacgcggttcagcgattctttgactgcggaccctgtgggaaaccccgtcaataaatgttaaagacacactcc

SEQ ID NO: 437671 - DNA, 2840 bp, Homo sapiens
cggggaagtcgcgcatgcgcgagtgtacgcgttgccggcgaagaggggagcctgacgactcggaaatttgaataccacagtagcatggagtgtgacctcatggagactgacatcttggagtcgttggaagatctaggttacaagggcccattgttggaagatggagcgctctctcaggcagtctctgctggagccagttcccccgagtttaccaaactctgtgcttggctggtgtctgaattaagagtgctctgtaaactagaggaaaacgtgcaagcaactaacagtccgagtgaagctgaagaattccagcttgaggtgagtgggctactaggggagatgaactgcccgtatctttcactgacatctggggatgtgaccaagcgccttctcattcagaagaactgcctcctcttgctcacatacctcatctcagaactagaagctgccagaatgctctgtgtgaatgctcctccaaaaaaagctcaagaaggaggcggtagtgaggtctttcaagagttgaaaggcatatgtattgctctaggaatgtccaaacctccagccaatataactatgttccaattcttcagcgggattgaaaaaaaattaaaggaaacattagcaaaagttccacctaatcatgtgggaaagcctttactgaagaagccaatgggaccagcccactgggaaaagatagaagcaattaaccaagccatagccaatgaatatgaagtccggagaaagctgctaataaaacgtttggatgtcactgtacaatcctttggctggtctgacagagctaagagccagacagaaaaattagccaaggtttaccagccgaaacgttcagtcttatcccctaaaactactatttctgttgcccatcttttggctgcaaggcaggacttgtcaaagattttaaggacaagcagcggctctataagagaaaagactgcctgtgccatcaataaggtgattagagtacctttaattttttccaaatgcatttatttctgttcataaaataaaagtttaaaatatctttcctattctgtaggtgttgatgggcagggtgcctgacagaggtggtagacccaatgaaatcgaacctccacccccagagatgccaccgtggcagaagaggcaagatggcccccagcagcaaacaggaggccgaggaggagggagaggtggctatgaacattcctcatacggaggacgaggaggtcatgaacaaggaggcgggagaggtggacgtggtggctatgaccatggtggccgagggggaggaagaggaaataagcatcaaggaggctggacagatggagggagtggtggaggaggtggctaccaagatggtggttatcgagattcaggtttccagccaggtggctatcatggtggccacagcagtggtggctatcaaggcggaggttatggtggcttccaaacatcttcttcatatacaggaagtggataccagggtggtggctaccagcaggacaatagataccaagatggcgggcaccatggtgatcgtggtggtggtcgtggtgggcgaggtggtcgtggaggccgaggtggtcgtgcaggccagggaggaggctggggaggaagagggagccagaattatcaccaagggggtcaatttgaacagcatttccagcatggaggttatcagtataatcattctggatttggacagggaagacattacactagttgaggctaccgaaccttacattttgctagagctcaagtaatagaaacttagtttcagaatcctgaattcagcacctattttgaattaatgtgagaccacaggtggcaggcagattcctgcttggcataagcatttgtaggtcttcattcaattctgttagatttttttattggacttacataatgccgtttatttgagaaacacataacatctctcctttctatgaaaaattttttaaaaggtggttaaaattgcctttaattgcccagtagactaattccacagtcagaacatgcaaacttttttgaagaaattacttgaataagtagttttcatgttttcaatatgcagttttgaaaatgaggattcacctagacttttttagatttactactaggaaaccttcctcatatgaataaccatttatatgtgttttgcttaaagtattccaatgcctattttccaagcacagttctgccccccggttgacttttatgccacgtgtgcttcatgatggaacttttaggtcagttcctattaaatgagctcttctgcagatagcacattcagtagccttattttgttgatggaatactgtatcatatgctcaactctgaaaaccttgaacacggccaaaatccataaagattataaaagcaaactaagttgtgaagctatagtacatgtaggcatttagttaagtatagcaattcaaactgacctgcatccatccaaaacaaattcctccttcaaccttatttttacttgaaatttgctagaagaaatagcaaaccgaaatttgttttatgcatgagttaataccactggctcagcaaatacaagttagtttgctttaagcaggtaactttttttgtaatggaagaaatgcactacaaagttaagacagatttttgctaagtgcaggaggccctttattattgctgcagaaaacaaaagcctggctgagttgatgttttacattctcccttactgaaatctacatgacatgatgcttcttgctgggtttttgtacatgtaaacattgtcaagctgtgaaagaaaatggctggaggtgtgctttgtgtgaaaggtgagcaataaagtatctgttaagttc

SEQ ID NO: 437672 - DNA, 1698 bp, Homo sapiens
cggggaagtcgcgcatgcgcgagtgtacgcgttgccggcgaagaggggagcctgacgactcggaaatttgaataccacagtagcatggagtgtgacctcatggagactgacatcttggagtcgttggaagatctaggttacaagggcccattgttggaagatggagcgctctctcaggcagtctctgctggagccagttcccccgagtttaccaaactctgtgcttggctggtgtctgaattaagagtgctctgtaaactagaggaaaacgtgcaagcaactaacagtccgagtgaagctgaagaattccagcttgaggtgagtgggctactaggggagatgaactgcccgtatctttcactgacatctggggatgtgaccaagcgccttctcattcagaagaactgcctcctcttgctcacatacctcatctcagaactagaagctgccagaatgctctgtgtgaatgctcctccaaaaaaagctcaagaaggaggcggtagtgaggtctttcaagagttgaaaggcatatgtattgctctaggaatgtccaaacctccagccaatataactatgttccaattcttcagcgggattgaaaaaaaattaaaggaaacattagcaaaagttccacctaatcatgtgggaaagcctttactgaagaagccaatgggaccagcccactgggaaaagatagaagcaattaaccaagccatagccaatgaatatgaagtccggagaaagctgctaataaaacgtttggatgtcactgtacaatcctttggctggtctgacagagctaagagccagacagaaaaattagccaaggtttaccagccgaaacgttcagtcttatcccctaaaactactatttctgttgcccatcttttggctgcaaggcaggacttgtcaaagattttaaggacaagcagcggctctataagagaaaagactgcctgtgccatcaataaggtgattagagtacctttaattttttccaaatgcatttatttctgttcataaaataaaagtttaaaatatctttcctattctgtaggtgttgatgggcagggtgcctgacagaggtggtagacccaatgaaatcgaacctccacccccagagatgccaccgtggcagaagaggcaagatggcccccagcagcaaacaggaggccgaggaggagggagaggtggctatgaacattcctcatacggaggacgaggaggtcatgaacaaggaggcgggagaggtggacgtggtggctatgaccatggtggccgagggggaggaagaggaaataagcatcaaggaggctggacagatggagggagtggtggaggaggtggctaccaagatggtggttatcgagattcaggtttccagccaggtggctatcatggtggccacagcagtggtggctatcaaggcggaggttatggtggcttccaaacatcttcttcatatacaggaagtggataccagggtggtggctaccagcaggacaatagataccaagatggcgggcaccatggtgatcgtggtggtggtcgtggtgggcgaggtggtcgtggaggccgaggtggtcgtgcaggccagggaggaggctgtaattccagcatctgggaggccgaggcaggcggatcactgaggaggagtcgagaccagctgggcaacaggcgaaaccctattccccaaaa

SEQ ID NO: 437673 - DNA, 2755 bp, Homo sapiens
cggggaagtcgcgcatgcgcgagtgtacgcgttgccggcgaagaggggagcctgacgactcggaaatttgaataccacagtagcatggagtgtgacctcatggagactgacatcttggagtcgttggaagatctaggttacaagggcccattgttggaagatggagcgctctctcaggcagtctctgctggagccagttcccccgagtttaccaaactctgtgcttggctggtgtctgaattaagagtgctctgtaaactagaggaaaacgtgcaagcaactaacagtccgagtgaagctgaagaattccagcttgaggtgagtgggctactaggggagatgaactgcccgtatctttcactgacatctggggatgtgaccaagcgccttctcattcagaagaactgcctcctcttgctcacatacctcatctcagaactagaagctgccagaatgctctgtgtgaatgctcctccaaaaaaagctcaagaaggaggcggtagtgaggtctttcaagagttgaaaggcatatgtattgctctaggaatgtccaaacctccagccaatataactatgttccaattcttcagcgggattgaaaaaaaattaaaggaaacattagcaaaagttccacctaatcatgtgggaaagcctttactgaagaagccaatgggaccagcccactgggaaaagatagaagcaattaaccaagccatagccaatgaatatgaagtccggagaaagctgctaataaaacgtttggatgtcactgtacaatcctttggctggtctgacagagctaagagccagacagaaaaattagccaaggtttaccagccgaaacgttcagtcttatcccctaaaactactatttctgttgcccatcttttggctgcaaggcaggacttgtcaaagattttaaggacaagcagcggctctataagagaaaagactgcctgtgccatcaataaggtgttgatgggcagggtgcctgacagaggtggtagacccaatgaaatcgaacctccacccccagagatgccaccgtggcagaagaggcaagatggcccccagcagcaaacaggaggccgaggaggagggagaggtggctatgaacattcctcatacggaggacgaggaggtcatgaacaaggaggcgggagaggtggacgtggtggctatgaccatggtggccgagggggaggaagaggaaataagcatcaaggaggctggacagatggagggagtggtggaggaggtggctaccaagatggtggttatcgagattcaggtttccagccaggtggctatcatggtggccacagcagtggtggctatcaaggcggaggttatggtggcttccaaacatcttcttcatatacaggaagtggataccagggtggtggctaccagcaggacaatagataccaagatggcgggcaccatggtgatcgtggtggtggtcgtggtgggcgaggtggtcgtggaggccgaggtggtcgtgcaggccagggaggaggctggggaggaagagggagccagaattatcaccaagggggtcaatttgaacagcatttccagcatggaggttatcagtataatcattctggatttggacagggaagacattacactagttgaggctaccgaaccttacattttgctagagctcaagtaatagaaacttagtttcagaatcctgaattcagcacctattttgaattaatgtgagaccacaggtggcaggcagattcctgcttggcataagcatttgtaggtcttcattcaattctgttagatttttttattggacttacataatgccgtttatttgagaaacacataacatctctcctttctatgaaaaattttttaaaaggtggttaaaattgcctttaattgcccagtagactaattccacagtcagaacatgcaaacttttttgaagaaattacttgaataagtagttttcatgttttcaatatgcagttttgaaaatgaggattcacctagacttttttagatttactactaggaaaccttcctcatatgaataaccatttatatgtgttttgcttaaagtattccaatgcctattttccaagcacagttctgccccccggttgacttttatgccacgtgtgcttcatgatggaacttttaggtcagttcctattaaatgagctcttctgcagatagcacattcagtagccttattttgttgatggaatactgtatcatatgctcaactctgaaaaccttgaacacggccaaaatccataaagattataaaagcaaactaagttgtgaagctatagtacatgtaggcatttagttaagtatagcaattcaaactgacctgcatccatccaaaacaaattcctccttcaaccttatttttacttgaaatttgctagaagaaatagcaaaccgaaatttgttttatgcatgagttaataccactggctcagcaaatacaagttagtttgctttaagcaggtaactttttttgtaatggaagaaatgcactacaaagttaagacagatttttgctaagtgcaggaggccctttattattgctgcagaaaacaaaagcctggctgagttgatgttttacattctcccttactgaaatctacatgacatgatgcttcttgctgggtttttgtacatgtaaacattgtcaagctgtgaaagaaaatggctggaggtgtgctttgtgtgaaaggtgagcaataaagtatctgttaagttc

SEQ ID NO: 437674 - DNA, 2808 bp, Homo sapiens
  misc_feature (2769)..(2769): n is a, c, g, or t
cggggaagtcgcgcatgcgcgagtgtacgcgttgccggcgaagaggggagcctgacgactcggaaatttgaataccacagtagcatggagtgtgacctcatggagactgacatcttggagtcgttggaagatctaggttacaagggcccattgttggaagatggagcgctctctcaggcagtctctgctggagccagttcccccgagtttaccaaactctgtgcttggctggtgtctgaattaagagtgctctgtaaactagaggaaaacgtgcaagcaactaacagtccgagtgaagctgaagaattccagcttgaggtgagtgggctactaggggagatgaactgcccgtatctttcactgacatctggggatgtgaccaagcgccttctcattcagaagaactgcctcctcttgctcacatacctcatctcagaactagaagctgccagaatgctctgtgtgaatgctcctccaaaaaaagctcaagaaggaggcggtagtgaggtctttcaagagttgaaaggcatatgtattgctctaggaatgtccaaacctccagccaatataactatgttccaattcttcagcgggattgaaaaaaaattaaaggaaacattagcaaaagttccacctaatcatgtgggaaagcctttactgaagaagccaatgggaccagcccactgggaaaagatagaagcaattaaccaagccatagccaatgaatatgaagtccggagaaagctgctaataaaacgtttggatgtcactgtacaatcctttggctggtctgacagagctaagagccagacagaaaaattagccaaggtttaccagccgaaacgttcagtcttatcccctaaaactactatttctgttgcccatcttttggctgcaaggcaggacttgtcaaagattttaaggacaagcagcggctctataagagaaaagactgcctgtgccatcaataaggtgttgatgggcagggtgcctgacagaggtggtagacccaatgaaatcgaacctccacccccagagatgccaccgtggcagaagaggcaagatggcccccagcagcaaacaggaggccgaggaggagggagaggtggctatgaacattcctcatacggaggacgaggaggtcatgaacaaggaggcgggagaggtggacgtggtggctatgaccatggtggccgagggggaggaagaggaaataagcatcaaggaggctggacagatggagggagtggtggaggaggtggctaccaagatggtggttatcgagattcaggtttccagccaggtggctatcatggtggccacagcagtggtggctatcaaggcggaggttatggtggcttccaaacatcttcttcatatacaggaagtggataccagggtggtggctaccagcaggacaatagataccaagatggcgggcaccatggtgatcgtggtggtggtcgtggtgggcgaggtggtcgtggaggccgaggtggtcgtgcaggccagggaggaggctggggaggaagagggagccagaattatcaccaagggggtcaatttgaacagcatttccagcatggaggttatcagtataatcattctggatttggacagggaagacattacactagttgaggctaccgaaccttacattttgctagagctcaagtaatagaaacttagtttcagaatcctgaattcagcacctattttgaattaatgtgagaccacaggtggcaggcagattcctgcttggcataagcatttgtaggtcttcattcaattctgttagatttttttattggacttacataatgccgtttatttgagaaacacataacatctctcctttctatgaaaaattttttaaaaggtggttaaaattgcctttaattgcccagtagactaattccacagtcagaacatgcaaacttttttgaagaaattacttgaataagtagttttcatgttttcaatatgcagttttgaaaatgaggattcacctagacttttttagatttactactaggaaaccttcctcatatgaataaccatttatatgtgttttgcttaaagtattccaatgcctattttccaagcacagttctgccccccggttgacttttatgccacgtgtgcttcatgatggaacttttaggtcagttcctattaaatgagctcttctgcagatagcacattcagtagccttattttgttgatggaatactgtatcatatgctcaactctgaaaaccttgaacacggccaaaatccataaagattataaaagcaaactaagttgtgaagctatagtacatgtaggcatttagttaagtatagcaattcaaactgacctgcatccatccaaaacaaattcctccttcaaccttatttttacttgaaatttgctagaagaaatagcaaaccgaaatttgttttatgcatgagttaataccactggctcagcaaatacaagttagtttgctttaagcaggtaactttttttgtaatggaagaaatgcactacaaagttaagacagatttttgctaagtgcaggaggccctttattattgctgcagaaaacaaaagcctggctgagttgatgttttacattctcccttactgaaatctacatgacatgatgcttcttgctgggtttttgtacatgtaaacattgtcaagctgtgaaagaaaatggctggaggtgtgctttgtgtgaaaggtgagcaataaagtatctgttaagttcaaaaaaaaaaaacnacactcttctaactaattaaacaatctataaaatctaaa

SEQ ID NO: 437675 - DNA, 725 bp, Homo sapiens
caaggaagtggagtctagttttagggtgggcaagtcagcaattacaaaagtgcaattaggtttgagcagaggaagcatgagagcacctaggaaaggagtctttagctttgtcttaaatttcagttatattaattatacagtacccatctcttttccactcctgaataacatctaacatctagaaactttatgaaaatcattattgatttgagcatttttaacattaacttgttgccttagacaccaactctacaacattacctgtcatatactgaagaatctcttcttccagttatgcagcacctggctaagaatgtagtcatggtaaatcaaggacttacaaagcacatggtgagtcaatatagtggcattgtaagatgctgaaaagtgtaataattcaaacttaatgcctgcaaatgcctggtttatttttaatgagttaatgttttaaatgaatacctgtatcattgcatcttgtgattttttttcttttgcctctttaattgctatctttttgtcttccagactgtcaagaacaagtatgccacatcgaagcatgctaagatcagcactctaccacagctgaattctgcactagttcaagatttagccaaggctgtggcaaaggtgtaacttgtaaacttgagttggagtactatatttacaaataaaattggcaccatgtgccatctgtacatattactgttgcatttacttttaataaa

SEQ ID NO: 437676 - DNA, 1596 bp, Homo sapiens
cgccaatgggaagggagtgagtgccacgaacaggccaataaggagggagcagtgcggggtttaaatctgaggctaggctggctcttctcggcgtgctgcggcggaacggctgttggtttctgctgggtgtaggtccttggctggtcgggcctccggtgttctgcttctccccgctgagctgctgcctggtgaagaggaagccatggcgctccgagtcaccaggaactcgaaaattaatgctgaaaataaggcgaagatcaacatggcaggcgcaaagcgcgttcctacggcccctgctgcaacctccaagcccggactgaggccaagaacagctcttggggacattggtaacaaagtcagtgaacaactgcaggccaaaatgcctatgaagaaggaagcaaaaccttcagctactggaaaagtcattgataaaaaactaccaaaacctcttgaaaaggtacctatgctggtgccagtgccagtgtctgagccagtgccagagccagaacctgagccagaacctgagcctgttaaagaagaaaaactttcgcctgagcctattttggttgatactgcctctccaagcccaatggaaacatctggatgtgcccctgcagaagaagacctgtgtcaggctttctctgatgtaattcttgcagtaaatgatgtggatgcagaagatggagctgatccaaacctttgtagtgaatatgtgaaagatatttatgcttatctgagacaacttgaggaagagcaagcagtcagaccaaaatacctactgggtcgggaagtcactggaaacatgagagccatcctaattgactggctagtacaggttcaaatgaaattcaggttgttgcaggagaccatgtacatgactgtctccattattgatcggttcatgcagaataattgtgtgcccaagaagatgctgcagctggttggtgtcactgccatgtttattgcaagcaaatatgaagaaatgtaccctccagaaattggtgactttgcttttgtgactgacaacacttatactaagcaccaaatcagacagatggaaatgaagattctaagagctttaaactttggtctgggtcggcctctacctttgcacttccttcggagagcatctaagattggagaggttgatgtcgagcaacatactttggccaaatacctgatggaactaactatgttggactatgacatggtgcactttcctccttctcaaattgcagcaggagctttttgcttagcactgaaaattctggataatggtgaatggacaccaactctacaacattacctgtcatatactgaagaatctcttcttccagttatgcagcacctggctaagaatgtagtcatggtaaatcaaggacttacaaagcacatgactgtcaagaacaagtatgccacatcgaagcatgctaagatcagcactctaccacagctgaattctgcactagttcaagatttagccaaggctgtggcaaaggtgtaacttgtaaacttgagttggagtactatatttacaaataaaattggcaccatgtgccatctgtacatattactgttgcatttacttttaataaa

SEQ ID NO: 437677 - DNA, 995 bp, Homo sapiens
  misc_feature (841)..(841): n is a, c, g, or t
cgccaatgggaagggagtgagtgccacgaacaggccaataaggagggagcagtgcggggtttaaatctgaggctaggctggctcttctcggcgtgctgcggcggaacggctgttggtttctgctgggtgtaggtccttggctggtcgggcctccggtgttctgcttctccccgctgagctgctgcctggtgaagaggaagccatggcgctccgagtcaccaggaactcgaaaattaatgctgaaaataaggcgaagatcaacatggcaggcgcaaagcgcgttcctacggcccctgctgcaacctccaagcccggactgaggccaagaacagctcttggggacattggtaacaaagtcagtgaacaactgcaggccaaaatgcctatgaagaaggaagcaaaaccttcagctactggaaaagtcattgataaaaaactaccaaaacctcttgaaaaggtacctatgctggtgccagtgccagtgtctgagccagtgccagagccagaacctgagccagaacctgagcctgttaaagaagaaaaactttcgcctgagcctattttggttgatactgcctctccaagcccaatggaaacatctggatgtgcccctgcagaagaagacctgtgtcaggctttctctgatgtaattcttgcagtaaatgatgtggatgcagaagatggagctgatccaaacctttgtagtgaatatgtgaaagatatttatgcttatctgagacaacttgaggaagagcaagcagtcagaccaaaatacctactgggtcgggaagtcactggaaacatgagagccatcctaattgactggctagtcacggtccantgactccggtgtggcgggaacctgttccctggatgcccctattggcggtctgcacataagggtggcccaaaaattctgttgtggtccgccctctttttgcattaaagtcccccaaggggcgtgtggggcacatatacacacaaagattaaatcg

SEQ ID NO: 437678 - DNA, 551 bp, Homo sapiens
caaggaagtggagtctagttttagggtgggcaagtcagcaattacaaaagtgcaattaggtttgagcagaggaagcatgagagcacctaggaaaggagtctttagctttgtcttaaatttcagttatattaattatacagtacccatctcttttccactcctgaataacatctaacatctagaaactttatgaaaatcattattgatttgagcatttttaacattaacttgttgccttagacaccaactctacaacattacctgtcatatactgaagaatctcttcttccagttatgcagcacctggctaagaatgtagtcatggtaaatcaaggacttacaaagcacatgactgtcaagaacaagtatgccacatcgaagcatgctaagatcagcactctaccacagctgaattctgcactagttcaagatttagccaaggctgtggcaaaggtgtaacttgtaaacttgagttggagtactatatttacaaataaaattggcaccatgtgccatctgtacatattactgttgcatttacttttaataaa

SEQ ID NO: 437679 - DNA, 687 bp, Homo sapiens
  misc_feature (51)..(51): n is a, c, g, or t
ggaggatggcagagcaggtctcggggtgcgtggggagagggtcggtggacnagggcaggtcaagatgccgatgaagaaggaagcaaaaccttcagctactggaaaagtcattgataaaaaactaccaaaacctcttgaaaaggtacctatgctggtgccagtgccagtgtctgagccagtgccagagccagaacctgagccagaacctgagcctgttaaagaagaaaaactttcgcctgagcctattttggttgatactgcctctccaagcccaatggaaacatctggatgtgcccctgcagaagaagacctgtgtcaggctttctctgatgtaattcttgcagtaaatgatgtggatgcagaagatggagctgatccaaacctttgtagtgaatatgtgaaagatatttatgcccatgtgtgctcagtatttaactctcacttataagtacgaacatgcggtatttgattttctcttcctgcattaattcgcttaggattatggcctccagcttcatccattttgccgtaaaggatatgattttgtgctccatttttaaaaaataatagctttattgagatataattcacatatcatacaagtcacccatatcaaaggtacaactcaatgttttttagtgtattagcagttgtgcagccatcaccaccgttttctacatttttatc

SEQ ID NO: 437680 - DNA, 2162 bp, Homo sapiens
  misc_feature (1621)..(1621): n is a, c, g, or t
  misc_feature (1625)..(1625): n is a, c, g, or t
  misc_feature (1628)..(1628): n is a, c, g, or t
  misc_feature (1633)..(1633): n is a, c, g, or t
  misc_feature (1644)..(1644): n is a, c, g, or t
  misc_feature (1646)..(1646): n is a, c, g, or t
  misc_feature (1651)..(1651): n is a, c, g, or t
cgccaatgggaagggagtgagtgccacgaacaggccaataaggagggagcagtgcggggtttaaatctgaggctaggctggctcttctcggcgtgctgcggcggaacggctgttggtttctgctgggtgtaggtccttggctggtcgggcctccggtgttctgcttctccccgctgagctgctgcctggtgaagaggaagccatggcgctccgagtcaccaggaactcgaaaattaatgctgaaaataaggcgaagatcaacatggcaggcgcaaagcgcgttcctacggcccctgctgcaacctccaagcccggactgaggccaagaacagctcttggggacattggtaacaaagtcagtgaacaactgcaggccaaaatgcctatgaagaaggaagcaaaaccttcagctactggaaaagtcattgataaaaaactaccaaaacctcttgaaaaggtacctatgctggtgccagtgccagtgtctgagccagtgccagagccagaacctgagccagaacctgagcctgttaaagaagaaaaactttcgcctgagcctattttggttgatactgcctctccaagcccaatggaaacatctggatgtgcccctgcagaagaagacctgtgtcaggctttctctgatgtaattcttgcagtaaatgatgtggatgcagaagatggagctgatccaaacctttgtagtgaatatgtgaaagatatttatgcttatctgagacaacttgaggaagagcaagcagtcagaccaaaatacctactgggtcgggaagtcactggaaacatgagagccatcctaattgactggctagtacaggttcaaatgaaattcaggttgttgcaggagaccatgtacatgactgtctccattattgatcggttcatgcagaataattgtgtgcccaagaagatgctgcagctggttggtgtcactgccatgtttattgcaagcaaatatgaagaaatgtaccctccagaaattggtgactttgcttttgtgactgacaacacttatactaagcaccaaatcagacagatggaaatgaagattctaagagctttaaactttggtctgggtcggcctctacctttgcacttccttcggagagcatctaagattggagaggttgatgtcgagcaacatactttggccaaatacctgatggaactaactatgttggactatgacatggtgcactttcctccttctcaaattgcagcaggagctttttgcttagcactgaaaattctggataatggtgaatggacaccaactctacaacattacctgtcatatactgaagaatctcttcttccagttatgcagcacctggctaagaatgtagtcatggtaaatcaaggacttacaaagcacatgactgtcaagaacaagtatgccacatcgaagcatgctaagatcagcactctaccacagctgaattctgcactagttcaagatttagccaaggctgtggcaaaggtgtaacttgtaaacttgagttggagtactatatttacaaataaaattggcaccatgtgccatctgtacatattactgttgcatttacttttaataaagcttgtggccccttttacttttaanaaanaanaaaanaaaaaaaaaananaaaanaaaaagggggggggcgcccaaaaaacccccggggggcgccatccccccccccacttttacatggaaggaggggcccccccataggagggcggcataataataaaacggaacgagcaggagggcgcggcggttaaaacacaagccggctgggagggggacacaacgctgcgtgtggcggcactgggagaagaagcccccaccattcgtggggggccggggagaacaatatggggagcccacaccccaccaaggaggataagaaccgccacgggggggaaaaaacacgggcgcggtggagggggcgggcccccccccgcgtataatatcgtgcgcgcgaaaaactttcggccaaccgaggtatgtttaagaaatataacggcgcgcgtcgtagtatagaacacagggacagcacgatcagggatgcgacgacaccacgagcacgcacaagagcacagcagagcgcaccacgacaccacacagagcaagaagcacgacgcacagaacagcaacg

SEQ ID NO: 437681 - DNA, 1582 bp, Homo sapiens
cgccaatgggaagggagtgagtgccacgaacaggccaataaggagggagcagtgcggggtttaaatctgaggctaggctggctcttctcggcgtgctgcggcggaacggctgttggtttctgctgggtgtaggtccttggctggtcgggcctccggtgttctgcttctccccgctgagctgctgcctggtgaagaggaagccatggcgctccgagtcaccaggaactcgaaaattaatgctgaaaataaggcgaagatcaacatggcaggcgcaaagcgcgttcctacggcccctgctgcaacctccaagcccggactgaggccaagaacagctcttggggacattggtaacaaagtcagtgaacaactgcaggccaaaatgcctatgaagaaggaagcaaaaccttcagctactggaaaagtcattgataaaaaactaccaaaacctcttgaaaaggtacctatgctggtgccagtgccagtgtctgagccagtgccagagccagaacctgagccagaacctgagcctgttaaagaagaaaaactttcgcctgagcctattttggttgatactgcctctccaagcccaatggaaacatctggatgtgcccctgcagaagaagacctgtgtcaggctttctctgatgtaattcttgcagtaaatgatgtggatgcagaagatggagctgatccaaacctttgtagtgaatatgtgaaagatatttatgcttatctgagacaacttgaggaagagcaagcagtcagaccaaaatacctactgggtcgggaagtcactggaaacatgagagccatcctaattgactggctagtacaggttcaaatgaaattcaggttgttgcaggagaccatgtacatgactgtctccattattgatcggttcatgcagaataattgtgtgcccaagaagatgctgcagctggttggtgtcactgccatgtttattgcaagcaaatatgaagaaatgtaccctccagaaattggtgactttgcttttgtgactgacaacacttatactaagcaccaaatcagacagatggaaatgaagattctaagagctttaaactttggtctgggtcggcctctacctttgcacttccttcggagagcatctaagattggagaggttgatgtcgagcaacatactttggccaaatacctgatggaactaactatgttggactatgacatggtgcactttcctccttctcaaattgcagcaggagctttttgcttagcactgaaaattctggataatggtgaatggacaccaactctacaacattacctgtcatatactgaagaatctcttcttccagttatgcagcacctggctaagaatgtagtcatggtaaatcaaggacttacaaagcacatgactgtcaagaacaagtatgccacatcgaagcatgctaagatcagcactctaccacagctgaattctgcactagttcaagatttagccaaggctgtggcaaaggtgtaacttgtaaacttgagttggagtactatacctccgataaagtagcccatgcatctcggggcggtgggtggggtgcgtggg

SEQ ID NO: 437682 - DNA, 2308 bp, Homo sapiens
cgccaatgggaagggagtgagtgccacgaacaggccaataaggagggagcagtgcggggtttaaatctgaggctaggctggctcttctcggcgtgctgcggcggaacggctgttggtttctgctgggtgtaggtccttggctggtcgggcctccggtgttctgcttctccccgctgagctgctgcctggtgaagaggaagccatggcgctccgagtcaccaggaactcgaaaattaatgctgaaaataaggcgaagatcaacatggcaggcgcaaagcgcgttcctacggcccctgctgcaacctccaagcccggactgaggccaagaacagctcttggggacattggtaacaaagtcagtgaacaactgcaggccaaaatgcctatgaagaaggaagcaaaaccttcagctactggaaaagtcattgataaaaaactaccaaaacctcttgaaaaggtacctatgctggtgccagtgccagtgtctgagccagtgccagagccagaacctgagccagaacctgagcctgttaaagaagaaaaactttcgcctgagcctattttggttgatactgcctctccaagcccaatggaaacatctggatgtgcccctgcagaagaagacctgtgtcaggctttctctgatgtaattcttgcagtaaatgatgtggatgcagaagatggagctgatccaaacctttgtagtgaatatgtgaaagatatttatgcttatctgagacaacttgaggaagagcaagcagtcagaccaaaatacctactgggtcgggaagtcactggaaacatgagagccatcctaattgactggctagtacaggttcaaatgaaattcaggttgttgcaggagaccatgtacatgactgtctccattattgatcggttcatgcagaataattgtgtgcccaagaagatgctgcagctggttggtgtcactgccatgtttattgcaagcaaatatgaagaaatgtaccctccagaaattggtgactttgcttttgtgactgacaacacttatactaagcaccaaatcagacagatggaaatgaagattctaagagctttaaactttggtctgggtcggcctctacctttgcacttccttcggagagcatctaagattggagaggttgatgtcgagcaacatactttggccaaatacctgatggaactaactatgttggactatgacatggtgcactttcctccttctcaaattgcagcaggagctttttgcttagcactgaaaattctggataatggtgaatggacaccaactctacaacattacctgtcatatactgaagaatctcttcttccagttatgcagcacctggctaagaatgtagtcatggtaaatcaaggacttacaaagcacatggtgagtcaatatagtggcattgtaagatgctgaaaagtgtaataattcaaacttaatgcctgcaaatgcctggtttatttttaatgagttaatgttttaaatgaatacctgtatcattgcatcttgtgattttttttcttttgcctctttaattgctatctttttgtcttccagactgtcaagaacaagtatgccacatcgaagcatgctaagatcagcactctaccacagctgaattctgcactagttcaagatttagccaaggctgtggcaaaggtgtaacttgtaaacttgagttggagtactatatttacaaataaaattggcaccatgtgccatctgtacatattactgttgcatttacttttaataaagcttgtggccccttttacttttttatagcttaactaatttgaatgtggttacttcctactgtagggtagcggaaaagttgtcttaaaaggtatggtggggatatttttaaaaactccttttggtttacctggggatccaattgatgtatatgtttatatactgggttcttgttttatatacctggcttttactttattaatatgagttactgaaggtgatggaggtatttgaaaattttacttccataggacatactgcatgtaagccaagtcatggagaatctgctgcatagctctattttaaagtaaaagtctaccaccgaatccctagtccccctgttttctgtttcttcttgtgattgctgccataattctaagttatttacttttaccactatttaagttatcaactttagctagtatcttcaaactttcactttgaaaaatgagaattttatattctaagccagttttcattttggttttgtgttttggttaataaaacaatactcaaatacaaaaatatcttttttaaaaa

SEQ ID NO: 437683 - DNA, 1770 bp, Homo sapiens
cgccaatgggaagggagtgagtgccacgaacaggccaataaggagggagcagtgcggggtttaaatctgaggctaggctggctcttctcggcgtgctgcggcggaacggctgttggtttctgctgggtgtaggtccttggctggtcgggcctccggtgttctgcttctccccgctgagctgctgcctggtgaagaggaagccatggcgctccgagtcaccaggaactcgaaaattaatgctgaaaataaggcgaagatcaacatggcaggcgcaaagcgcgttcctacggcccctgctgcaacctccaagcccggactgaggccaagaacagctcttggggacattggtaacaaagtcagtgaacaactgcaggccaaaatgcctatgaagaaggaagcaaaaccttcagctactggaaaagtcattgataaaaaactaccaaaacctcttgaaaaggtacctatgctggtgccagtgccagtgtctgagccagtgccagagccagaacctgagccagaacctgagcctgttaaagaagaaaaactttcgcctgagcctattttggttgatactgcctctccaagcccaatggaaacatctggatgtgcccctgcagaagaagacctgtgtcaggctttctctgatgtaattcttgcagtaaatgatgtggatgcagaagatggagctgatccaaacctttgtagtgaatatgtgaaagatatttatgcttatctgagacaacttgaggaagagcaagcagtcagaccaaaatacctactgggtcgggaagtcactggaaacatgagagccatcctaattgactggctagtacaggttcaaatgaaattcaggttgttgcaggagaccatgtacatgactgtctccattattgatcggttcatgcagaataattgtgtgcccaagaagatgctgcagctggttggtgtcactgccatgtttattgcaagcaaatatgaagaaatgtaccctccagaaattggtgactttgcttttgtgactgacaacacttatactaagcaccaaatcagacagatggaaatgaagattctaagagctttaaactttggtctgggtcggcctctacctttgcacttccttcggagagcatctaagattggagaggttgatgtcgagcaacatactttggccaaatacctgatggaactaactatgttggactatgacatggtgcactttcctccttctcaaattgcagcaggagctttttgcttagcactgaaaattctggataatggtgaatggacaccaactctacaacattacctgtcatatactgaagaatctcttcttccagttatgcagcacctggctaagaatgtagtcatggtaaatcaaggacttacaaagcacatggtgagtcaatatagtggcattgtaagatgctgaaaagtgtaataattcaaacttaatgcctgcaaatgcctggtttatttttaatgagttaatgttttaaatgaatacctgtatcattgcatcttgtgattttttttcttttgcctctttaattgctatctttttgtcttccagactgtcaagaacaagtatgccacatcgaagcatgctaagatcagcactctaccacagctgaattctgcactagttcaagatttagccaaggctgtggcaaaggtgtaacttgtaaacttgagttggagtactatatttacaaataaaattggcaccatgtgccatctgtacatattactgttgcatttacttttaataaa

SEQ ID NO: 437684 - DNA, 2123 bp, Homo sapiens
  misc_feature (1582)..(1582): n is a, c, g, or t
  misc_feature (1586)..(1586): n is a, c, g, or t
  misc_feature (1589)..(1589): n is a, c, g, or t
  misc_feature (1594)..(1594): n is a, c, g, or t
  misc_feature (1605)..(1605): n is a, c, g, or t
  misc_feature (1607)..(1607): n is a, c, g, or t
  misc_feature (1612)..(1612): n is a, c, g, or t
cgccaatgggaagggagtgagtgccacgaacaggccaataaggagggagcagtgcggggtttaaatctgaggctaggctggctcttctcggcgtgctgcggcggaacggctgttggtttctgctgggtgtaggtccttggctggtcgggcctccggtgttctgcttctccccgctgagctgctgcctggtgaagaggaagccatggcgctccgagtcaccaggaactcgaaaattaatgctgaaaataaggcgaagatcaacatggcaggcgcaaagcgcgttcctacggcccctgctgcaacctccaagcccggactgaggccaagaacagctcttggggacattggtaacaaagtcagtgaacaactgcaggccaaaatgcctatgaagaaggaagcaaaaccttcagctactggaaaagtcattgataaaaaactaccaaaacctcttgaaaaggtacctatgctggtgccagtgccagtgtctgagccagtgccagagccagaacctgagccagaacctgagcctgttaaagaagaaaaactttcgcctgagcctattttggttgatactgcctctccaagcccaatggaaacatctggatgtgcccctgcagaagaagacctgtgtcaggctttctctgatgtaattcttgcagtaaatgatgtggatgcagaagatggagctgatccaaacctttgtagtgaatatgtgaaagatatttatgcttatctgagacaacttgaggaagagcaagcagtcagaccaaaatacctactgggtcgggaagtcactggaaacatgagagccatcctaattgactggctagtacaggttcaaatgaaattcaggttgttgcaggagaccatgtacatgactgtctccattattgatcggttcatgcagaataattgtgtgcccaagaagatgctgcagctggttggtgtcactgccatgtttattgcaagcaaatatgaagaaatgtaccctccagaaattggtgactttgcttttgtgactgacaacacttatactaagcaccaaatcagacagatggaaatgaagattctaagagctttaaactttggtctgggtcggcctctacctttgcacttccttcggagagcatctaagattggagaggttgatgtcgagcaacatactttggccaaatacctgatggaactaactatgttggactatgacatggtgcactttcctccttctcaaattgcagcaggagctttttgcttagcactgaaaattctggataatggtgaatggttatgcagcacctggctaagaatgtagtcatggtaaatcaaggacttacaaagcacatgactgtcaagaacaagtatgccacatcgaagcatgctaagatcagcactctaccacagctgaattctgcactagttcaagatttagccaaggctgtggcaaaggtgtaacttgtaaacttgagttggagtactatatttacaaataaaattggcaccatgtgccatctgtacatattactgttgcatttacttttaataaaaaaaaaaaaaaaaaaaaaaaaaaaaaaaaaaaaaaaanaaanaanaaaanaaaaaaaaaananaaaanaaaaagggggggggcgcccaaaaaacccccggggggcgccatccccccccccacttttacatggaaggaggggcccccccataggagggcggcataataataaaacggaacgagcaggagggcgcggcggttaaaacacaagccggctgggagggggacacaacgctgcgtgtggcggcactgggagaagaagcccccaccattcgtggggggccggggagaacaatatggggagcccacaccccaccaaggaggataagaaccgccacgggggggaaaaaacacgggcgcggtggagggggcgggcccccccccgcgtataatatcgtgcgcgcgaaaaactttcggccaaccgaggtatgtttaagaaatataacggcgcgcgtcgtagtatagaacacagggacagcacgatcagggatgcgacgacaccacgagcacgcacaagagcacagcagagcgcaccacgacaccacacagagcaagaagcacgacgcacagaacagcaacg

SEQ ID NO: 437685 - DNA, 2056 bp, Homo sapiens
cgccaatgggaagggagtgagtgccacgaacaggccaataaggagggagcagtgcggggtttaaatctgaggctaggctggctcttctcggcgtgctgcggcggaacggctgttggtttctgctgggtgtaggtccttggctggtcgggcctccggtgttctgcttctccccgctgagctgctgcctggtgaagaggaagccatggcgctccgagtcaccaggaactcgaaaattaatgctgaaaataaggcgaagatcaacatggcaggcgcaaagcgcgttcctacggcccctgctgcaacctccaagcccggactgaggccaagaacagctcttggggacattggtaacaaagtcagtgaacaactgcaggccaaaatgcctatgaagaaggaagcaaaaccttcagctactggaaaagtcattgataaaaaactaccaaaacctcttgaaaaggtacctatgctggtgccagtgccagtgtctgagccagtgccagagccagaacctgagccagaacctgagcctgttaaagaagaaaaactttcgcctgagcctattttggttgatactgcctctccaagcccaatggaaacatctggatgtgcccctgcagaagaagacctgtgtcaggctttctctgatgtaattcttgcagtaaatgatgtggatgcagaagatggagctgatccaaacctttgtagtgaatatgtgaaagatatttatgcttatctgagacaacttgaggaagagcaagcagtcagaccaaaatacctactgggtcgggaagtcactggaaacatgagagccatcctaattgactggctagtacaggttcaaatgaaattcaggttgttgcaggagaccatgtacatgactgtctccattattgatcggttcatgcagaataattgtgtgcccaagaagatgctgcagctggttggtgtcactgccattaagcaccaaatcagacagatggaaatgaagattctaagagctttaaactttggtctgggtcggcctctacctttgcacttccttcggagagcatctaagattggagaggttgatgtcgagcaacatactttggccaaatacctgatggaactaactatgttggactatgacatggtgcactttcctccttctcaaattgcagcaggagctttttgcttagcactgaaaattctggataatggtgaatggacaccaactctacaacattacctgtcatatactgaagaatctcttcttccagttatgcagcacctggctaagaatgtagtcatggtaaatcaaggacttacaaagcacatgactgtcaagaacaagtatgccacatcgaagcatgctaagatcagcactctaccacagctgaattctgcactagttcaagatttagccaaggctgtggcaaaggtgtaacttgtaaacttgagttggagtactatatttacaaataaaattggcaccatgtgccatctgtacatattactgttgcatttacttttaataaagcttgtggccccttttacttttttatagcttaactaatttgaatgtggttacttcctactgtagggtagcggaaaagttgtcttaaaaggtatggtggggatatttttaaaaactccttttggtttacctggggatccaattgatgtatatgtttatatactgggttcttgttttatatacctggcttttactttattaatatgagttactgaaggtgatggaggtatttgaaaattttacttccataggacatactgcatgtaagccaagtcatggagaatctgctgcatagctctattttaaagtaaaagtctaccaccgaatccctagtccccctgttttctgtttcttcttgtgattgctgccataattctaagttatttacttttaccactatttaagttatcaactttagctagtatcttcaaactttcactttgaaaaatgagaattttatattctaagccagttttcattttggttttgtgttttggttaataaaacaatactcaaatacaaaaatatcttttttaaaaa

SEQ ID NO: 437686 - DNA, 1797 bp, Homo sapiens
cgccaatgggaagggagtgagtgccacgaacaggccaataaggagggagcagtgcggggtttaaatctgaggctaggctggctcttctcggcgtgctgcggcggaacggctgttggtttctgctgggtgtaggtccttggctggtcgggcctccggtgttctgcttctccccgctgagctgctgcctggtgaagaggaagccatggcgctccgagtcaccagggtgagccgcttcggactgcgaactaacgcggcttcttagctgctgcctgctctccctgcctcgcctgcgggagcctcccgagcgggagagggccgcaggagcgatttggggaggaaggtgggaggggactcaccaagagagcgccgaggtgggcccaggcctggtgagagagtgtgggggacgatggatggagggaggaagaactcgaaaattaatgctgaaaataaggcgaagatcaacatggcaggcgcaaagcgcgttcctacggcccctgctgcaacctccaagcccggactgaggccaagaacagctcttggggacattggtaacaaagtcagtgaacaactgcaggccaaaatgcctatgaagaaggaagcaaaaccttcagctactggaaaagtcattgataaaaaactaccaaaacctcttgaaaaggtacctatgctggtgccagtgccagtgtctgagccagtgccagagccagaacctgagccagaacctgagcctgttaaagaagaaaaactttcgcctgagcctattttggttgatactgcctctccaagcccaatggaaacatctggatgtgcccctgcagaagaagacctgtgtcaggctttctctgatgtaattcttgcagtaaatgatgtggatgcagaagatggagctgatccaaacctttgtagtgaatatgtgaaagatatttatgcttatctgagacaacttgaggaagagcaagcagtcagaccaaaatacctactgggtcgggaagtcactggaaacatgagagccatcctaattgactggctagtacaggttcaaatgaaattcaggttgttgcaggagaccatgtacatgactgtctccattattgatcggttcatgcagaataattgtgtgcccaagaagatgctgcagctggttggtgtcactgccatgtttattgcaagcaaatatgaagaaatgtaccctccagaaattggtgactttgcttttgtgactgacaacacttatactaagcaccaaatcagacagatggaaatgaagattctaagagctttaaactttggtctgggtcggcctctacctttgcacttccttcggagagcatctaagattggagaggttgatgtcgagcaacatactttggccaaatacctgatggaactaactatgttggactatgacatggtgcactttcctccttctcaaattgcagcaggagctttttgcttagcactgaaaattctggataatggtgaatggacaccaactctacaacattacctgtcatatactgaagaatctcttcttccagttatgcagcacctggctaagaatgtagtcatggtaaatcaaggacttacaaagcacatgactgtcaagaacaagtatgccacatcgaagcatgctaagatcagcactctaccacagctgaattctgcactagttcaagatttagccaaggctgtggcaaaggtgtaacttgtaaacttgagttggagtactatatttacaaataaaattggcaccatgtgccatctgtacatattactgttgcatttacttttaataaa

SEQ ID NO: 437687 - DNA, 1002 bp, Homo sapiens
cgccaatgggaagggagtgagtgccacgaacaggccaataaggagggagcagtgcggggtttaaatctgaggctaggctggctcttctcggcgtgctgcggcggaacggctgttggtttctgctgggtgtaggtccttggctggtcgggcctccggtgttctgcttctccccgctgagctgctgcctggtgaagaggaagccatggcgctccgagtcaccaggaactcgaaaattaatgctgaaaataaggcgaagatcaacatggcaggcgcaaagcgcgttcctacggcccctgctgcaacctccaagcccggactgaggccaagaacagctcttggggacattggtaacaaagtcagtgaacaactgcaggccaaaatgcctatgaagaaggaagcaaaaccttcagctactggaaaagtcattgataaaaaactaccaaaacctcttgaaaaggtacctatgctggtgccagtgccagtgtctgagccagtgccagagccagaacctgagccagaacctgagcctgttaaagaagaaaaactttcgcctgagcctattttggttgatactgcctctccaagcccaatggaaacatctggatgtgcccctgcagaagaagacctgtgtcaggctttctctgatgtaattcttgcagtaaatgatgtggatgcagaagatggagctgatccaaacctttgtagtgaatatgtgaaagatatttatgcccatgtgtgctcagtatttaactctcacttataagtacgaacatgcggtatttgattttctcttcctgcattaattcgcttaggattatggcctccagcttcatccattttgccgtaaaggatatgattttgtgctccatttttaaaaaataatagctttattgagatataattcacatatcatacaagtcacccatatcaaaggtacaactcaatgttttttagtgtattagcagttgtgcagccatcaccaccgttttctacatttttatc

SEQ ID NO: 437688 - DNA, 1263 bp, Homo sapiens
caaggaagtggagtctagttttagggtgggcaagtcagcaattacaaaagtgcaattaggtttgagcagaggaagcatgagagcacctaggaaaggagtctttagctttgtcttaaatttcagttatattaattatacagtacccatctcttttccactcctgaataacatctaacatctagaaactttatgaaaatcattattgatttgagcatttttaacattaacttgttgccttagacaccaactctacaacattacctgtcatatactgaagaatctcttcttccagttatgcagcacctggctaagaatgtagtcatggtaaatcaaggacttacaaagcacatggtgagtcaatatagtggcattgtaagatgctgaaaagtgtaataattcaaacttaatgcctgcaaatgcctggtttatttttaatgagttaatgttttaaatgaatacctgtatcattgcatcttgtgattttttttcttttgcctctttaattgctatctttttgtcttccagactgtcaagaacaagtatgccacatcgaagcatgctaagatcagcactctaccacagctgaattctgcactagttcaagatttagccaaggctgtggcaaaggtgtaacttgtaaacttgagttggagtactatatttacaaataaaattggcaccatgtgccatctgtacatattactgttgcatttacttttaataaagcttgtggccccttttacttttttatagcttaactaatttgaatgtggttacttcctactgtagggtagcggaaaagttgtcttaaaaggtatggtggggatatttttaaaaactccttttggtttacctggggatccaattgatgtatatgtttatatactgggttcttgttttatatacctggcttttactttattaatatgagttactgaaggtgatggaggtatttgaaaattttacttccataggacatactgcatgtaagccaagtcatggagaatctgctgcatagctctattttaaagtaaaagtctaccaccgaatccctagtccccctgttttctgtttcttcttgtgattgctgccataattctaagttatttacttttaccactatttaagttatcaactttagctagtatcttcaaactttcactttgaaaaatgagaattttatattctaagccagttttcattttggttttgtgttttggttaataaaacaatactcaaatacaaaaatatcttttttaaaaa

SEQ ID NO: 437689 - DNA, 580 bp, Homo sapiens
acaggttcaaatgaaattcaggttgttgcaggagaccatgtacatgactgtctccattattgatcggttcatgcaggtgagcatttcagtaagagttttcccttccaggattctagccgagtcataagaaactgatgttttcaggccagtctgggcgcagtggctcatgcctgtaatcccagcgggcgggtggatcacaaggttaggagatcgagaccatcctggccaacgcagtaaaaccctgtctctactaaaaatacaaaaaattagccgggcatggtggcgggcgcctgtagtcccagctactggaggcggaggttgcagtgagctgagatcacgccattgcactccagcctgggtgacagagcgagactcaaaaaaaaaagaaagaaataaactgactttttcaactaaaatctttcttgggggatatggtgtcattaagattttgctatgggagaatgtctttctacctctccttcatcatagctctgtgtctccttttcaaacattttattcaccctattgaaattcccattgcagaataattgtgtgcccaagaagatgctgcagctggttg

SEQ ID NO: 437690 - DNA, 848 bp, Homo sapiens
  misc_feature (762)..(762): n is a, c, g, or t
cgccaatgggaagggagtgagtgccacgaacaggccaataaggagggagcagtgcggggtttaaatctgaggctaggctggctcttctcggcgtgctgcggcggaacggctgttggtttctgctgggtgtaggtccttggctggtcgggcctccggtgttctgcttctccccgctgagctgctgcctggtgaagaggaagccatggcgctccgagtcaccaggaactcgaaaattaatgctgaaaataaggcgaagatcaacatggcaggcgcaaagcgcgttcctacggcccctgctgcaacctccaagcccggactgaggccaagaacagctcttggggacattggtaacaaagtcagtgaacaactgcaggccaaaatgcctatgaagaaggaagcaaaaccttcagctactggaaaagtcattgataaaaaactaccaaaacctcttgaaaaggtacctatgctggtgccagtgccagtgtctgagccagtgccagagccagaacctgagccagaacctgagcctgttaaagaagaaaaactttcgcctgagcctattttggttgatactgcctctccaagcccaatggaaacatctggatgtgcccctgcagaagaagacctgtgtcaggctttctctgatgtaattcttgcagtaaatgatgtggatgcagaagatggagctgatccaaacctttgtagtgaatatgtgaaagatatttatgcttatctgagacaacttgagaagagcagcagtcngaccaaatacctaccggtcggaagtcctggaacttggagcctcctatgacggggtcacaggtcctgccggtgtgccgcgccctccc

SEQ ID NO: 437691 - DNA, 2134 bp, Homo sapiens
cgccaatgggaagggagtgagtgccacgaacaggccaataaggagggagcagtgcggggtttaaatctgaggctaggctggctcttctcggcgtgctgcggcggaacggctgttggtttctgctgggtgtaggtccttggctggtcgggcctccggtgttctgcttctccccgctgagctgctgcctggtgaagaggaagccatggcgctccgagtcaccaggaactcgaaaattaatgctgaaaataaggcgaagatcaacatggcaggcgcaaagcgcgttcctacggcccctgctgcaacctccaagcccggactgaggccaagaacagctcttggggacattggtaacaaagtcagtgaacaactgcaggccaaaatgcctatgaagaaggaagcaaaaccttcagctactggaaaagtcattgataaaaaactaccaaaacctcttgaaaaggtacctatgctggtgccagtgccagtgtctgagccagtgccagagccagaacctgagccagaacctgagcctgttaaagaagaaaaactttcgcctgagcctattttggttgatactgcctctccaagcccaatggaaacatctggatgtgcccctgcagaagaagacctgtgtcaggctttctctgatgtaattcttgcagtaaatgatgtggatgcagaagatggagctgatccaaacctttgtagtgaatatgtgaaagatatttatgcttatctgagacaacttgaggaagagcaagcagtcagaccaaaatacctactgggtcgggaagtcactggaaacatgagagccatcctaattgactggctagtacaggttcaaatgaaattcaggttgttgcaggagaccatgtacatgactgtctccattattgatcggttcatgcagaataattgtgtgcccaagaagatgctgcagctggttggtgtcactgccatgtttattgcaagcaaatatgaagaaatgtaccctccagaaattggtgactttgcttttgtgactgacaacacttatactaagcaccaaatcagacagatggaaatgaagattctaagagctttaaactttggtctgggtcggcctctacctttgcacttccttcggagagcatctaagattggagaggttgatgtcgagcaacatactttggccaaatacctgatggaactaactatgttggactatgacatggtgcactttcctccttctcaaattgcagcaggagctttttgcttagcactgaaaattctggataatggtgaatggacaccaactctacaacattacctgtcatatactgaagaatctcttcttccagttatgcagcacctggctaagaatgtagtcatggtaaatcaaggacttacaaagcacatgactgtcaagaacaagtatgccacatcgaagcatgctaagatcagcactctaccacagctgaattctgcactagttcaagatttagccaaggctgtggcaaaggtgtaacttgtaaacttgagttggagtactatatttacaaataaaattggcaccatgtgccatctgtacatattactgttgcatttacttttaataaagcttgtggccccttttacttttttatagcttaactaatttgaatgtggttacttcctactgtagggtagcggaaaagttgtcttaaaaggtatggtggggatatttttaaaaactccttttggtttacctggggatccaattgatgtatatgtttatatactgggttcttgttttatatacctggcttttactttattaatatgagttactgaaggtgatggaggtatttgaaaattttacttccataggacatactgcatgtaagccaagtcatggagaatctgctgcatagctctattttaaagtaaaagtctaccaccgaatccctagtccccctgttttctgtttcttcttgtgattgctgccataattctaagttatttacttttaccactatttaagttatcaactttagctagtatcttcaaactttcactttgaaaaatgagaattttatattctaagccagttttcattttggttttgtgttttggttaataaaacaatactcaaatacaaaaatatcttttttaaaaa

SEQ ID NO: 437692 - DNA, 1692 bp, Homo sapiens
cgccaatgggaagggagtgagtgccacgaacaggccaataaggagggagcagtgcggggtttaaatctgaggctaggctggctcttctcggcgtgctgcggcggaacggctgttggtttctgctgggtgtaggtccttggctggtcgggcctccggtgttctgcttctccccgctgagctgctgcctggtgaagaggaagccatggcgctccgagtcaccaggaactcgaaaattaatgctgaaaataaggcgaagatcaacatggcaggcgcaaagcgcgttcctacggcccctgctgcaacctccaagcccggactgaggccaagaacagctcttggggacattggtaacaaagtcagtgaacaactgcaggccaaaatgcctatgaagaaggaagcaaaaccttcagctactggaaaagtcattgataaaaaactaccaaaacctcttgaaaaggtacctatgctggtgccagtgccagtgtctgagccagtgccagagccagaacctgagccagaacctgagcctgttaaagaagaaaaactttcgcctgagcctattttggttgatactgcctctccaagcccaatggaaacatctggatgtgcccctgcagaagaagacctgtgtcaggctttctctgatgtaattcttgcagtaaatgatgtggatgcagaagatggagctgatccaaacctttgtagtgaatatgtgaaagatatttatgcttatctgagacaacttgaggaagagcaagcagtcagaccaaaatacctactgggtcgggaagtcactggaaacatgagagccatcctaattgactggctagtacaggttcaaatgaaattcaggttgttgcaggagaccatgtacatgactgtctccattattgatcggttcatgcagaataattgtgtgcccaagaagatgctgcagctggttggtgtcactgccatgtttattgcaagcaaatatgaagaaatgtaccctccagaaattggtgactttgcttttgtgactgacaacacttatactaagcaccaaatcagacagatggaaatgaagattctaagagctttaaactttggtctgggtcggcctctacctttgcacttccttcggagagcatctaagattggagaggttgatgtcgagcaacatactttggccaaatacctgatggaactaactatgttggactatgacatggtgcactttcctccttctcaaattgcagcaggagctttttgcttagcactgaaaattctggataatggtgaatggacaccaactctacaacattacctgtcatatactgaagaatctcttcttccagttatgcagcacctggctaagaatgtagtcatggtaaatcaaggacttacaaagcacatgactgtcaagaacaagtatgccacatcgaagcatgctaagatcagcactctaccacagctgaattctgcactagttcaagatttagccaaggctgtggcaaaggtgtaacttgtaaacttgagttggagtactatatttacaaataaaattggcaccatgtgccatctgtacatattactgttgcatttacttttaataaagacaccaactctacaacattacctgtcatatactgaagaatctcttcttccagttatgcagcactggctaagaatgtgtcatggtaatcaggcttc

SEQ ID NO: 437693 - DNA, 1638 bp, Homo sapiens
  misc_feature (1428)..(1428): n is a, c, g, or t
  misc_feature (1435)..(1435): n is a, c, g, or t
  misc_feature (1441)..(1441): n is a, c, g, or t
  misc_feature (1443)..(1443): n is a, c, g, or t
  misc_feature (1450)..(1452): n is a, c, g, or t
  misc_feature (1467)..(1467): n is a, c, g, or t
  misc_feature (1475)..(1475): n is a, c, g, or t
  misc_feature (1480)..(1481): n is a, c, g, or t
  misc_feature (1484)..(1485): n is a, c, g, or t
  misc_feature (1491)..(1491): n is a, c, g, or t
  misc_feature (1494)..(1494): n is a, c, g, or t
  misc_feature (1506)..(1506): n is a, c, g, or t
cgccaatgggaagggagtgagtgccacgaacaggccaataaggagggagcagtgcggggtttaaatctgaggctaggctggctcttctcggcgtgctgcggcggaacggctgttggtttctgctgggtgtaggtccttggctggtcgggcctccggtgttctgcttctccccgctgagctgctgcctggtgaagaggaagccatggcgctccgagtcaccaggaactcgaaaattaatgctgaaaataaggcgaagatcaacatggcaggcgcaaagcgcgttcctacggcccctgctgcaacctccaagcccggactgaggccaagaacagctcttggggacattggtaacaaagtcagtgaacaactgcaggccaaaatgcctatgaagaaggaagcaaaaccttcagctactggaaaagtcattgataaaaaactaccaaaacctcttgaaaaggtacctatgctggtgccagtgccagtgtctgagccagtgccagagccagaacctgagccagaacctgagcctgttaaagaagaaaaactttcgcctgagcctattttggttgatactgcctctccaagcccaatggaaacatctggatgtgcccctgcagaagaagacctgtgtcaggctttctctgatgtaattcttgcagtaaatgatgtggatgcagaagatggagctgatccaaacctttgtagtgaatatgtgaaagatatttatgcttatctgagacaacttgaggaagagcaagcagtcagaccaaaatacctactgggtcgggaagtcactggaaacatgagagccatcctaattgactggctagtacaggttcaaatgaaattcaggttgttgcaggagaccatgtacatgactgtctccattattgatcggttcatgcagaataattgtgtgcccaagaagatgctgcagctggttggtgtcactgccatgtttattgcaagcaaatatgaagaaatgtaccctccagaaattggtgactttgcttttgtgactgacaacacttatactaagcaccaaatcagacagatggaaatgaagattctaagagctttaaactttggtctgggtcggcctctacctttgcacttccttcggagagcatctaagattggagaggttgatgtcgagcaacatactttggccaaatacctgatggaactaactatgttggactatgacatggtgcactttcctccttctcaaattgcagcaggagctttttgcttagcactgaaaattctggataatggtgaatggacaccaactctacaacattacctgtcatatactgaagaatctcttcttccagttatgcagcacctggctaagaatgtagtcatggtaaatcaaggacttacaaagcacatgactgtcagaacagtatgcacatcgaagctgtnagacagntctacncngtgattnnnctagtcagattagcnaggtgggnaggtnntgnnactggnggnatattcaataanggccgggctctgtttaaaaaaaaaaattgggttttgggggaaaggtgaggatgttagtttcgacctttggaggggatgggcctaggggttagactagtgttgaagagagagttaaatattataattacttag

SEQ ID NO: 437694 - DNA, 1544 bp, Homo sapiens
cgccaatgggaagggagtgagtgccacgaacaggccaataaggagggagcagtgcggggtttaaatctgaggctaggctggctcttctcggcgtgctgcggcggaacggctgttggtttctgctgggtgtaggtccttggctggtcgggcctccggtgttctgcttctccccgctgagctgctgcctggtgaagaggaagccatggcgctccgagtcaccaggaactcgaaaattaatgctgaaaataaggcgaagatcaacatggcaggcgcaaagcgcgttcctacggcccctgctgcaacctccaagcccggactgaggccaagaacagctcttggggacattggtaacaaagtcagtgaacaactgcaggccaaaatgcctatgaagaaggaagcaaaaccttcagctactggaaaagtcattgataaaaaactaccaaaacctcttgaaaaggtacctatgctggtgccagtgccagtgtctgagccagtgccagagccagaacctgagccagaacctgagcctgttaaagaagaaaaactttcgcctgagcctattttggttgatactgcctctccaagcccaatggaaacatctggatgtgcccctgcagaagaagacctgtgtcaggctttctctgatgtaattcttgcagtaaatgatgtggatgcagaagatggagctgatccaaacctttgtagtgaatatgtgaaagatatttatgcttatctgagacaacttgaggaagagcaagcagtcagaccaaaatacctactgggtcgggaagtcactggaaacatgagagccatcctaattgactggctagtacaggttcaaatgaaattcaggttgttgcaggagaccatgtacatgactgtctccattattgatcggttcatgcagaataattgtgtgcccaagaagatgctgcagctggttggtgtcactgccatgtttattgcaagcaaatatgaagaaatgtaccctccagaaattggtgactttgcttttgtgactgacaacacttatactaagcaccaaatcagacagatggaaatgaagattctaagagctttaaactttggtctgggtcggcctctacctttgcacttccttcggagagcatctaagattggagaggttgatgtcgagcaacatactttggccaaatacctgatggaactaactatgttggactatgacatggtgcactttcctccttctcaaattgcagcaggagctttttgcttagcactgaaaattctggataatggtgaatggttatgcagcacctggctaagaatgtagtcatggtaaatcaaggacttacaaagcacatgactgtcaagaacaagtatgccacatcgaagcatgctaagatcagcactctaccacagctgaattctgcactagttcaagatttagccaaggctgtggcaaaggtgtaacttgtaaacttgagttggagtactatatttacaaataaaattggcaccatgtgccatctgtacatattactgttgcatttacttttaataaa

SEQ ID NO: 437695 - DNA, 1309 bp, Homo sapiens
cgccaatgggaagggagtgagtgccacgaacaggccaataaggagggagcagtgcggggtttaaatctgaggctaggctggctcttctcggcgtgctgcggcggaacggctgttggtttctgctgggtgtaggtccttggctggtcgggcctccggtgttctgcttctccccgctgagctgctgcctggtgaagaggaagccatggcgctccgagtcaccaggaactcgaaaattaatgctgaaaataaggcgaagatcaacatggcaggcgcaaagcgcgttcctacggcccctgctgcaacctccaagcccggactgaggccaagaacagctcttggggacattggtaacaaagtcagtgaacaactgcaggccaaaatgcctatgaagaaggaagcaaaaccttcagctactggaaaagtcattgataaaaaactaccaaaacctcttgaaaaggtacctatgctggtgccagtgccagtgtctgagccagtgccagagccagaacctgagccagaacctgagcctgttaaagaagaaaaactttcgcctgagcctattttggttgatactgcctctccaagcccaatggaaacatctggatgtgcccctgcagaagaagacctgtgtcaggctttctctgatgtaattcttgcagtaaatgatgtggatgcagaagatggagctgatccaaacctttgtagtgaatatgtgaaagatatttatgcttatctgagacaacttgaggaagagcaagcagtcagaccaaaatacctactgggtcgggaagtcactggaaacatgagagccatcctaattgactggctagtacaggttcaaatgaaattcaggttgttgcaggagaccatgtacatgactgtctccattattgatcggttcatgcagaataattgtgtgcccaagaagatgctgcagctggttggtgtcactgccatgtttattgcaagcaaatatgaagaaatgtaccctccagaaattggtgactttgcttttgtgactgacaacacttatactaagcaccaaatcagacagatggaaatgaagattctaagagctttaaactttggtctgggtcggcctctacctttgcacttccttcggagagcatctaagattggagaggttgatgtcgagcaacatactttggccaaatacctgatggaactaactatgttggactatgacatggtgcactttcctccttctcaaattgcagcaggagctttttgcttagcactgaaaattctggataatggtgaatgggtaagctgtgtcccacagaactcc

SEQ ID NO: 437696 - DNA, 1975 bp, Homo sapiens
cgccaatgggaagggagtgagtgccacgaacaggccaataaggagggagcagtgcggggtttaaatctgaggctaggctggctcttctcggcgtgctgcggcggaacggctgttggtttctgctgggtgtaggtccttggctggtcgggcctccggtgttctgcttctccccgctgagctgctgcctggtgaagaggaagccatggcgctccgagtcaccaggaactcgaaaattaatgctgaaaataaggcgaagatcaacatggcaggcgcaaagcgcgttcctacggcccctgctgcaacctccaagcccggactgaggccaagaacagctcttggggacattggtaacaaagtcagtgaacaactgcaggccaaaatgcctatgaagaaggaagcaaaaccttcagctactggaaaagtcattgataaaaaactaccaaaacctcttgaaaaggtacctatgctggtgccagtgccagtgtctgagccagtgccagagccagaacctgagccagaacctgagcctgttaaagaagaaaaactttcgcctgagcctattttggttgatactgcctctccaagcccaatggaaacatctggatgtgcccctgcagaagaagacctgtgtcaggctttctctgatgtaattcttgcagtaaatgatgtggatgcagaagatggagctgatccaaacctttgtagtgaatatgtgaaagatatttatgcttatctgagacaacttgagaataattgtgtgcccaagaagatgctgcagctggttggtgtcactgccatgtttattgcaagcaaatatgaagaaatgtaccctccagaaattggtgactttgcttttgtgactgacaacacttatactaagcaccaaatcagacagatggaaatgaagattctaagagctttaaactttggtctgggtcggcctctacctttgcacttccttcggagagcatctaagattggagaggttgatgtcgagcaacatactttggccaaatacctgatggaactaactatgttggactatgacatggtgcactttcctccttctcaaattgcagcaggagctttttgcttagcactgaaaattctggataatggtgaatggacaccaactctacaacattacctgtcatatactgaagaatctcttcttccagttatgcagcacctggctaagaatgtagtcatggtaaatcaaggacttacaaagcacatgactgtcaagaacaagtatgccacatcgaagcatgctaagatcagcactctaccacagctgaattctgcactagttcaagatttagccaaggctgtggcaaaggtgtaacttgtaaacttgagttggagtactatatttacaaataaaattggcaccatgtgccatctgtacatattactgttgcatttacttttaataaagcttgtggccccttttacttttttatagcttaactaatttgaatgtggttacttcctactgtagggtagcggaaaagttgtcttaaaaggtatggtggggatatttttaaaaactccttttggtttacctggggatccaattgatgtatatgtttatatactgggttcttgttttatatacctggcttttactttattaatatgagttactgaaggtgatggaggtatttgaaaattttacttccataggacatactgcatgtaagccaagtcatggagaatctgctgcatagctctattttaaagtaaaagtctaccaccgaatccctagtccccctgttttctgtttcttcttgtgattgctgccataattctaagttatttacttttaccactatttaagttatcaactttagctagtatcttcaaactttcactttgaaaaatgagaattttatattctaagccagttttcattttggttttgtgttttggttaataaaacaatactcaaatacaaaaatatcttttttaaaaa

SEQ ID NO: 437697 - DNA, 7520 bp, Homo sapiens
  misc_feature (4088)..(4088): n is a, c, g, or t
  misc_feature (5487)..(5487): n is a, c, g, or t
  misc_feature (5701)..(5701): n is a, c, g, or t
gacttgtttcatgatgacaaggaccctgttcctgccaccacccctgggaaggggtcatcttcgaagatcagcgtccgttctgccagaccccccatgaaagtctccaacaaggagcacaagaaaaccgttggccaccagttccgtacctccctgcatctgctcatggagaccctgaatgccacgacacctcactatgtccgctgcatcaagcccaacgatgagaagctcccctttcactttgacccaaagagagcagtgcagcaactcagagcctgcggggtgttggagacgattcgaatcagtgcagctggctacccatccaggtgggcctaccatgactttttcaaccggtatcgggtgctggtcaagaagagagagctcgccaacacagacaaaaaggccatctgcaggtctgtcctggagaacctcatcaaggaccccgacaagttccagtttggccgcaccaagatcttctttcgagcaggccaggtggcctacctggagaagctgcgggctgacaagttccggacagccaccatcatgatccagaaaactgtccggggatggctgcagaaggtgaaatatcacaggctgaagggggctaccttaaccctgcagaggtactgccggggacacctggcccgcaggctggctgagcacctgcggaggatcagagcggctgtggtgctccagaaacattaccgcatgcagagggcccgccaggcctaccagagggtccgcagagctgccgttgttatccaggccttcacccgggccatgtttgtgcggagaacctaccgccaggtcctcatggagcacaaggccaccaccatccagaagcacgtgcggggctggatggcacgcaggcacttccagcggctgcgggatgcagccattgtcatccagtgtgccttccggatgctcaaggccaggcgggagctgaaggccctcaggattgaggcccgctcagcagagcatctgaaacgtctcaacgtgggcatggagaacaaggtggtccagctgcagcggaagatcgatgagcagaacaaagagttcaagacactttcagagcagttgtccgtgaccacctcaacatacaccatggaggtagagcggctgaagaaggagctggtgcactaccagcagagcccaggtgaggacaccagcctcaggctgcaggaggaggtggagagcctgcgcacagagctgcagagggcccactcggagcgcaagatcttggaggacgcccacagcagggagaaagatgagctgaggaagcgagttgcagacctggagcaagaaaatgctctcttgaaagatgagaaagaacagctcaacaaccaaatcctgtgccagtctaaagatgaatttgcccagaactctgtgaaggaaaatctcatgaagaaagaactggaggaggagcgatcccggtaccagaaccttgtgaaggaatattcacagttggagcagagatacgacaaccttcgggatgaaatgaccatcataaagcaaactccaggtcataggcggaacccatcaaaccaaagtagcttagaatctgactccaattacccctccatctccacatctgagatcggagacactgaggatgccctccagcaggtggaggaaattggcctggagaaggcagccatggacatgacggtcttcctgaagctgcagaagagagtacgggagctggagcaggagaggaaaaagctgcaagtgcagctggagaagagagaacagcaggacagcaagaaagtccaggcggaaccaccacagactgacatagatttggacccgaatgcagatctggcctacaatagtctgaagaggcaagagctggagtcagagaacaaaaagctgaagaatgacctgaatgagctgaggaaagccgtggccgaccaagccacgcagaataactccagccacggctccccagatagctacagcctcctgctgaaccagctcaagctggcccacgaggagctcgaggtgcgcaaggaggaggtgctcatcctcaggacccagatcgtgagcgccgaccagcggcgactcgccggcaggaacgcggagccgaacattaatgccagatcaagttggcctaacagtgaaaagcatgttgaccaggaggatgccattgaggcctatcacggggtctgccagacaaacagcaagactgaggattggggatatttaaatgaagatggagaactcggcttggcctaccaaggcctaaagcaagttgccaggctgctggaggctcagctgcaggcccagagcctggagcatgaggaggaggtggagcatctcaaggctcagctcgaggccctgaaggaggagatggacaaacagcagcagaccttctgccagacgctactgctctccccagaggcccaggtggaattcggcgttcagcaggaaatatcccggctgaccaacgagaatctggaccttaaagaactggtagaaaagctggaaaagaatgagaggaagctcaaaaagcaactgaagatttacatgaagaaagcccaggacctagaagctgcccaggcattggcccagagtgagaggaagcgccatgagctcaacaggcaggtcacggtccagcggaaagagaaggatttccagggcatgctggagtaccacaaagaggacgaggccctcctcatccggaacctggtgacagacttgaagccccagatgctgtcgggcacagtgccctgtctccccgcctacatcctctacatgtgcatccggcacgcggactacaccaacgacgatctcaaggtgcactccctgctgacctccaccatcaacggcattaagaaagtcctgaaaaagcacaatgatgactttgagatgacgtcattctggttatccaacacctgccgccttcttcactgtctgaagcagtacagcggggatgagggcttcatgactcagaacactgcaaagcagaatgaacactgtcttaagaattttgacctcaccgaataccgtcaggtgctgagtgacctttccattcagatctaccagcagctcattaaaattgccgagggcgtgttacagccgatgatagtttctgccatgttggaaaatgagagcattcagggtctatctggtgtgaagcccaccggctaccggaagcgctcctccagcatggcagatggggataactcatactgcctggaagctatcatccgccagatgaatgcctttcatacagtcatgtgtgaccagggcttggaccctgagatcatcctgcaggtattcaaacagctcttctacatgatcaacgcagtgactcttaacaacctgctcttgcggaaggacgtctgctcttggagcacaggcatgcaactcaggtacaatataagtcagcttgaggagtggcttcggggaagaaaccttcaccagagtggagcagttcagaccatggaacctctgatccaagcagcccagctcctgcaattaaagaagaaaacccaggaggacgcagaggctatctgctccctgtgtacctccctcagcacccagcagattgtcaaaattttaaacctttatactcccctgaatgaatttgaagaacgggtaacagtggcctttatacgaacaatccaggcacaactacaagagcggaatgaccctcagcaactgctattagatgccaagcacatgtttcctgttttgtttccatttaatccatcttctctaaccatggactcaatccacatcccagcgtgtctcaatctggaattcctcaatgaagtctgaagatgcatgtttccagcattagtttgattcccaatgtgagcaagaaggaagtatatacagtaaagtaaattcaaggatctgttaaatctggtaaaagtagatcaaatcagagattgacagcctgtggagggtgctgaactatacagaattagacacaactatgtcattattttttgtacctactgctcagaataaaaacacttgaaatatggaagattttaagtttgatttcagtccaacacatatacataatttatagacaccaagcagtccccatagacatataaaaggtgtcaattctataaaangaagctgcctagttttgatctttgcatagaactagagaatgtccaaattaaaataccaaatatatataagtcacataaattgccttcaaagggctttaacaaataatggtactaataaccatgataatggcatatactgacatttcccaaagtttgcaaaccataggtgtggttgagtttgtggtgagatgttttaagaacaaaaatatggggatgagacttctgagaaatattcccaaaatattttttaatggctgattatacacagacagtggtgtaactgacctccagaccagacattttgagtactggtttctgaagcaaaattagaagtgccagtcctcagtgtgctcaaacgcttttgtgttatcttgatttaatggaagagattattaaaatgctgctatcccaaactccaagtgagaaagatggaaaaatattttgtttctgatgctagtccatacactttccaagtcccacaaaactttcacaaaaatgtatataagctaaatattagaaacggataacaaacttgttttatttatagatgtaaaaaccaaacaagtcaatatgaaagcttttaatctcttaataccattaagcttccagtaagagcatcacataatgctctactgttccagaaaccaaatagtaaaacaaactaaagttcgcacatcagatcatctgaaaaaccttcaaaaataatcagttcagggatattatacaaaagtttgggttttttttttttaagagaataaaatggcttaggtcaactttcccttttcaggttattttcaacgtttttcaaatttagcacacaaaaaattgtaaatatctctcccacaaaataaggattttaaaaaagtaattcagtaatataacaggcttagatgtttgctgctcttagaattttttttaacttgtttttggtttcttcaaaagcaagcattcaattggaaacccatattctttccacacttttttttactgtcttttctgtatttcttgatagcagtatgctgttcccataagaaaaaaatggtatttgcaaatcatggaagaacagcctctgtattacattgagaaaataagatttatccatgaattggaagtagaacagcctgccttcaccctcttttactcaaccacccaacttaaaaggctcttggaaacacagcacactccacgctaccttctgcactgtgcccttagagcacagcttcctcagttgttctctgcatctcctggggcttaggccagtcttagcctgggttaaggctgctgacattgtgttccaatcagttgtcatgggcattatcccctctacatccacattaaacatgccggcttctcttgggcatcggcagagctgtgcctttttctttcagttacagttacntaatcactgacgtccatgacacttacccatggatccatgtgctgacttcatttagaaggccaatctaaaacaactgggtttgtggctacctctttaaagttgtttgtgaaggataatttgttttttaatgcactttagtttgaaagtgagtctcttatgtaaggaccatccttaaaagaccaaaaatgccttgttagagtgttaaggagttttnacatgcagtggttccacaaacacagtggcttactatccttatacactgtcttataccatcattctctccatctctcttggtcactactctctgctgtcactggttaatcactaggtgccaagagcttactgaataaaagcttggcaattagaataaatggggagggaaggaccttatgaatagtccatttagcctaagaaatggcagatttagttcttctcttccaaaagataaaggtatatcctggaattgtacttaaaacttacagatgactaacaaatatatactttatatgtagttaatatttagatctgtcttctttaatacttggaggctagaagaagcatctttaggggaactatataatcttttgttagcattttctctgcattttaaaaaatcatttcaattcaaacatttatcagtgtcatgaaatcagtaatgactctttaacaattcaggtttgaactctgcattagatgtctctttaattttttaatatttaaaatttagttgacatttttttcaccaggtgcctttagcggttactaagataactgacatcagttgtttctctgaaataagtgttgctgtgggaataattttaatgttcaaggtgatatcatgggggagttttgtcttttaaaacattagaagcattttaaatattaagaatcaaatatttatagatcaaaacttgtgttttaagtattatacgggacctgtttacttatagtaaatgtgaatgtacacatgagttgttgctgaagctgacaagcatattacatacatgcattttccctgtgccctcatagttgcagttagagttccagtacctgtaggctcacctgggaggcagattagacccaaaggtagatgtttttcccctttccatgaagcatgtcagtgggagttgcttcctttgatttccctagtactaaattttaaggcttttgtaaaaacaaaacaaaactaggagcttggaacagttaaaaatcaacactgctaccatcaattcatcaaatatttacttagagctttcatacattaagattccagtaaccaataaattagaattcatttcttctgcataaagtaaattttcatacacttgacctactaagacagcaagggtgtcctaaattgaggcatttgtataatgcctgcataactaaatggtcactaaaatgggacagcatggggcaagaccttgtagttcttcacagaatatttgtggtcagtttctccaattaatttgctgcatgagccaaataaccataattcactttttatacccactggtgccataattagagaattagagggtgtagacagaggttaatgccaatgagaaacacaggacagggttttttttattataaaggtcattagatacaaaagattgtttttcaaaaaatttctaattctaacaaaggggatcaatcagaaatgaaactaagctactttctaaagtgacactgtatcagaataatccagatttgaatataacattttgccaccaactgacatttagatgaaggactgcctctctgaaagagttcagatcatattcaggggtgaatccaacaccatggaagaaagactactgatgaaaatattttcccactttgcacaaatctgtaaactacacctttgtttatagaaaaatgcttgtaatagtcactgtaatatttagctgtggataaaaatttgtggaaataaatacttttgaataaagaggtgtgccaaatctaaatgaaatttaaaactctgcagctacaggttgacaaagtttctttgtaatgctctcttgagaagc

SEQ ID NO: 437698 - DNA, 5602 bp, Homo sapiens
  misc_feature (2170)..(2170): n is a, c, g, or t
  misc_feature (3569)..(3569): n is a, c, g, or t
  misc_feature (3783)..(3783): n is a, c, g, or t
ccgtcgcgtgttcaagctggaaaaagctgaagaatgacctgaatgagctgaggaaagccgtggccgaccaagccacgcagaataactccagccacggctccccagatagctacagcctcctgctgaaccagctcaagctggcccacgaggagctcgaggtgcgcaaggaggaggtgctcatcctcaggacccagatcgtgagcgccgaccagcggcgactcgccggcaggaacgcggagccgaacattaatgccagatcaagttggcctaacagtgaaaagcatgttgaccaggaggatgccattgaggcctatcacggggtctgccagacaaacaggctgctggaggctcagctgcaggcccagagcctggagcatgaggaggaggtggagcatctcaaggctcagctcgaggccctgaaggaggagatggacaaacagcagcagaccttctgccagacgctactgctctccccagaggcccaggtggaattcggcgttcagcaggaaatatcccggctgaccaacgagaatctggaccttaaagaactggtagaaaagctggaaaagaatgagaggaagctcaaaaagcaactgaagatttacatgaagaaagcccaggacctagaagctgcccaggcattggcccagagtgagaggaagcgccatgagctcaacaggcaggtcacggtccagcggaaagagaaggatttccagggcatgctggagtaccacaaagaggacgaggccctcctcatccggaacctggtgacagacttgaagccccagatgctgtcgggcacagtgccctgtctccccgcctacatcctctacatgtgcatccggcacgcggactacaccaacgacgatctcaaggtgcactccctgctgacctccaccatcaacggcattaagaaagtcctgaaaaagcacaatgatgactttgagatgacgtcattctggttatccaacacctgccgccttcttcactgtctgaagcagtacagcggggatgagggcttcatgactcagaacactgcaaagcagaatgaacactgtcttaagaattttgacctcaccgaataccgtcaggtgctgagtgacctttccattcagatctaccagcagctcattaaaattgccgagggcgtgttacagccgatgatagtttctgccatgttggaaaatgagagcattcagggtctatctggtgtgaagcccaccggctaccggaagcgctcctccagcatggcagatggggataactcatactgcctggaagctatcatccgccagatgaatgcctttcatacagtcatgtgtgaccagggcttggaccctgagatcatcctgcaggtattcaaacagctcttctacatgatcaacgcagtgactcttaacaacctgctcttgcggaaggacgtctgctcttggagcacaggcatgcaactcaggtacaatataagtcagcttgaggagtggcttcggggaagaaaccttcaccagagtggagcagttcagaccatggaacctctgatccaagcagcccagctcctgcaattaaagaagaaaacccaggaggacgcagaggctatctgctccctgtgtacctccctcagcacccagcagattgtcaaaattttaaacctttatactcccctgaatgaatttgaagaacgggtaacagtggcctttatacgaacaatccaggcacaactacaagagcggaatgaccctcagcaactgctattagatgccaagcacatgtttcctgttttgtttccatttaatccatcttctctaaccatggactcaatccacatcccagcgtgtctcaatctggaattcctcaatgaagtctgaagatgcatgtttccagcattagtttgattcccaatgtgagcaagaaggaagtatatacagtaaagtaaattcaaggatctgttaaatctggtaaaagtagatcaaatcagagattgacagcctgtggagggtgctgaactatacagaattagacacaactatgtcattattttttgtacctactgctcagaataaaaacacttgaaatatggaagattttaagtttgatttcagtccaacacatatacataatttatagacaccaagcagtccccatagacatataaaaggtgtcaattctataaaangaagctgcctagttttgatctttgcatagaactagagaatgtccaaattaaaataccaaatatatataagtcacataaattgccttcaaagggctttaacaaataatggtactaataaccatgataatggcatatactgacatttcccaaagtttgcaaaccataggtgtggttgagtttgtggtgagatgttttaagaacaaaaatatggggatgagacttctgagaaatattcccaaaatattttttaatggctgattatacacagacagtggtgtaactgacctccagaccagacattttgagtactggtttctgaagcaaaattagaagtgccagtcctcagtgtgctcaaacgcttttgtgttatcttgatttaatggaagagattattaaaatgctgctatcccaaactccaagtgagaaagatggaaaaatattttgtttctgatgctagtccatacactttccaagtcccacaaaactttcacaaaaatgtatataagctaaatattagaaacggataacaaacttgttttatttatagatgtaaaaaccaaacaagtcaatatgaaagcttttaatctcttaataccattaagcttccagtaagagcatcacataatgctctactgttccagaaaccaaatagtaaaacaaactaaagttcgcacatcagatcatctgaaaaaccttcaaaaataatcagttcagggatattatacaaaagtttgggttttttttttttaagagaataaaatggcttaggtcaactttcccttttcaggttattttcaacgtttttcaaatttagcacacaaaaaattgtaaatatctctcccacaaaataaggattttaaaaaagtaattcagtaatataacaggcttagatgtttgctgctcttagaattttttttaacttgtttttggtttcttcaaaagcaagcattcaattggaaacccatattctttccacacttttttttactgtcttttctgtatttcttgatagcagtatgctgttcccataagaaaaaaatggtatttgcaaatcatggaagaacagcctctgtattacattgagaaaataagatttatccatgaattggaagtagaacagcctgccttcaccctcttttactcaaccacccaacttaaaaggctcttggaaacacagcacactccacgctaccttctgcactgtgcccttagagcacagcttcctcagttgttctctgcatctcctggggcttaggccagtcttagcctgggttaaggctgctgacattgtgttccaatcagttgtcatgggcattatcccctctacatccacattaaacatgccggcttctcttgggcatcggcagagctgtgcctttttctttcagttacagttacntaatcactgacgtccatgacacttacccatggatccatgtgctgacttcatttagaaggccaatctaaaacaactgggtttgtggctacctctttaaagttgtttgtgaaggataatttgttttttaatgcactttagtttgaaagtgagtctcttatgtaaggaccatccttaaaagaccaaaaatgccttgttagagtgttaaggagttttnacatgcagtggttccacaaacacagtggcttactatccttatacactgtcttataccatcattctctccatctctcttggtcactactctctgctgtcactggttaatcactaggtgccaagagcttactgaataaaagcttggcaattagaataaatggggagggaaggaccttatgaatagtccatttagcctaagaaatggcagatttagttcttctcttccaaaagataaaggtatatcctggaattgtacttaaaacttacagatgactaacaaatatatactttatatgtagttaatatttagatctgtcttctttaatacttggaggctagaagaagcatctttaggggaactatataatcttttgttagcattttctctgcattttaaaaaatcatttcaattcaaacatttatcagtgtcatgaaatcagtaatgactctttaacaattcaggtttgaactctgcattagatgtctctttaattttttaatatttaaaatttagttgacatttttttcaccaggtgcctttagcggttactaagataactgacatcagttgtttctctgaaataagtgttgctgtgggaataattttaatgttcaaggtgatatcatgggggagttttgtcttttaaaacattagaagcattttaaatattaagaatcaaatatttatagatcaaaacttgtgttttaagtattatacgggacctgtttacttatagtaaatgtgaatgtacacatgagttgttgctgaagctgacaagcatattacatacatgcattttccctgtgccctcatagttgcagttagagttccagtacctgtaggctcacctgggaggcagattagacccaaaggtagatgtttttcccctttccatgaagcatgtcagtgggagttgcttcctttgatttccctagtactaaattttaaggcttttgtaaaaacaaaacaaaactaggagcttggaacagttaaaaatcaacactgctaccatcaattcatcaaatatttacttagagctttcatacattaagattccagtaaccaataaattagaattcatttcttctgcataaagtaaattttcatacacttgacctactaagacagcaagggtgtcctaaattgaggcatttgtataatgcctgcataactaaatggtcactaaaatgggacagcatggggcaagaccttgtagttcttcacagaatatttgtggtcagtttctccaattaatttgctgcatgagccaaataaccataattcactttttatacccactggtgccataattagagaattagagggtgtagacagaggttaatgccaatgagaaacacaggacagggttttttttattataaaggtcattagatacaaaagattgtttttcaaaaaatttctaattctaacaaaggggatcaatcagaaatgaaactaagctactttctaaagtgacactgtatcagaataatccagatttgaatataacattttgccaccaactgacatttagatgaaggactgcctctctgaaagagttcagatcatattcaggggtgaatccaacaccatggaagaaagactactgatgaaaatattttcccactttgcacaaatctgtaaactacacctttgtttatagaaaaatgcttgtaatagtcactgtaatatttagctgtggataaaaatttgtggaaataaatacttttgaataaagaggtgtgccaaatctaaatgaaatttaaaactctgcagctacaggttgacaaagtttctttgtaatgctctcttgagaagc

SEQ ID NO: 437699 - DNA, 4613 bp, Homo sapiens
  misc_feature (29)..(29): n is a, c, g, or t
  misc_feature (48)..(48): n is a, c, g, or t
  misc_feature (1181)..(1181): n is a, c, g, or t
  misc_feature (2580)..(2580): n is a, c, g, or t
  misc_feature (2794)..(2794): n is a, c, g, or t
tggtttcagacaggaagaagggggcagtnttggataacccagaatgangtcatctcaaagtcatcatgtcttaagaattttgacctcaccgaataccgtcaggtgctgagtgacctttccattcagatctaccagcagctcattaaaattgccgagggcgtgttacagccgatgatagtttctgccatgttggaaaatgagagcattcagggtctatctggtgtgaagcccaccggctaccggaagcgctcctccagcatggcagatggggataactcatactgcctggaagctatcatccgccagatgaatgcctttcatacagtcatgtgtgaccagggcttggaccctgagatcatcctgcaggtattcaaacagctcttctacatgatcaacgcagtgactcttaacaacctgctcttgcggaaggacgtctgctcttggagcacaggcatgcaactcaggtacaatataagtcagcttgaggagtggcttcggggaagaaaccttcaccagagtggagcagttcagaccatggaacctctgatccaagcagcccagctcctgcaattaaagaagaaaacccaggaggacgcagaggctatctgctccctgtgtacctccctcagcacccagcagattgtcaaaattttaaacctttatactcccctgaatgaatttgaagaacgggtaacagtggcctttatacgaacaatccaggcacaactacaagagcggaatgaccctcagcaactgctattagatgccaagcacatgtttcctgttttgtttccatttaatccatcttctctaaccatggactcaatccacatcccagcgtgtctcaatctggaattcctcaatgaagtctgaagatgcatgtttccagcattagtttgattcccaatgtgagcaagaaggaagtatatacagtaaagtaaattcaaggatctgttaaatctggtaaaagtagatcaaatcagagattgacagcctgtggagggtgctgaactatacagaattagacacaactatgtcattattttttgtacctactgctcagaataaaaacacttgaaatatggaagattttaagtttgatttcagtccaacacatatacataatttatagacaccaagcagtccccatagacatataaaaggtgtcaattctataaaangaagctgcctagttttgatctttgcatagaactagagaatgtccaaattaaaataccaaatatatataagtcacataaattgccttcaaagggctttaacaaataatggtactaataaccatgataatggcatatactgacatttcccaaagtttgcaaaccataggtgtggttgagtttgtggtgagatgttttaagaacaaaaatatggggatgagacttctgagaaatattcccaaaatattttttaatggctgattatacacagacagtggtgtaactgacctccagaccagacattttgagtactggtttctgaagcaaaattagaagtgccagtcctcagtgtgctcaaacgcttttgtgttatcttgatttaatggaagagattattaaaatgctgctatcccaaactccaagtgagaaagatggaaaaatattttgtttctgatgctagtccatacactttccaagtcccacaaaactttcacaaaaatgtatataagctaaatattagaaacggataacaaacttgttttatttatagatgtaaaaaccaaacaagtcaatatgaaagcttttaatctcttaataccattaagcttccagtaagagcatcacataatgctctactgttccagaaaccaaatagtaaaacaaactaaagttcgcacatcagatcatctgaaaaaccttcaaaaataatcagttcagggatattatacaaaagtttgggttttttttttttaagagaataaaatggcttaggtcaactttcccttttcaggttattttcaacgtttttcaaatttagcacacaaaaaattgtaaatatctctcccacaaaataaggattttaaaaaagtaattcagtaatataacaggcttagatgtttgctgctcttagaattttttttaacttgtttttggtttcttcaaaagcaagcattcaattggaaacccatattctttccacacttttttttactgtcttttctgtatttcttgatagcagtatgctgttcccataagaaaaaaatggtatttgcaaatcatggaagaacagcctctgtattacattgagaaaataagatttatccatgaattggaagtagaacagcctgccttcaccctcttttactcaaccacccaacttaaaaggctcttggaaacacagcacactccacgctaccttctgcactgtgcccttagagcacagcttcctcagttgttctctgcatctcctggggcttaggccagtcttagcctgggttaaggctgctgacattgtgttccaatcagttgtcatgggcattatcccctctacatccacattaaacatgccggcttctcttgggcatcggcagagctgtgcctttttctttcagttacagttacntaatcactgacgtccatgacacttacccatggatccatgtgctgacttcatttagaaggccaatctaaaacaactgggtttgtggctacctctttaaagttgtttgtgaaggataatttgttttttaatgcactttagtttgaaagtgagtctcttatgtaaggaccatccttaaaagaccaaaaatgccttgttagagtgttaaggagttttnacatgcagtggttccacaaacacagtggcttactatccttatacactgtcttataccatcattctctccatctctcttggtcactactctctgctgtcactggttaatcactaggtgccaagagcttactgaataaaagcttggcaattagaataaatggggagggaaggaccttatgaatagtccatttagcctaagaaatggcagatttagttcttctcttccaaaagataaaggtatatcctggaattgtacttaaaacttacagatgactaacaaatatatactttatatgtagttaatatttagatctgtcttctttaatacttggaggctagaagaagcatctttaggggaactatataatcttttgttagcattttctctgcattttaaaaaatcatttcaattcaaacatttatcagtgtcatgaaatcagtaatgactctttaacaattcaggtttgaactctgcattagatgtctctttaattttttaatatttaaaatttagttgacatttttttcaccaggtgcctttagcggttactaagataactgacatcagttgtttctctgaaataagtgttgctgtgggaataattttaatgttcaaggtgatatcatgggggagttttgtcttttaaaacattagaagcattttaaatattaagaatcaaatatttatagatcaaaacttgtgttttaagtattatacgggacctgtttacttatagtaaatgtgaatgtacacatgagttgttgctgaagctgacaagcatattacatacatgcattttccctgtgccctcatagttgcagttagagttccagtacctgtaggctcacctgggaggcagattagacccaaaggtagatgtttttcccctttccatgaagcatgtcagtgggagttgcttcctttgatttccctagtactaaattttaaggcttttgtaaaaacaaaacaaaactaggagcttggaacagttaaaaatcaacactgctaccatcaattcatcaaatatttacttagagctttcatacattaagattccagtaaccaataaattagaattcatttcttctgcataaagtaaattttcatacacttgacctactaagacagcaagggtgtcctaaattgaggcatttgtataatgcctgcataactaaatggtcactaaaatgggacagcatggggcaagaccttgtagttcttcacagaatatttgtggtcagtttctccaattaatttgctgcatgagccaaataaccataattcactttttatacccactggtgccataattagagaattagagggtgtagacagaggttaatgccaatgagaaacacaggacagggttttttttattataaaggtcattagatacaaaagattgtttttcaaaaaatttctaattctaacaaaggggatcaatcagaaatgaaactaagctactttctaaagtgacactgtatcagaataatccagatttgaatataacattttgccaccaactgacatttagatgaaggactgcctctctgaaagagttcagatcatattcaggggtgaatccaacaccatggaagaaagactactgatgaaaatattttcccactttgcacaaatctgtaaactacacctttgtttatagaaaaatgcttgtaatagtcactgtaatatttagctgtggataaaaatttgtggaaataaatacttttgaataaagaggtgtgccaaatctaaatgaaatttaaaactctgcagctacaggttgacaaagtttctttgtaatgctctcttgagaagc

SEQ ID NO: 437700 - DNA, 4179 bp, Homo sapiens
  misc_feature (747)..(747): n is a, c, g, or t
  misc_feature (2146)..(2146): n is a, c, g, or t
  misc_feature (2360)..(2360): n is a, c, g, or t
ctgtcagatctgaatggaaaggtcactcaggtacaatataagtcagcttgaggagtggcttcggggaagaaaccttcaccagagtggagcagttcagaccatggaacctctgatccaagcagcccagctcctgcaattaaagaagaaaacccaggaggacgcagaggctatctgctccctgtgtacctccctcagcacccagcagattgtcaaaattttaaacctttatactcccctgaatgaatttgaagaacgggtaacagtggcctttatacgaacaatccaggcacaactacaagagcggaatgaccctcagcaactgctattagatgccaagcacatgtttcctgttttgtttccatttaatccatcttctctaaccatggactcaatccacatcccagcgtgtctcaatctggaattcctcaatgaagtctgaagatgcatgtttccagcattagtttgattcccaatgtgagcaagaaggaagtatatacagtaaagtaaattcaaggatctgttaaatctggtaaaagtagatcaaatcagagattgacagcctgtggagggtgctgaactatacagaattagacacaactatgtcattattttttgtacctactgctcagaataaaaacacttgaaatatggaagattttaagtttgatttcagtccaacacatatacataatttatagacaccaagcagtccccatagacatataaaaggtgtcaattctataaaangaagctgcctagttttgatctttgcatagaactagagaatgtccaaattaaaataccaaatatatataagtcacataaattgccttcaaagggctttaacaaataatggtactaataaccatgataatggcatatactgacatttcccaaagtttgcaaaccataggtgtggttgagtttgtggtgagatgttttaagaacaaaaatatggggatgagacttctgagaaatattcccaaaatattttttaatggctgattatacacagacagtggtgtaactgacctccagaccagacattttgagtactggtttctgaagcaaaattagaagtgccagtcctcagtgtgctcaaacgcttttgtgttatcttgatttaatggaagagattattaaaatgctgctatcccaaactccaagtgagaaagatggaaaaatattttgtttctgatgctagtccatacactttccaagtcccacaaaactttcacaaaaatgtatataagctaaatattagaaacggataacaaacttgttttatttatagatgtaaaaaccaaacaagtcaatatgaaagcttttaatctcttaataccattaagcttccagtaagagcatcacataatgctctactgttccagaaaccaaatagtaaaacaaactaaagttcgcacatcagatcatctgaaaaaccttcaaaaataatcagttcagggatattatacaaaagtttgggttttttttttttaagagaataaaatggcttaggtcaactttcccttttcaggttattttcaacgtttttcaaatttagcacacaaaaaattgtaaatatctctcccacaaaataaggattttaaaaaagtaattcagtaatataacaggcttagatgtttgctgctcttagaattttttttaacttgtttttggtttcttcaaaagcaagcattcaattggaaacccatattctttccacacttttttttactgtcttttctgtatttcttgatagcagtatgctgttcccataagaaaaaaatggtatttgcaaatcatggaagaacagcctctgtattacattgagaaaataagatttatccatgaattggaagtagaacagcctgccttcaccctcttttactcaaccacccaacttaaaaggctcttggaaacacagcacactccacgctaccttctgcactgtgcccttagagcacagcttcctcagttgttctctgcatctcctggggcttaggccagtcttagcctgggttaaggctgctgacattgtgttccaatcagttgtcatgggcattatcccctctacatccacattaaacatgccggcttctcttgggcatcggcagagctgtgcctttttctttcagttacagttacntaatcactgacgtccatgacacttacccatggatccatgtgctgacttcatttagaaggccaatctaaaacaactgggtttgtggctacctctttaaagttgtttgtgaaggataatttgttttttaatgcactttagtttgaaagtgagtctcttatgtaaggaccatccttaaaagaccaaaaatgccttgttagagtgttaaggagttttnacatgcagtggttccacaaacacagtggcttactatccttatacactgtcttataccatcattctctccatctctcttggtcactactctctgctgtcactggttaatcactaggtgccaagagcttactgaataaaagcttggcaattagaataaatggggagggaaggaccttatgaatagtccatttagcctaagaaatggcagatttagttcttctcttccaaaagataaaggtatatcctggaattgtacttaaaacttacagatgactaacaaatatatactttatatgtagttaatatttagatctgtcttctttaatacttggaggctagaagaagcatctttaggggaactatataatcttttgttagcattttctctgcattttaaaaaatcatttcaattcaaacatttatcagtgtcatgaaatcagtaatgactctttaacaattcaggtttgaactctgcattagatgtctctttaattttttaatatttaaaatttagttgacatttttttcaccaggtgcctttagcggttactaagataactgacatcagttgtttctctgaaataagtgttgctgtgggaataattttaatgttcaaggtgatatcatgggggagttttgtcttttaaaacattagaagcattttaaatattaagaatcaaatatttatagatcaaaacttgtgttttaagtattatacgggacctgtttacttatagtaaatgtgaatgtacacatgagttgttgctgaagctgacaagcatattacatacatgcattttccctgtgccctcatagttgcagttagagttccagtacctgtaggctcacctgggaggcagattagacccaaaggtagatgtttttcccctttccatgaagcatgtcagtgggagttgcttcctttgatttccctagtactaaattttaaggcttttgtaaaaacaaaacaaaactaggagcttggaacagttaaaaatcaacactgctaccatcaattcatcaaatatttacttagagctttcatacattaagattccagtaaccaataaattagaattcatttcttctgcataaagtaaattttcatacacttgacctactaagacagcaagggtgtcctaaattgaggcatttgtataatgcctgcataactaaatggtcactaaaatgggacagcatggggcaagaccttgtagttcttcacagaatatttgtggtcagtttctccaattaatttgctgcatgagccaaataaccataattcactttttatacccactggtgccataattagagaattagagggtgtagacagaggttaatgccaatgagaaacacaggacagggttttttttattataaaggtcattagatacaaaagattgtttttcaaaaaatttctaattctaacaaaggggatcaatcagaaatgaaactaagctactttctaaagtgacactgtatcagaataatccagatttgaatataacattttgccaccaactgacatttagatgaaggactgcctctctgaaagagttcagatcatattcaggggtgaatccaacaccatggaagaaagactactgatgaaaatattttcccactttgcacaaatctgtaaactacacctttgtttatagaaaaatgcttgtaatagtcactgtaatatttagctgtggataaaaatttgtggaaataaatacttttgaataaagaggtgtgccaaatctaaatgaaatttaaaactctgcagctacaggttgacaaagtttctttgtaatgctctcttgagaagc

SEQ ID NO: 437701 - DNA, 4156 bp, Homo sapiens
  misc_feature (724)..(724): n is a, c, g, or t
  misc_feature (2123)..(2123): n is a, c, g, or t
  misc_feature (2337)..(2337): n is a, c, g, or t
tgtcaggaaagtgcacactgttgttacgtggagtaaaaccatcagagtcaaggaaccaacaccaccatagcccagctgcttcttttaagaggctgtgaacagaggggttcccaacagagaacatacacgctcatcttctgaacttggacaatgatcaaagacttctcctcagcacccagcagattgtcaaaattttaaacctttatactcccctgaatgaatttgaagaacgggtaacagtggcctttatacgaacaatccaggcacaactacaagagcggaatgaccctcagcaactgctattagatgccaagcacatgtttcctgttttgtttccatttaatccatcttctctaaccatggactcaatccacatcccagcgtgtctcaatctggaattcctcaatgaagtctgaagatgcatgtttccagcattagtttgattcccaatgtgagcaagaaggaagtatatacagtaaagtaaattcaaggatctgttaaatctggtaaaagtagatcaaatcagagattgacagcctgtggagggtgctgaactatacagaattagacacaactatgtcattattttttgtacctactgctcagaataaaaacacttgaaatatggaagattttaagtttgatttcagtccaacacatatacataatttatagacaccaagcagtccccatagacatataaaaggtgtcaattctataaaangaagctgcctagttttgatctttgcatagaactagagaatgtccaaattaaaataccaaatatatataagtcacataaattgccttcaaagggctttaacaaataatggtactaataaccatgataatggcatatactgacatttcccaaagtttgcaaaccataggtgtggttgagtttgtggtgagatgttttaagaacaaaaatatggggatgagacttctgagaaatattcccaaaatattttttaatggctgattatacacagacagtggtgtaactgacctccagaccagacattttgagtactggtttctgaagcaaaattagaagtgccagtcctcagtgtgctcaaacgcttttgtgttatcttgatttaatggaagagattattaaaatgctgctatcccaaactccaagtgagaaagatggaaaaatattttgtttctgatgctagtccatacactttccaagtcccacaaaactttcacaaaaatgtatataagctaaatattagaaacggataacaaacttgttttatttatagatgtaaaaaccaaacaagtcaatatgaaagcttttaatctcttaataccattaagcttccagtaagagcatcacataatgctctactgttccagaaaccaaatagtaaaacaaactaaagttcgcacatcagatcatctgaaaaaccttcaaaaataatcagttcagggatattatacaaaagtttgggttttttttttttaagagaataaaatggcttaggtcaactttcccttttcaggttattttcaacgtttttcaaatttagcacacaaaaaattgtaaatatctctcccacaaaataaggattttaaaaaagtaattcagtaatataacaggcttagatgtttgctgctcttagaattttttttaacttgtttttggtttcttcaaaagcaagcattcaattggaaacccatattctttccacacttttttttactgtcttttctgtatttcttgatagcagtatgctgttcccataagaaaaaaatggtatttgcaaatcatggaagaacagcctctgtattacattgagaaaataagatttatccatgaattggaagtagaacagcctgccttcaccctcttttactcaaccacccaacttaaaaggctcttggaaacacagcacactccacgctaccttctgcactgtgcccttagagcacagcttcctcagttgttctctgcatctcctggggcttaggccagtcttagcctgggttaaggctgctgacattgtgttccaatcagttgtcatgggcattatcccctctacatccacattaaacatgccggcttctcttgggcatcggcagagctgtgcctttttctttcagttacagttacntaatcactgacgtccatgacacttacccatggatccatgtgctgacttcatttagaaggccaatctaaaacaactgggtttgtggctacctctttaaagttgtttgtgaaggataatttgttttttaatgcactttagtttgaaagtgagtctcttatgtaaggaccatccttaaaagaccaaaaatgccttgttagagtgttaaggagttttnacatgcagtggttccacaaacacagtggcttactatccttatacactgtcttataccatcattctctccatctctcttggtcactactctctgctgtcactggttaatcactaggtgccaagagcttactgaataaaagcttggcaattagaataaatggggagggaaggaccttatgaatagtccatttagcctaagaaatggcagatttagttcttctcttccaaaagataaaggtatatcctggaattgtacttaaaacttacagatgactaacaaatatatactttatatgtagttaatatttagatctgtcttctttaatacttggaggctagaagaagcatctttaggggaactatataatcttttgttagcattttctctgcattttaaaaaatcatttcaattcaaacatttatcagtgtcatgaaatcagtaatgactctttaacaattcaggtttgaactctgcattagatgtctctttaattttttaatatttaaaatttagttgacatttttttcaccaggtgcctttagcggttactaagataactgacatcagttgtttctctgaaataagtgttgctgtgggaataattttaatgttcaaggtgatatcatgggggagttttgtcttttaaaacattagaagcattttaaatattaagaatcaaatatttatagatcaaaacttgtgttttaagtattatacgggacctgtttacttatagtaaatgtgaatgtacacatgagttgttgctgaagctgacaagcatattacatacatgcattttccctgtgccctcatagttgcagttagagttccagtacctgtaggctcacctgggaggcagattagacccaaaggtagatgtttttcccctttccatgaagcatgtcagtgggagttgcttcctttgatttccctagtactaaattttaaggcttttgtaaaaacaaaacaaaactaggagcttggaacagttaaaaatcaacactgctaccatcaattcatcaaatatttacttagagctttcatacattaagattccagtaaccaataaattagaattcatttcttctgcataaagtaaattttcatacacttgacctactaagacagcaagggtgtcctaaattgaggcatttgtataatgcctgcataactaaatggtcactaaaatgggacagcatggggcaagaccttgtagttcttcacagaatatttgtggtcagtttctccaattaatttgctgcatgagccaaataaccataattcactttttatacccactggtgccataattagagaattagagggtgtagacagaggttaatgccaatgagaaacacaggacagggttttttttattataaaggtcattagatacaaaagattgtttttcaaaaaatttctaattctaacaaaggggatcaatcagaaatgaaactaagctactttctaaagtgacactgtatcagaataatccagatttgaatataacattttgccaccaactgacatttagatgaaggactgcctctctgaaagagttcagatcatattcaggggtgaatccaacaccatggaagaaagactactgatgaaaatattttcccactttgcacaaatctgtaaactacacctttgtttatagaaaaatgcttgtaatagtcactgtaatatttagctgtggataaaaatttgtggaaataaatacttttgaataaagaggtgtgccaaatctaaatgaaatttaaaactctgcagctacaggttgacaaagtttctttgtaatgctctcttgagaagc

SEQ ID NO: 437702 - DNA, 643 bp, Homo sapiens
tccacgtcgtatttggtcaaaatactgtctgtgtcctttgatcacacacaccccacccggcacacccacagctaaacagaattcttcattagaggaaatagcagttctgttcaaaatctccgcaaaagctggtcagaaaactcgctatgaaatcacaaagactgatccaaagagctgagctgctacgctcactccattacagtacaatgttatgtcgggaacacgtgctgctaactcactggtgagttcaatggcaacgcttcattcgggaggctgttctgctttacgcatctgaggataacacgttcgcgaataatccagatttgaatataacattttgccaccaactgacatttagatgaaggactgcctctctgaaagagttcagatcatattcaggggtgaatccaacaccatggaagaaagactactgatgaaaatattttcccactttgcacaaatctgtaaactacacctttgtttatagaaaaatgcttgtaatagtcactgtaatatttagctgtggataaaaatttgtggaaataaatacttttgaataaagaggtgtgccaaatctaaatgaaatttaaaactctgcagctacaggttgacaaagtttctttgtaatgctctcttgagaagc

SEQ ID NO: 437703 - DNA, 3913 bp, Homo sapiens
gacttgtttcatgatgacaaggaccctgttcctgccaccacccctgggaaggggtcatcttcgaagatcagcgtccgttctgccagaccccccatgaaagtctccaacaaggagcacaagaaaaccgttggccaccagttccgtacctccctgcatctgctcatggagaccctgaatgccacgacacctcactatgtccgctgcatcaagcccaacgatgagaagctcccctttcactttgacccaaagagagcagtgcagcaactcagagcctgcggggtgttggagacgattcgaatcagtgcagctggctacccatccaggtgggcctaccatgactttttcaaccggtatcgggtgctggtcaagaagagagagctcgccaacacagacaaaaaggccatctgcaggtctgtcctggagaacctcatcaaggaccccgacaagttccagtttggccgcaccaagatcttctttcgagcaggccaggtggcctacctggagaagctgcgggctgacaagttccggacagccaccatcatgatccagaaaactgtccggggatggctgcagaaggtgaaatatcacaggctgaagggggctaccttaaccctgcagaggtactgccggggacacctggcccgcaggctggctgagcacctgcggaggatcagagcggctgtggtgctccagaaacattaccgcatgcagagggcccgccaggcctaccagagggtccgcagagctgccgttgttatccaggccttcacccgggccatgtttgtgcggagaacctaccgccaggtcctcatggagcacaaggccaccaccatccagaagcacgtgcggggctggatggcacgcaggcacttccagcggctgcgggatgcagccattgtcatccagtgtgccttccggatgctcaaggccaggcgggagctgaaggccctcaggattgaggcccgctcagcagagcatctgaaacgtctcaacgtgggcatggagaacaaggtggtccagctgcagcggaagatcgatgagcagaacaaagagttcaagacactttcagagcagttgtccgtgaccacctcaacatacaccatggaggtagagcggctgaagaaggagctggtgcactaccagcagagcccaggtgaggacaccagcctcaggctgcaggaggaggtggagagcctgcgcacagagctgcagagggcccactcggagcgcaagatcttggaggacgcccacagcagggagaaagatgagctgaggaagcgagttgcagacctggagcaagaaaatgctctcttgaaagatgagaaagaacagctcaacaaccaaatcctgtgccagtctaaagatgaatttgcccagaactctgtgaaggaaaatctcatgaagaaagaactggaggaggagcgatcccggtaccagaaccttgtgaaggaatattcacagttggagcagagatacgacaaccttcgggatgaaatgaccatcataaagcaaactccaggtcataggcggaacccatcaaaccaaagtagcttagaatctgactccaattacccctccatctccacatctgagatcggagacactgaggatgccctccagcaggtggaggaaattggcctggagaaggcagccatggacatgacggtcttcctgaagctgcagaagagagtacgggagctggagcaggagaggaaaaagctgcaagtgcagctggagaagagagaacagcaggacagcaagaaagtccaggcggaaccaccacagactgacatagatttggacccgaatgcagatctggcctacaatagtctgaagaggcaagagctggagtcagagaacaaaaagctgaagaatgacctgaatgagctgaggaaagccgtggccgaccaagccacgcagaataactccagccacggctccccagatagctacagcctcctgctgaaccagctcaagctggcccacgaggagctcgaggtgcgcaaggaggaggtgctcatcctcaggacccagatcgtgagcgccgaccagcggcgactcgccggcaggaacgcggagccgaacattaatgccagatcaagttggcctaacagtgaaaagcatgttgaccaggaggatgccattgaggcctatcacggggtctgccagacaaacaggctgctggaggctcagctgcaggcccagagcctggagcatgaggaggaggtggagcatctcaaggctcagctcgaggccctgaaggaggagatggacaaacagcagcagaccttctgccagacgctactgctctccccagaggcccaggtggaattcggcgttcagcaggaaatatcccggctgaccaacgagaatctggaccttaaagaactggtagaaaagctggaaaagaatgagaggaagctcaaaaagcaactgaagatttacatgaagaaagcccaggacctagaagctgcccaggcattggcccagagtgagaggaagcgccatgagctcaacaggcaggtcacggtccagcggaaagagaaggatttccagggcatgctggagtaccacaaagaggacgaggccctcctcatccggaacctggtgacagacttgaagccccagatgctgtcgggcacagtgccctgtctccccgcctacatcctctacatgtgcatccggcacgcggactacaccaacgacgatctcaaggtgcactccctgctgacctccaccatcaacggcattaagaaagtcctgaaaaagcacaatgatgactttgagatgacgtcattctggttatccaacacctgccgccttcttcactgtctgaagcagtacagcggggatgagggcttcatgactcagaacactgcaaagcagaatgaacactgtcttaagaattttgacctcaccgaataccgtcaggtgctgagtgacctttccattcagatctaccagcagctcattaaaattgccgagggcgtgttacagccgatgatagtttctgccatgttggaaaatgagagcattcagggtctatctggtgtgaagcccaccggctaccggaagcgctcctccagcatggcagatggggataactcatactgcctggaagctatcatccgccagatgaatgcctttcatacagtcatgtgtgaccagggcttggaccctgagatcatcctgcaggtattcaaacagctcttctacatgatcaacgcagtgactcttaacaacctgctcttgcggaaggacgtctgctcttggagcacaggcatgcaactcaggtacaatataagtcagcttgaggagtggcttcggggaagaaaccttcaccagagtggagcagttcagaccatggaacctctgatccaagcagcccagctcctgcaattaaagaagaaaacccaggaggacgcagaggctatctgctccctgtgtacctccctcagcacccagcagattgtcaaaattttaaacctttatactcccctgaatgaatttgaagaacgggtaacagtggcctttatacgaacaatccaggcacaactacaagagcggaatgaccctcagcaactgctattagatgccaagcacatgtttcctgttttgtttccatttaatccatcttctctaaccatggactcaatccacatcccagcgtgtctcaatctggaattcctcaatgaagtctgaagatgcatgtttccagcattagtttgattcccaatgtgagcaagaaggaagtatatacagtaaagtaaattcaaggatctgttaaatctggtaaaagtagatcaaatcagagattgacagcctgtggagggtgctgaactatacagaattagacacaactatgtcattattttttgtacctactgctcagaataaaaacacttgaaatatg

SEQ ID NO: 437704 - DNA, 5230 bp, Homo sapiens
  misc_feature (1798)..(1798): n is a, c, g, or t
  misc_feature (3197)..(3197): n is a, c, g, or t
  misc_feature (3411)..(3411): n is a, c, g, or t
caacagcctgtgaagagcagctctcctggcagcgtccctgactggcgcatttctgacggctgcccacgggccgcactggtcacctccaactccaagcaggattttacccccaccatcccaggccgggctgatgtctgttctcacactgcttcctctgcttccaggaccttaaagaactggtagaaaagctggaaaagaatgagaggaagctcaaaaagcaactgaagatttacatgaagaaagcccaggacctagaagctgcccaggcattggcccagagtgagaggaagcgccatgagctcaacaggcaggtcacggtccagcggaaagagaaggatttccagggcatgctggagtaccacaaagaggacgaggccctcctcatccggaacctggtgacagacttgaagccccagatgctgtcgggcacagtgccctgtctccccgcctacatcctctacatgtgcatccggcacgcggactacaccaacgacgatctcaaggtgcactccctgctgacctccaccatcaacggcattaagaaagtcctgaaaaagcacaatgatgactttgagatgacgtcattctggttatccaacacctgccgccttcttcactgtctgaagcagtacagcggggatgagggcttcatgactcagaacactgcaaagcagaatgaacactgtcttaagaattttgacctcaccgaataccgtcaggtgctgagtgacctttccattcagatctaccagcagctcattaaaattgccgagggcgtgttacagccgatgatagtttctgccatgttggaaaatgagagcattcagggtctatctggtgtgaagcccaccggctaccggaagcgctcctccagcatggcagatggggataactcatactgcctggaagctatcatccgccagatgaatgcctttcatacagtcatgtgtgaccagggcttggaccctgagatcatcctgcaggtattcaaacagctcttctacatgatcaacgcagtgactcttaacaacctgctcttgcggaaggacgtctgctcttggagcacaggcatgcaactcaggtacaatataagtcagcttgaggagtggcttcggggaagaaaccttcaccagagtggagcagttcagaccatggaacctctgatccaagcagcccagctcctgcaattaaagaagaaaacccaggaggacgcagaggctatctgctccctgtgtacctccctcagcacccagcagattgtcaaaattttaaacctttatactcccctgaatgaatttgaagaacgggtaacagtggcctttatacgaacaatccaggcacaactacaagagcggaatgaccctcagcaactgctattagatgccaagcacatgtttcctgttttgtttccatttaatccatcttctctaaccatggactcaatccacatcccagcgtgtctcaatctggaattcctcaatgaagtctgaagatgcatgtttccagcattagtttgattcccaatgtgagcaagaaggaagtatatacagtaaagtaaattcaaggatctgttaaatctggtaaaagtagatcaaatcagagattgacagcctgtggagggtgctgaactatacagaattagacacaactatgtcattattttttgtacctactgctcagaataaaaacacttgaaatatggaagattttaagtttgatttcagtccaacacatatacataatttatagacaccaagcagtccccatagacatataaaaggtgtcaattctataaaangaagctgcctagttttgatctttgcatagaactagagaatgtccaaattaaaataccaaatatatataagtcacataaattgccttcaaagggctttaacaaataatggtactaataaccatgataatggcatatactgacatttcccaaagtttgcaaaccataggtgtggttgagtttgtggtgagatgttttaagaacaaaaatatggggatgagacttctgagaaatattcccaaaatattttttaatggctgattatacacagacagtggtgtaactgacctccagaccagacattttgagtactggtttctgaagcaaaattagaagtgccagtcctcagtgtgctcaaacgcttttgtgttatcttgatttaatggaagagattattaaaatgctgctatcccaaactccaagtgagaaagatggaaaaatattttgtttctgatgctagtccatacactttccaagtcccacaaaactttcacaaaaatgtatataagctaaatattagaaacggataacaaacttgttttatttatagatgtaaaaaccaaacaagtcaatatgaaagcttttaatctcttaataccattaagcttccagtaagagcatcacataatgctctactgttccagaaaccaaatagtaaaacaaactaaagttcgcacatcagatcatctgaaaaaccttcaaaaataatcagttcagggatattatacaaaagtttgggttttttttttttaagagaataaaatggcttaggtcaactttcccttttcaggttattttcaacgtttttcaaatttagcacacaaaaaattgtaaatatctctcccacaaaataaggattttaaaaaagtaattcagtaatataacaggcttagatgtttgctgctcttagaattttttttaacttgtttttggtttcttcaaaagcaagcattcaattggaaacccatattctttccacacttttttttactgtcttttctgtatttcttgatagcagtatgctgttcccataagaaaaaaatggtatttgcaaatcatggaagaacagcctctgtattacattgagaaaataagatttatccatgaattggaagtagaacagcctgccttcaccctcttttactcaaccacccaacttaaaaggctcttggaaacacagcacactccacgctaccttctgcactgtgcccttagagcacagcttcctcagttgttctctgcatctcctggggcttaggccagtcttagcctgggttaaggctgctgacattgtgttccaatcagttgtcatgggcattatcccctctacatccacattaaacatgccggcttctcttgggcatcggcagagctgtgcctttttctttcagttacagttacntaatcactgacgtccatgacacttacccatggatccatgtgctgacttcatttagaaggccaatctaaaacaactgggtttgtggctacctctttaaagttgtttgtgaaggataatttgttttttaatgcactttagtttgaaagtgagtctcttatgtaaggaccatccttaaaagaccaaaaatgccttgttagagtgttaaggagttttnacatgcagtggttccacaaacacagtggcttactatccttatacactgtcttataccatcattctctccatctctcttggtcactactctctgctgtcactggttaatcactaggtgccaagagcttactgaataaaagcttggcaattagaataaatggggagggaaggaccttatgaatagtccatttagcctaagaaatggcagatttagttcttctcttccaaaagataaaggtatatcctggaattgtacttaaaacttacagatgactaacaaatatatactttatatgtagttaatatttagatctgtcttctttaatacttggaggctagaagaagcatctttaggggaactatataatcttttgttagcattttctctgcattttaaaaaatcatttcaattcaaacatttatcagtgtcatgaaatcagtaatgactctttaacaattcaggtttgaactctgcattagatgtctctttaattttttaatatttaaaatttagttgacatttttttcaccaggtgcctttagcggttactaagataactgacatcagttgtttctctgaaataagtgttgctgtgggaataattttaatgttcaaggtgatatcatgggggagttttgtcttttaaaacattagaagcattttaaatattaagaatcaaatatttatagatcaaaacttgtgttttaagtattatacgggacctgtttacttatagtaaatgtgaatgtacacatgagttgttgctgaagctgacaagcatattacatacatgcattttccctgtgccctcatagttgcagttagagttccagtacctgtaggctcacctgggaggcagattagacccaaaggtagatgtttttcccctttccatgaagcatgtcagtgggagttgcttcctttgatttccctagtactaaattttaaggcttttgtaaaaacaaaacaaaactaggagcttggaacagttaaaaatcaacactgctaccatcaattcatcaaatatttacttagagctttcatacattaagattccagtaaccaataaattagaattcatttcttctgcataaagtaaattttcatacacttgacctactaagacagcaagggtgtcctaaattgaggcatttgtataatgcctgcataactaaatggtcactaaaatgggacagcatggggcaagaccttgtagttcttcacagaatatttgtggtcagtttctccaattaatttgctgcatgagccaaataaccataattcactttttatacccactggtgccataattagagaattagagggtgtagacagaggttaatgccaatgagaaacacaggacagggttttttttattataaaggtcattagatacaaaagattgtttttcaaaaaatttctaattctaacaaaggggatcaatcagaaatgaaactaagctactttctaaagtgacactgtatcagaataatccagatttgaatataacattttgccaccaactgacatttagatgaaggactgcctctctgaaagagttcagatcatattcaggggtgaatccaacaccatggaagaaagactactgatgaaaatattttcccactttgcacaaatctgtaaactacacctttgtttatagaaaaatgcttgtaatagtcactgtaatatttagctgtggataaaaatttgtggaaataaatacttttgaataaagaggtgtgccaaatctaaatgaaatttaaaactctgcagctacaggttgacaaagtttctttgtaatgctctcttgagaagc

SEQ ID NO: 437705 - DNA, 4134 bp, Homo sapiens
gacttgtttcatgatgacaaggaccctgttcctgccaccacccctgggaaggggtcatcttcgaagatcagcgtccgttctgccagaccccccatgaaagtctccaacaaggagcacaagaaaaccgttggccaccagttccgtacctccctgcatctgctcatggagaccctgaatgccacgacacctcactatgtccgctgcatcaagcccaacgatgagaagctcccctttcactttgacccaaagagagcagtgcagcaactcagagcctgcggggtgttggagacgattcgaatcagtgcagctggctacccatccaggtgggcctaccatgactttttcaaccggtatcgggtgctggtcaagaagagagagctcgccaacacagacaaaaaggccatctgcaggtctgtcctggagaacctcatcaaggaccccgacaagttccagtttggccgcaccaagatcttctttcgagcaggccaggtggcctacctggagaagctgcgggctgacaagttccggacagccaccatcatgatccagaaaactgtccggggatggctgcagaaggtgaaatatcacaggctgaagggggctaccttaaccctgcagaggtactgccggggacacctggcccgcaggctggctgagcacctgcggaggatcagagcggctgtggtgctccagaaacattaccgcatgcagagggcccgccaggcctaccagagggtccgcagagctgccgttgttatccaggccttcacccgggccatgtttgtgcggagaacctaccgccaggtcctcatggagcacaaggccaccaccatccagaagcacgtgcggggctggatggcacgcaggcacttccagcggctgcgggatgcagccattgtcatccagtgtgccttccggatgctcaaggccaggcgggagctgaaggccctcaggattgaggcccgctcagcagagcatctgaaacgtctcaacgtgggcatggagaacaaggtggtccagctgcagcggaagatcgatgagcagaacaaagagttcaagacactttcagagcagttgtccgtgaccacctcaacatacaccatggaggtagagcggctgaagaaggagctggtgcactaccagcagagcccaggtgaggacaccagcctcaggctgcaggaggaggtggagagcctgcgcacagagctgcagagggcccactcggagcgcaagatcttggaggacgcccacagcagggagaaagatgagctgaggaagcgagttgcagacctggagcaagaaaatgctctcttgaaagatgagaaagaacagctcaacaaccaaatcctgtgccagtctaaagatgaatttgcccagaactctgtgaaggaaaatctcatgaagaaagaactggaggaggagcgatcccggtaccagaaccttgtgaaggaatattcacagttggagcagagatacgacaaccttcgggatgaaatgaccatcataaagcaaactccaggtcataggcggaacccatcaaaccaaagtagcttagaatctgactccaattacccctccatctccacatctgagatcggagacactgaggatgccctccagcaggtggaggaaattggcctggagaaggcagccatggacatgacggtcttcctgaagctgcagaagagagtacgggagctggagcaggagaggaaaaagctgcaagtgcagctggagaagagagaacagcaggacagcaagaaagtccaggcggaaccaccacagactgacatagatttggacccgaatgcagatctggcctacaatagtctgaagaggcaagagctggagtcagagaacaaaaagctgaagaatgacctgaatgagctgaggaaagccgtggccgaccaagccacgcagaataactccagccacggctccccagatagctacagcctcctgctgaaccagctcaagctggcccacgaggagctcgaggtgcgcaaggaggaggtgctcatcctcaggacccagatcgtgagcgccgaccagcggcgactcgccggcaggaacgcggagccgaacattaatgccagatcaagttggcctaacagtgaaaagcatgttgaccaggaggatgccattgaggcctatcacggggtctgccagacaaacaggctgctggaggctcagctgcaggcccagagcctggagcatgaggaggaggtggagcatctcaaggctcagctcgaggccctgaaggaggagatggacaaacagcagcagaccttctgccagacgctactgctctccccagaggcccaggtggaattcggcgttcagcaggaaatatcccggctgaccaacgagaatctggaccttaaagaactggtagaaaagctggaaaagaatgagaggaagctcaaaaagcaactgaagatttacatgaagaaagcccaggacctagaagctgcccaggcattggcccagagtgagaggaagcgccatgagctcaacaggcaggtcacggtccagcggaaagagaaggatttccagggcatgctggagtaccacaaagaggacgaggccctcctcatccggaacctggtgacagacttgaagccccagatgctgtcgggcacagtgccctgtctccccgcctacatcctctacatgtgcatccggcacgcggactacaccaacgacgatctcaaggtgcactccctgctgacctccaccatcaacggcattaagaaagtcctgaaaaagcacaatgatgactttgagatgacgtcattctggttatccaacacctgccgccttcttcactgtctgaagcagtacagcggggatgagggcttcatgactcagaacactgcaaagcagaatgaacactgtcttaagaattttgacctcaccgaataccgtcaggtgctgagtgacctttccattcagatctaccagcagctcattaaaattgccgagggcgtgttacagccgatgatagtttctgccatgttggaaaatgagagcattcagggtctatctggtgtgaagcccaccggctaccggaagcgctcctccagcatggcagatggggataactcatactgcctggaagctatcatccgccagatgaatgcctttcatacagtcatgtgtgaccagggcttggaccctgagatcatcctgcaggtattcaaacagctcttctacatgatcaacgcagtgactcttaacaacctgctcttgcggaaggacgtctgctcttggagcacaggcatgcaactcaggtacaatataagtcagcttgaggagtggcttcggggaagaaaccttcaccagagtggagcagttcagaccatggaacctctgatccaagcagcccagctcctgcaattaaagaagaaaacccaggaggacgcagaggctatctgctccctgtgtacctccctcagcacccagcagattgtcaaaattttaaacctttatactcccctgaatgaatttgaagaacgggtaacagtggcctttatacgaacaatccaggcacaactacaagagcggaatgaccctcagcaactgctattagatgccaagcacatgtttcctgttttgtttccatttaatccatcttctctaaccatggactcaatccacatcccagcgtgtctcaatctggaattcctcaatgaagtctgaagatgcatgtttccagcattagtttgattcccaatgtgtgtttgtagttgctgctaagcgaacgccctttggagcttacggaggccttctgaaagacttcacagctactgacttgtctgaatttgctgccaaggctgccttgtctgctggcaaagtctcacctgaaacagttgacagtgtgattatgggcaatgtcctgcagagtcttcagatgctatattttggcaaggcatgttggtttgcgtgtgggaatcccaaaggagaccccagctctcacgattaataggctctgtggttctggttttcagtccattgtgaatggatgtcaggtaactttgtgttaaagaagctgaacttgttttatgtggaggaaccgaaagcatgagccaagctccctactgtgtcagaaatgtgtcgtttgatccgcatacg

SEQ ID NO: 437706 - DNA, 2637 bp, Homo sapiens
tgtgtaatatttctattataaggacagatattgacccttgcatttcataatttttaaagatatttaagctaaaattttctcagccacatttttatataaaaccaaattttatgtaaaaactaggcttcaataagttagctaaattttttaaattgtaagacaaaatttttatggaaaagaattcctatatcccatcaaacctaataattttccacaactaaaaatgagtataaatacataattttaagtgcatcctgtcaggtctgatatttaattttactttagttagaagctaagtagttaccctgttacttcttcatggatgctaacagaagacttgagattcccagacagaaacaaaggactattactcatggcacaacaaggagcatgagcatcagcacattctcattgcttccccttgtcccaggtcccatgggggcaaaatgatatggccatatgcaatatggctacatatacagcaggcttttgttgtaggtaaagaatactgagcttggagggttcactgctttttatccatgaacagaagcaaacctgctctttgcctcatcccttatagatgctcactcaaaactcaatactgagaaatggcccaggtaaagaacagccaaggtctttcatgcttgccacacccagcaatatgtttaggaaggtgaagtctactgagggctatctcacatctaacagtttctttactaggaccagagaccattttggtaagatgcagataacaaccccaaccttaacaacttcacaacatgaatagaaatagtgataaataattcatagctttttacaaaagaataatgaggtataataggaaaatgttttgatgccaaaaataaaagagttaatgtttggatcggactccaacagggctccttagagtgatacaaatacaaagcaaacgatatgtgtaatttaaaatttcctagtgcacatgtttttttatttttctttttcgagatggagtctttctctgtcgcccaagctggagtgcagtggtacgatctcagctcactgcaacctctgcctcctgaatttaagcgattctcctgcctcagcctcccaagtagctgggattacaggcgtgagccactgcatctggccctgtacgcacatttttaaaaataaaactttaaaaaagaaacagttgaaactaattttaataacattttatttaaccaaatatatcaaaaatattatttcagcatgtaatcagtattttttaaattgagatatttgttttatcttcaaaattcagtgtatatttttacataatagcacatctcaattcacatgctaaattttcatcagaaatattttatctgtatttaaatttcctaaaatgtacagttgaaaaaaagagattcacatacccaggttgttctagcatgcctaaaaaatcttgtaactggatcaagtatcagtttttaaattagttaaaattaaataaaatttaaaatttagttcctcagtcacactagccatatttcaagtacttgaaggccacaaatggcttgagactaccttgctgaacagaccaaggtcaaacactgagataataatgattcttaaggccatttgaaagttaacagcaagtatgtattactgctatctacagtaagaattacattttatctacaggcaatcataagccatgtctgttatgcagcataggctttccattctctatacatctaggtcatagagtttttccattgataaatctggatgtttatataccaacagtactttcttacaacatattccagtatatagtgtccagcttcacccactttttaaagtggccctgaaacaattttattcatcttattggagtgttgctgtaggggaagagtagaagctaagaagagtttgagttcaacaccattatatccaaatcctgaccttactactggaatgtaagctccttgaaagtggagatcttgtctgtcttgttcacagttgtgttcccagccccagaggtagtctcagggccaataccaagtatgctctcaaatatttgctgggaaaatttactagctggataaaaggcaagttactttaatctctttaatcttcctttgtccttacaaatgaaagagactaatagtacttaaccttgcagtgttattataaggattaaagttgataaatatatgatcatgagaacaattgctagcacataacggtcactctgaaaatagtagctgatatatcagctgcattgtttgattattgttggctcaattaaaagttggcttttccaaatcctccattaggaagaatttttaaatagccatattgaaaataaagttgtcagaaaaccaatgtaacatatgttgaatttttattaccaaaaagaagttactatccagttgtacagaaaagtagaatgaggttgtgcatcaagaaaaaaattgttcgttctcaacaaaaatttaatcacatgggtagtttttttttttttagctatgggttcatgctgtatttggttgcatcatatttgataaagaagcttccaacttagcatgaaatacctaaagacaattttttttttaagttagtaggcactttttagaatttccaggaacttttaaagatgttgtctcc

SEQ ID NO: 437707 - DNA, 364 bp, Homo sapiens
gaaataaaattaggaatcaatagaacaatgacaaaagagatctccacacgcacaccttagagagtaaaatcatacctctaaagcattatccagcaaatgttatatgggatgcagcaaagaagtacctagaggagatcttgaagctttaaacgcttctacagaagggagaaaagttaaaaatgaactaagcattcaactgaataaattcttttttaatttttttaattatactttaagttctaaggtacatgtgcacaacatgcaggtttgttacatatgtatacatgtgccatgttggtgtgctgcacccattaactcgtcatttacattaggtatatcttctaatgctatccctcccccctcc

SEQ ID NO: 437708 - DNA, 1342 bp, Homo sapiens
ctgggaggcggcgcttgcagtgagctgagatcgctccactgcactccagtctggatgacagagcgagactccgtctcaaaaagataagaaataaaaaaattttaaagtgtaagcatctcagatgccttgcaggaatgtgggataaagtgctcagaatgttccctggcagatagtataggcttgttttccgtgaagagcctgtaactgccacttggttccccttccacccctgacattaggaaatagttgtgcaatggttgttactctcagggtggtcacttaggcaaactccagaggagggtgtacttccactgattatccttctagcccctttcccccaaatccccaaggaaggctgggaatcatcaaaatggagttggcctttacttgtcaacaattgagtaaatcctaaatacggacgaacacccaagtagctcctgaattacaattaaaggaaaaacatttcttaaaatggaaggtgtatgtactttgtagcggatattctgtaatctcagtcacagggccatgtcttactctatattgctagtgtctggcccttgagaccagcttgttgctcagattggacacagacagcaacactgccactgactacctgggtgagaaggtgggcaagttagccagcctctctgggcctcagatcttgtgtaaaataggtataacacctaccttacagggttattttcagaaattaaagatagtatatgtaaatcactcagcatatatagtaggagctgtttaaagtattgtaaatattatgtaataattgagtatattcttggtattctgtggtaagcttaaatttaagaggctttattctgtgatttgagcatcattctttgctggtgaagaaaagaagacaaggaattcatttaatatttgagtgcttacctacctgaagcatagcattgaaccagatggatatatagtccctgctgctaggtgagcaaaaataagtattaatacttgtgcctcttctgcctgtttttcaggtagaaaaaaacccagtgcccctctttgacattatttaaataagatttctcctcaatataacagtatagtgacattaactatgttttttcaaatcatttcttaccaccaccaaaaaaaaaaaaaaaaaaattttgtaccacctgtgggcattccaaccccctccttcccaagtataggaaaacactggatgagttgggtcctggtacctgtagtcccagctactcaagaggctgaggggtgaggatcacttgagcccaggaatttgaggctgcagtgagtcgtgatcacatcactacactccacaccgggtgacagagtaagaccctctcta

SEQ ID NO: 437709 - DNA, 536 bp, Homo sapiens
tcgacatgctatgcttcaggtaggtaagcattgaaccagatggatatatagtccctgctcacctagcagcagggactatatatccatctggttcaatgctatgcttcaggtaggtaagcattgaaccagatggatatatagtccctgctgctaggtgagcaaaaataagtattaatacttgtgcctcttctgcctgtttttcaggtagaaaaaaacccagtgcccctctttgacattatttaaataagatttctcctcaatataacagtatagtgacattaactatgttttttcaaatcatttcttaccaccaccaaaaaaaaaaaaaaaaaaattttgtaccacctgtgggcattccaaccccctccttcccaagtataggaaaacactggatgagttgggtcctggtacctgtagtcccagctactcaagaggctgaggggtgaggatcacttgagcccaggaatttgaggctgcagtgagtcgtgatcacatcactacactccacaccgggtgacagagtaagaccctctcta

SEQ ID NO: 437710 - DNA, 1763 bp, Homo sapiens
tgggaaaaagatgaaacctggaaatctgggaaacttaaaattttcaacaccatttataaatataaaaagcctctggttacttgagtgttgcacatttagatatttgattttgtatgttgattacaaatggagttgtggccttgcaaaccatcacaatcatcattataatcattgaatttatggttcatatggcagtttcttatacattattcaatttactttaatcctcttaactctgtcaagtaggtattaccattaatcctcattttacagctgaggaaacaaggtagaaaaggtgacttactcaagatcccagagctagtaacctcgaggttttgttttgctctttggttttgttttcaatttaggtaatgagctaccaacattagaatgatgcatagaaaggtgctgggccatggtctttgcatcttccaataaagcataataagatatattaatttccaggaaaagagttgagggagaaaaaagggggaatatgatttattgatacaacttttagggaaatttgatcagcgtagtattccaagctttattttgatcattttcaaaccaaagtttaatctgttaaaatagacatgcttcttttactctgtgtaaacatgaagctccacatattacaagagggcttggaaggatgggcctactaattggtacagagcaacaaagtctattttttatttaaagatataggtgttttaggaaggagaggggatgttaaagatagtatttggctgtatgaaaatatagaagtatgagactggcagctctgtagagggctttgggtgagagaatacaaaggagagaaaatgagaaagacattgttgtatgaatataagataaaccaccccagttaagtgcaggctctggatgaagtatttctattacaaatgacagagctgggacagaagcaatgtagactgttgatgcagtatctcgaggggagtttgcacactggatatgtaaattattattgtttaaagatattcttccatcttggggaagttgcttaacctatattatttgcatttttcttatttgcaaaatgggactaaaacagtacagttcttaccatatgtaatctttgagagtattaacaaaaaaaagtatgtgaagtgcctactacagtgcttgtcataaagaaggctgcagtggatatggcaacactttcctccatcaacccccacccccaaattcctttcagttatgaaaattctgaaacactgtaactttacctatatatttattggatatctacttttcgaaaagtagaacatgtgaagaattcttgatttttccttggagatacctttgcaagttagaggaagatattagtgcctgtcttccttggtttaattttaattcaaaagaaagatatgattgagaaggtaggagaaatgactgactagttcatctaggcattaatagtcctaaaagagggaactgtaaggcaaccagacacatggcctcaattttttaagaaggcagatttaaaaataaatacatgcataaataaaattttaaaacaaaaccagaaaaaatggtagacgaattctcatgatcaaatttactaaaaagaatatggctttaaaagatgagtctaggccaggcatagtggctcacgcctgtaatcccagcactttgggaggctgagttggggaatcatttgaggtcaggagttcgagaccagcctggccaacatggtgaaaccccatctctactaaaaatacaaacattagctgggc

SEQ ID NO: 437711 - DNA, 1917 bp, Homo sapiens
gggaggtggttggggcaagcccaagccgcagagggggccgccaccgcctcctgcctcctcttcgtctcctccccctcccccgtctgacgctgcctcctcgggaagggtgtttggagggcagcggccgccccaagccggagacccgcagcgcttcttatgatcagctcggtgtgtgtctcctcctaccgcgggcgcaagtcggggaacaagcctccgtccaaaacatgtctgaaggaggagatggccaagggcgaggcgtcggagaagatcatcatcaacgtgggcggcacgcgacatgagacctaccgcagcaccctgcgcaccctaccgggaacccgcctcgcctggctggccgaccccgacggcgggggccggcccgagaccgatggcggcggtgtgggtagcagcggcagcagcggcggcgggggctgcgagttcttcttcgacaggcacccgggcgtcttcgcctacgtgctcaactactaccgcaccggcaagctgcactgccccgcggacgtgtgcgggccgctcttcgaagaggagctcaccttctggggcatcgacgagaccgacgtggaaccctgctgctggatgacctaccggcagcaccgcgacgccgaggaggcgctcgacatcttcgagagcccggacggaggcggcagcggcgcggggcccagcgacgaggccggcgacgatgagcgggagctggccctgcagcgactgggcccccacgagggaggcgcgggccatggcgccgggtctgggggctgccgcggctggcagccccgcatgtgggcgctcttcgaggatccctactcctcccgggccgctagggtagtggcctttgcctctctcttcttcatcctggtctccatcaccactttctgcctggagacccatgaggcctttaatatcgaccgcaacgtgacagagatcctccgcgtagggaacatcaccagcgtgcacttccggcgggaggtagagacagagcccatcctgacctacatcgagggcgtatgtgtgctgtggttcacactggagttcctggtgcgcatcgtgtgctgccccgacacgctggacttcgtcaagaacctgctcaacatcatcgactttgtggccatcctgcccttctacctggaggtgggactgagcggcctgtcatccaaggcggcccgcgacgtgctgggcttcctgcgcgtggtgcgcttcgtgcgcatcctgcgtatcttcaagctcacacgccacttcgtggggctacgcgtgctgggccacaccctgagggccagcaccaatgagttcctgctgcttatcatcttcctggccctgggtgtgctcatctttgccaccatgatctactacgctgagcgcattggggccaggccctccgaccctcggggtaatgaccacaccgacttcaagaacatccccattggcttctggtgggctgtggtcaccatgacgacactgggctacggagacatgtaccccaagacgtggtcaggcatgctggtaggggcactgtgtgcactggctggcgtgctcaccatcgccatgccggtgcctgtcatcgtcaacaacttcggcatgtactactccctggccatggccaagcagaagctgcccaagaaacggaagaagcacgtgccacggccggcgcagctggagtcacccatgtactgcaagtctgaggagacttccccccgggacagcacctgcagtgataccagcccccctgcccgggaagagggtatgatcgagaggaaacgggcaggtgagattaggggttgggaaggaaaatcccttttcccccagtggcctagggagtttccaaatggacctcagaccttgggatttggcatgtgttttgtgtggggcttccctaagcataaagatgtgcctttatgagggcaaagtgtt

SEQ ID NO: 437712 - DNA, 1415 bp, Homo sapiens
  misc_feature (1340)..(1340): n is a, c, g, or t
  misc_feature (1347)..(1347): n is a, c, g, or t
  misc_feature (1350)..(1350): n is a, c, g, or t
  misc_feature (1353)..(1353): n is a, c, g, or t
  misc_feature (1360)..(1360): n is a, c, g, or t
aaacagcatcaccccaagatgaggacaccccttccctagaaaggtgatggaggcaccccgaagcccaggatggaagctgtgaggtctggatgccacatctgcactccaccttgacaggaggcctagccctagacctcagacccgagagctgcaggggttgtcccagcgggtctggaactcccacctccactgttgacccagatctgcagctgggacagcagtactcctacctgccctacctgtgctcccactggtaaggtaggggaaggaaaggcccaggtggtagacatcccaggctgagggtgggatcccaaaagggctctctgaggggttgggtttctcaataaggtactatttcctgaccttctctcctgagacaggcacattcgtcctccgtgaccttccccttcagcattcacctgaggctgcatgccctccaactgctgggactctgttcctgccacattgaggaagggggctgggcacgacatggcatcatactcaggagccttcttcaccagctccttgggacaatggaatatcccagggtggtgacagcagatggagctacttgggggagagctcaagttggtcaggcaacagctggggtgatggcctgtgagccacaggccacatcaggaactttccccactgcctccatgcaaggctgcagagctatggtccctttctccactgcactggagctttgaagacctaagaggctagtggttcctggagctagtggttacctgaacaggtatggcgatgagctacaacatcacctgagtcaccagagttgggttggcagaggggtgaagggttcaccccattccctgacccatccatgctcttcctggccttttagccctgggttcctcatgccttccagctctgctcctggtctactccttagcccacaccctgtgggttcagcagctggcttccttctaacgtctcattctttgtttctccctttcttttgctgaactccctgtccccccaaccccagaaggcaatgttgagccgaaagcgtgcgtcccagtgtctcacacctgtgctctttaaacacagagacctgccaagacgccctctcgtccaactatgcccaggctgaagtcctcaccctctcttaaagcggcaccaacgtgagagagacaggcagacagacagaaagccagaggcttagggaaactctggaacccagacaagaatcttttcgctgggaaagactcagatatccttgtttgcacaggactggtggaaaatctcccatgcgaccctcggggcccagagccatctgggtctgatgttctgttccattgtacatcgaagagattttntgccctntgnacnaatttcntacgttttttcccccgtgtgatgcctgcatgggggggtcctgtaggggggtccca

SEQ ID NO: 437713 - DNA, 3108 bp, Homo sapiens
gggaggtggttggggcaagcccaagccgcagagggggccgccaccgcctcctgcctcctcttcgtctcctccccctcccccgtctgacgctgcctcctcgggaagggtgtttggagggcagcggccgccccaagccggagacccgcagcgcttcttatgatcagctcggtgtgtgtctcctcctaccgcgggcgcaagtcggggaacaagcctccgtccaaaacatgtctgaaggaggagatggccaagggcgaggcgtcggagaagatcatcatcaacgtgggcggcacgcgacatgagacctaccgcagcaccctgcgcaccctaccgggaacccgcctcgcctggctggccgaccccgacggcgggggccggcccgagaccgatggcggcggtgtgggtagcagcggcagcagcggcggcgggggctgcgagttcttcttcgacaggcacccgggcgtcttcgcctacgtgctcaactactaccgcaccggcaagctgcactgccccgcggacgtgtgcgggccgctcttcgaagaggagctcaccttctggggcatcgacgagaccgacgtggaaccctgctgctggatgacctaccggcagcaccgcgacgccgaggaggcgctcgacatcttcgagagcccggacggaggcggcagcggcgcggggcccagcgacgaggccggcgacgatgagcgggagctggccctgcagcgactgggcccccacgagggaggcgcgggccatggcgccgggtctgggggctgccgcggctggcagccccgcatgtgggcgctcttcgaggatccctactcctcccgggccgctagggtagtggcctttgcctctctcttcttcatcctggtctccatcaccactttctgcctggagacccatgaggcctttaatatcgaccgcaacgtgacagagatcctccgcgtagggaacatcaccagcgtgcacttccggcgggaggtagagacagagcccatcctgacctacatcgagggcgtatgtgtgctgtggttcacactggagttcctggtgcgcatcgtgtgctgccccgacacgctggacttcgtcaagaacctgctcaacatcatcgactttgtggccatcctgcccttctacctggaggtgggactgagcggcctgtcatccaaggcggcccgcgacgtgctgggcttcctgcgcgtggtgcgcttcgtgcgcatcctgcgtatcttcaagctcacacgccacttcgtggggctacgcgtgctgggccacaccctgagggccagcaccaatgagttcctgctgcttatcatcttcctggccctgggtgtgctcatctttgccaccatgatctactacgctgagcgcattggggccaggccctccgaccctcggggtaatgaccacaccgacttcaagaacatccccattggcttctggtgggctgtggtcaccatgacgacactgggctacggagacatgtaccccaagacgtggtcaggcatgctggtaggggcactgtgtgcactggctggcgtgctcaccatcgccatgccggtgcctgtcatcgtcaacaacttcggcatgtactactccctggccatggccaagcagaagctgcccaagaaacggaagaagcacgtgccacggccggcgcagctggagtcacccatgtactgcaagtctgaggagacttccccccgggacagcacctgcagtgataccagcccccctgcccgggaagagggtatgatcgagaggaaacgggcagactctaagcagaatggcgatgccaacgcagtgctgtctgatgaggagggagctggcctcacccaacccctggcctcctccccgacccccgaggagcgccgggccctgcgacgctccaccactcgagacagaaacaagaaggcagctgctgcttcctgctcagcactggggactatgcctgcgccgatggtagtgtccggaaagagacctgccaagacgccctctcgtccaactatgcccaggctgaagtcctcaccctctcttaaagcggcaccaacgtgagagagacaggcagacagacagaaagccagaggcttagggaaactctggaacccagacaagaatcttttcgctgggaaagactcagatatccttgtttgcacaggactggtggaaaatctcccatgcgaccctcggggcccagagccatctgggtctgatgttctgttccattgtacatcgaagagatatatatgcacatatagtatctatattcatacatattatactcttgtgtgtagtgcacgtgctattggtggtttgtcttctttgttaggctgtgtctccctaagcccttgccccacccagagtttcccgtccccttcactgatttctgttgtttctgctgactgtgtgggtggaatgtcccaagaaaagtgcatctgggaattgccagtccagctgggtagtcccaggctcctgtcttggggatgtttcccctgtcagcaagtaacctggtgaagtctattgaaggccagactgccccctagggtcactgcttcactagccgcaccccaccccagattggggttctacctcccaccccacatcctcgttgtggggggacttccaggggctcctctgcagcctcctccactacttcctccaccccatctatgtccttgacttaggggggcattttgtcttttttagatttgattttgttctctctcctttgtctgtttgttgtcaaagatgctgctgggcagacaggcagggaaaggatctgtctgcccatctggcccagggggtccgagaagggaagccttgggcaagaggagaccagttgcaatactgtacttcctggtcagtggccagaggatgcgtgcaatagcagaggccaggtgaccccttcagccttggcctctgcccctcccttggccctccctccctgctcctccctggtgttggtcagtccttttctaaagctgtcccctcgtgtgtgtctggggcatgcccaggctgggccctgtgccctgtctgcatgcctccaactgtcatgctgtgctcgagccccaataaagacatctggagcatcctgctgctcctgctgtgtga

SEQ ID NO: 437714 - DNA, 2205 bp, Homo sapiens
aaacagcatcaccccaagatgaggacaccccttccctagaaaggtgatggaggcaccccgaagcccaggatggaagctgtgaggtctggatgccacatctgcactccaccttgacaggaggcctagccctagacctcagacccgagagctgcaggggttgtcccagcgggtctggaactcccacctccactgttgacccagatctgcagctgggacagcagtactcctacctgccctacctgtgctcccactggtaaggtaggggaaggaaaggcccaggtggtagacatcccaggctgagggtgggatcccaaaagggctctctgaggggttgggtttctcaataaggtactatttcctgaccttctctcctgagacaggcacattcgtcctccgtgaccttccccttcagcattcacctgaggctgcatgccctccaactgctgggactctgttcctgccacattgaggaagggggctgggcacgacatggcatcatactcaggagccttcttcaccagctccttgggacaatggaatatcccagggtggtgacagcagatggagctacttgggggagagctcaagttggtcaggcaacagctggggtgatggcctgtgagccacaggccacatcaggaactttccccactgcctccatgcaaggctgcagagctatggtccctttctccactgcactggagctttgaagacctaagaggctagtggttcctggagctagtggttacctgaacaggtatggcgatgagctacaacatcacctgagtcaccagagttgggttggcagaggggtgaagggttcaccccattccctgacccatccatgctcttcctggccttttagccctgggttcctcatgccttccagctctgctcctggtctactccttagcccacaccctgtgggttcagcagctggcttccttctaacgtctcattctttgtttctccctttcttttgctgaactccctgtccccccaaccccagaaggcaatgttgagccgaaagcgtgcgtcccagtgtctcacacctgtgctctttaaacacagagacctgccaagacgccctctcgtccaactatgcccaggctgaagtcctcaccctctcttaaagcggcaccaacgtgagagagacaggcagacagacagaaagccagaggcttagggaaactctggaacccagacaagaatcttttcgctgggaaagactcagatatccttgtttgcacaggactggtggaaaatctcccatgcgaccctcggggcccagagccatctgggtctgatgttctgttccattgtacatcgaagagatatatatgcacatatagtatctatattcatacatattatactcttgtgtgtagtgcacgtgctattggtggtttgtcttctttgttaggctgtgtctccctaagcccttgccccacccagagtttcccgtccccttcactgatttctgttgtttctgctgactgtgtgggtggaatgtcccaagaaaagtgcatctgggaattgccagtccagctgggtagtcccaggctcctgtcttggggatgtttcccctgtcagcaagtaacctggtgaagtctattgaaggccagactgccccctagggtcactgcttcactagccgcaccccaccccagattggggttctacctcccaccccacatcctcgttgtggggggacttccaggggctcctctgcagcctcctccactacttcctccaccccatctatgtccttgacttaggggggcattttgtcttttttagatttgattttgttctctctcctttgtctgtttgttgtcaaagatgctgctgggcagacaggcagggaaaggatctgtctgcccatctggcccagggggtccgagaagggaagccttgggcaagaggagaccagttgcaatactgtacttcctggtcagtggccagaggatgcgtgcaatagcagaggccaggtgaccccttcagccttggcctctgcccctcccttggccctccctccctgctcctccctggtgttggtcagtccttttctaaagctgtcccctcgtgtgtgtctggggcatgcccaggctgggccctgtgccctgtctgcatgcctccaactgtcatgctgtgctcgagccccaataaagacatctggagcatcctgctgctcctgctgtgtga

SEQ ID NO: 437715 - DNA, 3247 bp, Homo sapiens
gggaggtggttggggcaagcccaagccgcagagggggccgccaccgcctcctgcctcctcttcgtctcctccccctcccccgtctgacgctgcctcctcgggaagggtgtttggagggcagcggccgccccaagccggagacccgcagcgcttcttatgatcagctcggtgtgtgtctcctcctaccgcgggcgcaagtcggggaacaagcctccgtccaaaacatgtctgaaggaggagatggccaagggcgaggcgtcggagaagatcatcatcaacgtgggcggcacgcgacatgagacctaccgcagcaccctgcgcaccctaccgggaacccgcctcgcctggctggccgaccccgacggcgggggccggcccgagaccgatggcggcggtgtgggtagcagcggcagcagcggcggcgggggctgcgagttcttcttcgacaggcacccgggcgtcttcgcctacgtgctcaactactaccgcaccggcaagctgcactgccccgcggacgtgtgcgggccgctcttcgaagaggagctcaccttctggggcatcgacgagaccgacgtggaaccctgctgctggatgacctaccggcagcaccgcgacgccgaggaggcgctcgacatcttcgagagcccggacggaggcggcagcggcgcggggcccagcgacgaggccggcgacgatgagcgggagctggccctgcagcgactgggcccccacgagggaggcgcgggccatggcgccgggtctgggggctgccgcggctggcagccccgcatgtgggcgctcttcgaggatccctactcctcccgggccgctagggtagtggcctttgcctctctcttcttcatcctggtctccatcaccactttctgcctggagacccatgaggcctttaatatcgaccgcaacgtgacagagatcctccgcgtagggaacatcaccagcgtgcacttccggcgggaggtagagacagagcccatcctgacctacatcgagggcgtatgtgtgctgtggttcacactggagttcctggtgcgcatcgtgtgctgccccgacacgctggacttcgtcaagaacctgctcaacatcatcgactttgtggccatcctgcccttctacctggaggtgggactgagcggcctgtcatccaaggcggcccgcgacgtgctgggcttcctgcgcgtggtgcgcttcgtgcgcatcctgcgtatcttcaagctcacacgccacttcgtggggctacgcgtgctgggccacaccctgagggccagcaccaatgagttcctgctgcttatcatcttcctggccctgggtgtgctcatctttgccaccatgatctactacgctgagcgcattggggccaggccctccgaccctcggggtaatgaccacaccgacttcaagaacatccccattggcttctggtgggctgtggtcaccatgacgacactgggctacggagacatgtaccccaagacgtggtcaggcatgctggtaggggcactgtgtgcactggctggcgtgctcaccatcgccatgccggtgcctgtcatcgtcaacaacttcggcatgtactactccctggccatggccaagcagaagctgcccaagaaacggaagaagcacgtgccacggccggcgcagctggagtcacccatgtactgcaagtctgaggagacttccccccgggacagcacctgcagtgataccagcccccctgcccgggaagagggtatgatcgagaggaaacgggcagactctaagcagaatggcgatgccaacgcagtgctgtctgatgaggagggagctggcctcacccaacccctggcctcctccccgacccccgaggagcgccgggccctgcgacgctccaccactcgagacagaaacaagaaggcagctgctgcttcctgctcagcactggggactatgcctgcgccgatggtagtgtccggaaagagacctgccaagacgccctctcgtccaactatgcccaggctgaagtcctcaccctctcttaaagcggcaccaacgtgagagagacaggcagacagacagaaagccagaggcttagggaaactctggaacccagacaagaatcttttcgctgggaaagactcagatatccttgtttgcacaggactggtggaaaatctcccatgcgaccctcggggcccagagccatctgggtctgatgttctgttccattgtacatcgaagagatatatatgcacatatagtatctatattcatacatattatactcttgtgtgtagtgcaaaaaaaaaaaaaaaaaaaaaaaaaaaggggggggggaaaaaagtatatcccccgcggggggcccaagagatacggggaaaccagagatattctgtggtgccaagggggccccataaggggagaccgaatatacaaaagatcaggacacgggcacagggataaaaaacgggtcggagaccgggagaaaacgtggcacaccggggcacacacggcgacacgcgacccccaaacctcccgggcgggggacaccataaactgggaccaactataaccataaaaaacataaccggcaccaaccgggcaaacattctaaacatttacaaagatgataacacagtggtgttcaaccaaataggaggaaataaataaagaaaacgccgtgaaagcagattggggcgaacaagtgaaattcgcacatgtcgcaacacccttttcataccccagggcactgagggaggcaacaaaaaagaaaggcacagacccaaaaagaagagaaagaagacagagaacggaagaaggaagacaacaaccagagaagcacgcggagagcacagaccacgaaggaagacgaaaagcaggaagaagacgatgagacaacgagcacccagaagacagcggaaacaacaagcaaacgacaagaagcaaagacaaaaacgaaccgacgaggccagagccaagaaaggagaagcgacacgacaagcagccggcaaggccgaagacacggaacaaacggcgcgagaaacaaagagacgagaagagacacaaaagagaaacaacggaaaaaggagcgacaagacaagggaacaaacgagaagaggacggcgagcgcagcaaacagagaagacggcaaagacgaagcaggccggagaaagggcggaacaaggagagaaaaacgaagagaaacaaagacgaggaggaggaagaccaagagaagaaacaacgccgcaaaacg

SEQ ID NO: 437716 - DNA, 2272 bp, Homo sapiens
gggaggtggttggggcaagcccaagccgcagagggggccgccaccgcctcctgcctcctcttcgtctcctccccctcccccgtctgacgctgcctcctcgggaagggtgtttggagggcagcggccgccccaagccggagacccgcagcgcttcttatgatcagctcggtgtgtgtctcctcctaccgcgggcgcaagtcggggaacaagcctccgtccaaaacatgtctgaaggaggagatggccaagggcgaggcgtcggagaagatcatcatcaacgtgggcggcacgcgacatgagacctaccgcagcaccctgcgcaccctaccgggaacccgcctcgcctggctggccgaccccgacggcgggggccggcccgagaccgatggcggcggtgtgggtagcagcggcagcagcggcggcgggggctgcgagttcttcttcgacaggcacccgggcgtcttcgcctacgtgctcaactactaccgcaccggcaagctgcactgccccgcggacgtgtgcgggccgctcttcgaagaggagctcaccttctggggcatcgacgagaccgacgtggaaccctgctgctggatgacctaccggcagcaccgcgacgccgaggaggcgctcgacatcttcgagagcccggacggaggcggcagcggcgcggggcccagcgacgaggccggcgacgatgagcgggagctggccctgcagcgactgggcccccacgagggaggcgcgggccatggcgccgggtctgggggctgccgcggctggcagccccgcatgtgggcgctcttcgaggatccctactcctcccgggccgctagggtagtggcctttgcctctctcttcttcatcctggtctccatcaccactttctgcctggagacccatgaggcctttaatatcgaccgcaacgtgacagagatcctccgcgtagggaacatcaccagcgtgcacttccggcgggaggtagagacagagcccatcctgacctacatcgagggcgtatgtgtgctgtggttcacactggagttcctggtgcgcatcgtgtgctgccccgacacgctggacttcgtcaagaacctgctcaacatcatcgactttgtggccatcctgcccttctacctggaggtgggactgagcggcctgtcatccaaggcggcccgcgacgtgctgggcttcctgcgcgtggtgcgcttcgtgcgcatcctgcgtatcttcaagctcacacgccacttcgtggggctacgcgtgctgggccacaccctgagggccagcaccaatgagttcctgctgcttatcatcttcctggccctgggtgtgctcatctttgccaccatgatctactacgctgagcgcattggggccaggccctccgaccctcggggtaatgaccacaccgacttcaagaacatccccattggcttctggtgggctgtggtcaccatgacgacactgggctacggagacatgtaccccaagacgtggtcaggcatgctggtaggggcactgtgtgcactggctggcgtgctcaccatcgccatgccggtgcctgtcatcgtcaacaacttcggcatgtactactccctggccatggccaagcagaagctgcccaagaaacggaagaagcacgtgccacggccggcgcagctggagtcacccatgtactgcaagtctgaggagacttccccccgggacagcacctgcagtgataccagcccccctgcccgggaagagggtatgatcgagaggaaacgggcagactctaagcagaatggcgatgccaacgcagtgctgtctgatgaggagggagctggcctcacccaacccctggcctcctccccgacccccgaggagcgccgggccctgcgacgctccaccactcgagacagaaacaagaaggcagctgctgcttcctgctcagcactggggactatgcctgcgccgatggtagtgtccggaaagggtatggcttcccaagctggacaggtggggagcccccacagagctgagtctcccgagtcccccaccaagagcctgaggtccccccctcccctgagaccgtggccgccatctcctctgccttggatgcacccccacttttagaatgggtacctgatctcccagtccctggattagaaaggtcttctccatctcagaagggcacacggctcccatccagctgcccatgggaaagagcagcgctagagggtaaagggtgcacaaggccagggtccctgccccgtgcttccattgcatctct

SEQ ID NO: 437717 - DNA, 2030 bp, Homo sapiens
aaacagcatcaccccaagatgaggacaccccttccctagaaaggtgatggaggcaccccgaagcccaggatggaagctgtgaggtctggatgccacatctgcactccaccttgacaggaggcctagccctagacctcagacccgagagctgcaggggttgtcccagcgggtctggaactcccacctccactgttgacccagatctgcagctgggacagcagtactcctacctgccctacctgtgctcccactggtaaggtaggggaaggaaaggcccaggtggtagacatcccaggctgagggtgggatcccaaaagggctctctgaggggttgggtttctcaataaggtactatttcctgaccttctctcctgagacaggcacattcgtcctccgtgaccttccccttcagcattcacctgaggctgcatgccctccaactgctgggactctgttcctgccacattgaggaagggggctgggcacgacatggcatcatactcaggagccttcttcaccagctccttgggacaatggaatatcccagggtggtgacagcagatggagctacttgggggagagctcaagttggtcaggcaacagctggggtgatggcctgtgagccacaggccacatcaggaactttccccactgcctccatgcaaggctgcagagctatggtccctttctccactgcactggagctttgaagacctaagaggctagtggttcctggagctagtggttacctgaacagagacctgccaagacgccctctcgtccaactatgcccaggctgaagtcctcaccctctcttaaagcggcaccaacgtgagagagacaggcagacagacagaaagccagaggcttagggaaactctggaacccagacaagaatcttttcgctgggaaagactcagatatccttgtttgcacaggactggtggaaaatctcccatgcgaccctcggggcccagagccatctgggtctgatgttctgttccattgtacatcgaagagatatatatgcacatatagtatctatattcatacatattatactcttgtgtgtagtgcaaaaaaaaaaaaaaaaaaaaaaaaaaaggggggggggaaaaaagtatatcccccgcggggggcccaagagatacggggaaaccagagatattctgtggtgccaagggggccccataaggggagaccgaatatacaaaagatcaggacacgggcacagggataaaaaacgggtcggagaccgggagaaaacgtggcacaccggggcacacacggcgacacgcgacccccaaacctcccgggcgggggacaccataaactgggaccaactataaccataaaaaacataaccggcaccaaccgggcaaacattctaaacatttacaaagatgataacacagtggtgttcaaccaaataggaggaaataaataaagaaaacgccgtgaaagcagattggggcgaacaagtgaaattcgcacatgtcgcaacacccttttcataccccagggcactgagggaggcaacaaaaaagaaaggcacagacccaaaaagaagagaaagaagacagagaacggaagaaggaagacaacaaccagagaagcacgcggagagcacagaccacgaaggaagacgaaaagcaggaagaagacgatgagacaacgagcacccagaagacagcggaaacaacaagcaaacgacaagaagcaaagacaaaaacgaaccgacgaggccagagccaagaaaggagaagcgacacgacaagcagccggcaaggccgaagacacggaacaaacggcgcgagaaacaaagagacgagaagagacacaaaagagaaacaacggaaaaaggagcgacaagacaagggaacaaacgagaagaggacggcgagcgcagcaaacagagaagacggcaaagacgaagcaggccggagaaagggcggaacaaggagagaaaaacgaagagaaacaaagacgaggaggaggaagaccaagagaagaaacaacgccgcaaaacg

SEQ ID NO: 437718 - DNA, 2277 bp, Homo sapiens
gggaggtggttggggcaagcccaagccgcagagggggccgccaccgcctcctgcctcctcttcgtctcctccccctcccccgtctgacgctgcctcctcgggaagggtgtttggagggcagcggccgccccaagccggagacccgcagcgcttcttatgatcagctcggtgtgtgtctcctcctaccgcgggcgcaagtcggggaacaagcctccgtccaaaacatgtctgaaggaggagatggccaagggcgaggcgtcggagaagatcatcatcaactttgtggccatcctgcccttctacctggaggtgggactgagcggcctgtcatccaaggcggcccgcgacgtgctgggcttcctgcgcgtggtgcgcttcgtgcgcatcctgcgtatcttcaagctcacacgccacttcgtggggctacgcgtgctgggccacaccctgagggccagcaccaatgagttcctgctgcttatcatcttcctggccctgggtgtgctcatctttgccaccatgatctactacgctgagcgcattggggccaggccctccgaccctcggggtaatgaccacaccgacttcaagaacatccccattggcttctggtgggctgtggtcaccatgacgacactgggctacggagacatgtaccccaagacgtggtcaggcatgctggtaggggcactgtgtgcactggctggcgtgctcaccatcgccatgccggtgcctgtcatcgtcaacaacttcggcatgtactactccctggccatggccaagcagaagctgcccaagaaacggaagaagcacgtgccacggccggcgcagctggagtcacccatgtactgcaagtctgaggagacttccccccgggacagcacctgcagtgataccagcccccctgcccgggaagagggtatgatcgagaggaaacgggcagactctaagcagaatggcgatgccaacgcagtgctgtctgatgaggagggagctggcctcacccaacccctggcctcctccccgacccccgaggagcgccgggccctgcgacgctccaccactcgagacagaaacaagaaggcagctgctgcttcctgctcagcactggggactatgcctgcgccgatggtagtgtccggaaagagacctgccaagacgccctctcgtccaactatgcccaggctgaagtcctcaccctctcttaaagcggcaccaacgtgagagagacaggcagacagacagaaagccagaggcttagggaaactctggaacccagacaagaatcttttcgctgggaaagactcagatatccttgtttgcacaggactggtggaaaatctcccatgcgaccctcggggcccagagccatctgggtctgatgttctgttccattgtacatcgaagagatatatatgcacatatagtatctatattcatacatattatactcttgtgtgtagtgcacgtgctattggtggtttgtcttctttgttaggctgtgtctccctaagcccttgccccacccagagtttcccgtccccttcactgatttctgttgtttctgctgactgtgtgggtggaatgtcccaagaaaagtgcatctgggaattgccagtccagctgggtagtcccaggctcctgtcttggggatgtttcccctgtcagcaagtaacctggtgaagtctattgaaggccagactgccccctagggtcactgcttcactagccgcaccccaccccagattggggttctacctcccaccccacatcctcgttgtggggggacttccaggggctcctctgcagcctcctccactacttcctccaccccatctatgtccttgacttaggggggcattttgtcttttttagatttgattttgttctctctcctttgtctgtttgttgtcaaagatgctgctgggcagacaggcagggaaaggatctgtctgcccatctggcccagggggtccgagaagggaagccttgggcaagaggagaccagttgcaatactgtacttcctggtcagtggccagaggatgcgtgcaatagcagaggccaggtgaccccttcagccttggcctctgcccctcccttggccctccctccctgctcctccctggtgttggtcagtccttttctaaagctgtcccctcgtgtgtgtctggggcatgcccaggctgggccctgtgccctgtctgcatgcctccaactgtcatgctgtgctcgagccccaataaagacatctggagcatcctgctgctcctgctgtgtga

SEQ ID NO: 437719 - DNA, 2078 bp, Homo sapiens
  misc_feature (1977)..(1977): n is a, c, g, or t
  misc_feature (1981)..(1981): n is a, c, g, or t
  misc_feature (1983)..(1983): n is a, c, g, or t
  misc_feature (1988)..(1989): n is a, c, g, or t
  misc_feature (1993)..(1993): n is a, c, g, or t
  misc_feature (1999)..(1999): n is a, c, g, or t
gggaggtggttggggcaagcccaagccgcagagggggccgccaccgcctcctgcctcctcttcgtctcctccccctcccccgtctgacgctgcctcctcgggaagggtgtttggagggcagcggccgccccaagccggagacccgcagcgcttcttatgatcagctcggtgtgtgtctcctcctaccgcgggcgcaagtcggggaacaagcctccgtccaaaacatgtctgaaggaggagatggccaagggcgaggcgtcggagaagatcatcatcaacgtgggcggcacgcgacatgagacctaccgcagcaccctgcgcaccctaccgggaacccgcctcgcctggctggccgaccccgacggcgggggccggcccgagaccgatggcggcggtgtgggtagcagcggcagcagcggcggcgggggctgcgagttcttcttcgacaggcacccgggcgtcttcgcctacgtgctcaactactaccgcaccggcaagctgcactgccccgcggacgtgtgcgggccgctcttcgaagaggagctcaccttctggggcatcgacgagaccgacgtggaaccctgctgctggatgacctaccggcagcaccgcgacgccgaggaggcgctcgacatcttcgagagcccggacggaggcggcagcggcgcggggcccagcgacgaggccggcgacgatgagcgggagctggccctgcagcgactgggcccccacgagggaggcgcgggccatggcgccgggtctgggggctgccgcggctggcagccccgcatgtgggcgctcttcgaggatccctactcctcccgggccgctagggtagtggcctttgcctctctcttcttcatcctggtctccatcaccactttctgcctggagacccatgaggcctttaatatcgaccgcaacgtgacagagatcctccgcgtagggaacatcaccagcgtgcacttccggcgggaggtagagacagagcccatcctgacctacatcgagggcgtatgtgtgctgtggttcacactggagttcctggtgcgcatcgtgtgctgccccgacacgctggacttcgtcaagaacctgctcaacatcatcgactttgtggccatcctgcccttctacctggaggtgggactgagcggcctgtcatccaaggcggcccgcgacgtgctgggcttcctgcgcgtggtgcgcttcgtgcgcatcctgcgtatcttcaagctcacacgccacttcgtggggctacgcgtgctgggccacaccctgagggccagcaccaatgagttcctgctgcttatcatcttcctggccctgggtgtgctcatctttgccaccatgatctactacgctgagcgcattggggccaggccctccgaccctcggggtaatgaccacaccgacttcaagaacatccccattggcttctggtgggctgtggtcaccatgacgacactgggctacggagacatgtaccccaagacgtggtcaggcatgctggtaggggcactgtgtgcactggctggcgtgctcaccatcgccatgccggtgcctgtcatcgtcaacaacttcggcatgtactactccctggccatggccaagcagaagctgcccaagaaacggaagaagcacgtgccacggccggcgcagctggagtcacccatgtactgcaagtctgaggagacttccccccgggacagcacctgcagtgataccagcccccctgcccgggaagagggtatgatcgagaggaaacgggcagactctaagcagaatggcgatgccaacgcagtgctgtctgatgaggagggagctggcctcacccaacccctggcctcctccccgacccccgaggagcgccgggccctgcgacgctccaccactcgagacagaaacaagaaggcagctgctgcttcctgctcagcactggggactatgcctgcgccgatggtagtgtccggaaagggncatngnctcgnnactncctttngattactgagtgtgcctcatgtggtctgtccgcctggagggtggccacaggttatcaggccttccgccggagatccggc

SEQ ID NO: 437720 - DNA, 723 bp, Homo sapiens
gctgggactacaggcacgtgccaccatgcctggctaattttcatatttttagtagagatggggtttcaccatattggccaggctggtctcgaactcctgacctcaagtgatctgcccaccttggcctcccgcctgtcatccttcttgatcaattaatattaaccagctttcctctgttaagaagacctttccctcttgtcaactgggattgaactacagttcttcctagacaagatgagataaatgtttatttctcttcaatataccaactctttttaacataccaattttgaaaatttaaccaatttggagtagtcatcttcaaaaagtggcacataactttcagtctctctgtatcacagggatttttgtttttttcagaagttttatgatcatttcagtcattctttttaaaatagtcttcatttgtagaagttttagttttacagaaaaattgagtatatactacagtttccatataccccagacccaatttctcctataattaacatcgtatgtttgcatggcacatttattacaattagtgaaaagtattggtacattattaactaaaatccatagcttattcagcctttcttagtttttagctagtgtttttgttttgttttttcaagatcccatctggaataccacattacattttgttgtcatatctccttaggatttcttagctgtgagtttctcagatattcctttttgtga

SEQ ID NO: 437721 - DNA, 3121 bp, Homo sapiens
acctgggtgcgctccgctgcccgccagcccgcctgccgccgcgagccccgcccgcctgtcctctcgcgtcctcttcgcgtgggtcctgcctccgcggcgggagaagaaaatggagcggggggtcttgcagccttacagtcatttgtaatggttacctcagattcccctgctgtggttaacgttaaacctaggaggtcagatgctctaagtgaacatgtttagtgctgtgcctgacaaaagcaagcaatcaaaatgggacttccttgagggcaggcctgtcttgcatctgtttctccaccacctagcctggaatataactggccttatgggtttctagaaggaaaatcacagaggtaaagcatcatttcatcacatcctgtcaaggcttcttggtgaatttttggatgaagccattaaattaattgcttgccatcatgagcagaagcaagcgtgacaacaatttttatagtgtagagattggagattctacattcacagtcctgaaacgatatcagaatttaaaacctataggctcaggagctcaaggaatagtatgcgcagcttatgatgccattcttgaaagaaatgttgcaatcaagaagctaagccgaccatttcagaatcagactcatgccaagcgggcctacagagagctagttcttatgaaatgtgttaatcacaaaaatataattggccttttgaatgttttcacaccacagaaatccctagaagaatttcaagatgtttacatagtcatggagctcatggatgcaaatctttgccaagtgattcagatggagctagatcatgaaagaatgtcctaccttctctatcagatgctgtgtggaatcaagcaccttcattctgctggaattattcatcgggacttaaagcccagtaatatagtagtaaaatctgattgcactttgaagattcttgacttcggtctggccaggactgcaggaacgagttttatgatgacgccttatgtagtgactcgctactacagagcacccgaggtcatccttggcatgggctacaaggaaaacgtggatttatggtctgtggggtgcattatgggagaaatggtttgccacaaaatcctctttccaggaagggactatattgatcagtggaataaagttattgaacagcttggaacaccatgtcctgaattcatgaagaaactgcaaccaacagtaaggacttacgttgaaaacagacctaaatatgctggatatagctttgagaaactcttccctgatgtccttttcccagctgactcagaacacaacaaacttaaagccagtcaggcaagggatttgttatccaaaatgctggtaatagatgcatctaaaaggatctctgtagatgaagctctccaacacccgtacatcaatgtctggtatgatccttctgaagcagaagctccaccaccaaagatccctgacaagcagttagatgaaagggaacacacaatagaagagtggaaagaattgatatataaggaagttatggacttggaggagagaaccaagaatggagttatacgggggcagccctctcctttagcacaggtgcagcagtgatcaatggctctcagcatccatcatcatcgtcgtctgtcaatgatgtgtcttcaatgtcaacagatccgactttggcctctgatacagacagcagtctagaagcagcagctgggcctctgggctgctgtagatgactacttgggccatcggggggtgggagggatggggagtcggttagtcattgatagaactactttgaaaacaattcagtggtcttatttttgggtgatttttcaaaaaatgtagaattcattttgtagtaaagtagtttattttttttaatttcaagtgatgtaatttaaaacctaagttgtgtttcaaaacagcaacaaaactgtattgtattttttttgctgtaattaactgtataatgtaaacctaattattttatcatggtttaaattttttgcatatttgctttatcttatgctgctgatttttttaactgaatttgtaagattttgtttatcaaagcaactattatgtggtgacttgcctatatcatgaattatttaagatttttatagttttttttaattagaatttatttcagatgttttgttcatgatactatccttcagggttatgtgcttatcaatgaaataaccccagaggagtgagggaaaataacgtgtagccagttatattcaggaataactactgtaaatgatgaacgtgttaggagacctccaatatttgctacttgccaatcctaatttagttacaagaattggtaggcaatcctacttaattttggcaaaagccccgtcatctaaatggcagaataactcagagcatgtctttgaagatgctgggcgtctaccaccaccttatgtccccaccctacccaacaaaaataagtaaaaagaatatggtgtattctacaaatttgtggcatgctcaaagtttatgatcacataaaggcaagaggatacttcatgaataatacatttcaatgcaaataaacagatggttcacttctactagctatgagcctgtttttgtatacactgagttaatctactcaggctgtaggtcccagcaatgttctagagtctggtctttccctttcctgcagcttcgggtccttggacctttcctgtttcctattacttggagtgtctgtcagttgagcaccagttgttctggtgtttcatttgattctacttgtagcataatcatttatacgagctattgggaggttccaaaccctacctagatttgtgtaggtgatgtatcaaatgagcaatataccgttcatctgaaaatagtagcacacagccatatataggatatcattttctaaggactgtttcttcacattgagcagagcaggcataaatggtggttatttagtctaagtcttttatttttttatacctgattttcaacataacacgcaatgtggatgtcgagtagtgttaagaatggtgctgctcctgacaagtgtatgttaactgtttacattttctatctgtagaattatttctctattactgaacttttcctaagtaaaatgtctttgaagtctc

SEQ ID NO: 437722 - DNA, 2617 bp, Homo sapiens
cgcggtgacggcccgcgtctctgttactcagccgagcggccgaggccggacgacgcggcttggattgcggagccgcgagcagcgctgggtaacggccgcggcgaccaccccggacggcccctgtccccgctggcgggcttccctgtcgccgttcgctgcgctgccggtcttgcagccttacagtcatttgtaatggttacctcagattcccctgctgtggttaacgttaaacctaggaggtcagatgctctaagtgaacatgtttagtgctgtgcctgacaaaagcaagcaatcaaaatgggacttccttgagggcaggcctgtcttgcatctgtttctccaccacctagcctggaatataactggccttatgggtttctagaaggaaaatcacagaggtaaagcatcatttcatcacatcctgtcaaggcttcttggtgaatttttggatgaagccattaaattaattgcttgccatcatgagcagaagcaagcgtgacaacaatttttatagtgtagagattggagattctacattcacagtcctgaaacgatatcagaatttaaaacctataggctcaggagctcaaggaatagtatgcgcagcttatgatgccattcttgaaagaaatgttgcaatcaagaagctaagccgaccatttcagaatcagactcatgccaagcgggcctacagagagctagttcttatgaaatgtgttaatcacaaaaatataattggccttttgaatgttttcacaccacagaaatccctagaagaatttcaagatgtttacatagtcatggagctcatggatgcaaatctttgccaagtgattcagatggagctagatcatgaaagaatgtcctaccttctctatcagatgctgtgtggaatcaagcaccttcattctgctggaattattcatcgggacttaaagcccagtaatatagtagtaaaatctgattgcactttgaagattcttgacttcggtctggccaggactgcaggaacgagttttatgatgacgccttatgtagtgactcgctactacagagcacccgaggtcatccttggcatgggctacaaggaaaacgtggatttatggtctgtggggtgcattatgggagaaatggtttgccacaaaatcctctttccaggaagggactatattgatcagtggaataaagttattgaacagcttggaacaccatgtcctgaattcatgaagaaactgcaaccaacagtaaggacttacgttgaaaacagacctaaatatgctggatatagctttgagaaactcttccctgatgtccttttcccagctgactcagaacacaacaaacttaaagccagtcaggcaagggatttgttatccaaaatgctggtaatagatgcatctaaaaggatctctgtagatgaagctctccaacacccgtacatcaatgtctggtatgatccttctgaagcagaagctccaccaccaaagatccctgacaagcagttagatgaaagggaacacacaatagaagagtggaaagaattgatatataaggaagttatggacttggaggagagaaccaagaatggagttatacgggggcagccctctcctttagcacaggtgcagcagtgatcaatggctctcagcatccatcatcatcgtcgtctgtcaatgatgtgtcttcaatgtcaacagatccgactttggcctctgatacagacagcagtctagaagcagcagctgggcctctgggctgctgtagatgactacttgggccatcggggggtgggagggatggggagtcggttagtcattgatagaactactttgaaaacaattcagtggtcttatttttgggtgatttttcaaaaaatgtagaattcattttgtagtaaagtagtttattttttttaatttcaagtgatgtaatttaaaacctaagttgtgtttcaaaacagcaacaaaactgtattgtattttttttgctgtaattaactgtataatgtaaacctaattattttatcatggtttaaattttttgcatatttgctttatcttatgctgctgatttttttaactgaatttgtaagattttgtttatcaaagcaactattatgtggtgacttgcctatatcatgaattatttaagatttttatagttttttttaattagaatttatttcagatgttttgttcatgatactatccttcagggttatgtgcttatcaatgaaataaccccagaggagtgagggaaaataacgtgtagccagttatattcaggaataactactgtaaatgatgaacgtgttaggagacctccaatatttgctacttgccaatcctaatttagttacaagaattggtaggcaatcctacttaattttggcaaaagccccgtcatctaaatggcagaataactcagagcatgtctttgaagatgctgggcgtctaccaccaccttatgtccccaccctacccaacaaaaataagtaaaaagaatatggtgtattctacaaatttgtggcatgctcaaagtttatgatcacataaaggcaagaggatacttcatgaataatacatttcaatgcaaataaacagatggttcacttcta

SEQ ID NO: 437723 - DNA, 3936 bp, Homo sapiens
cgcggtgacggcccgcgtctctgttactcagccgagcggccgaggccggacgacgcggcttggattgcggagccgcgagcagcgctgggtaacggccgcggcgaccaccccggacggcccctgtccccgctggcgggcttccctgtcgccgttcgctgcgctgccggtcttgcagccttacagtcatttgtaatggttacctcagattcccctgctgtggttaacgttaaacctaggaggtcagatgctctaagtgaacatgtttagtgctgtgcctgacaaaagcaagcaatcaaaatgggacttccttgagggcaggcctgtcttgcatctgtttctccaccacctagcctggaatataactggccttatgggtttctagaaggaaaatcacagaggtaaagcatcatttcatcacatcctgtcaaggcttcttggtgaatttttggatgaagccattaaattaattgcttgccatcatgagcagaagcaagcgtgacaacaatttttatagtgtagagattggagattctacattcacagtcctgaaacgatatcagaatttaaaacctataggctcaggagctcaaggaatagtatgcgcagcttatgatgccattcttgaaagaaatgttgcaatcaagaagctaagccgaccatttcagaatcagactcatgccaagcgggcctacagagagctagttcttatgaaatgtgttaatcacaaaaatataattggccttttgaatgttttcacaccacagaaatccctagaagaatttcaagatgtttacatagtcatggagctcatggatgcaaatctttgccaagtgattcagatggagctagatcatgaaagaatgtcctaccttctctatcagatgctgtgtggaatcaagcaccttcattctgctggaattattcatcgggacttaaagcccagtaatatagtagtaaaatctgattgcactttgaagattcttgacttcggtctggccaggactgcaggaacgagttttatgatgacgccttatgtagtgactcgctactacagagcacccgaggtcatccttggcatgggctacaaggaaaacgtggatttatggtctgtggggtgcattatgggagaaatggtttgccacaaaatcctctttccaggaagggactatattgatcagtggaataaagttattgaacagcttggaacaccatgtcctgaattcatgaagaaactgcaaccaacagtaaggacttacgttgaaaacagacctaaatatgctggatatagctttgagaaactcttccctgatgtccttttcccagctgactcagaacacaacaaacttaaagccagtcaggcaagggatttgttatccaaaatgctggtaatagatgcatctaaaaggatctctgtagatgaagctctccaacacccgtacatcaatgtctggtatgatccttctgaagcagaagctccaccaccaaagatccctgacaagcagttagatgaaagggaacacacaatagaagagtggaaagaattgatatataaggaagttatggacttggaggagagaaccaagaatggagttatacgggggcagccctctcctttagcacaggtgcagcagtgatcaatggctctcagcatccatcatcatcgtcgtctgtcaatgatgtgtcttcaatgtcaacagatccgactttggcctctgatacagacagcagtctagaagcagcagctgggcctctgggctgctgtagatgactacttgggccatcggggggtgggagggatggggagtcggttagtcattgatagaactactttgaaaacaattcagtggtcttatttttgggtgatttttcaaaaaatgtagaattcattttgtagtaaagtagtttattttttttaatttcaagtgatgtaatttaaaacctaagttgtgtttcaaaacagcaacaaaactgtattgtattttttttgctgtaattaactgtataatgtaaacctaattattttatcatggtttaaattttttgcatatttgctttatcttatgctgctgatttttttaactgaatttgtaagattttgtttatcaaagcaactattatgtggtgacttgcctatatcatgaattatttaagatttttatagttttttttaattagaatttatttcagatgttttgttcatgatactatccttcagggttatgtgcttatcaatgaaataaccccagaggagtgagggaaaataacgtgtagccagttatattcaggaataactactgtaaatgatgaacgtgttaggagacctccaatatttgctacttgccaatcctaatttagttacaagaattggtaggcaatcctacttaattttggcaaaagccccgtcatctaaatggcagaataactcagagcatgtctttgaagatgctgggcgtctaccaccaccttatgtccccaccctacccaacaaaaataagtaaaaagaatatggtgtattctacaaatttgtggcatgctcaaagtttatgatcacataaaggcaagaggatacttcatgaataatacatttcaatgcaaataaacagatggttcacttctactagctatgagcctgtttttgtatacactgagttaatctactcaggctgtaggtcccagcaatgttctagagtctggtctttccctttcctgcagcttcgggtccttggacctttcctgtttcctattacttggagtgtctgtcagttgagcaccagttgttctggtgtttcatttgattctacttgtagcataatcatttatacgagctattgggaggttccaaaccctacctagatttgtgtaggtgatgtatcaaatgagcaatataccgttcatctgaaaatagtagcacacagccatatataggatatcattttctaaggactgtttcttcacattgagcagagcaggcataaatggtggttatttagtctaagtcttttatttttttatacctgattttcaacataacacgcaatgtggatgtcgagtagtgttaagaatggtgctgctcctgacaagtgtatgttaactgtttacattttctatctgtagaattatttctctattactgaacttttcctaagtaaaatgtctttgaagtctcgttatttctgaaatacgttgtctgtaatagacccaggcaccttttaaattatctctggaacaagagggatttcatgtaatgaactaggaaatgcatactcacataagcaacaaggttctaggcagaaagccccttggaatttgtgaccaacaggagcaagaacaggtgcggctcaacatgcaatgtctgaaaatttgcttggcattttattcatatatttagtgcaaaattatttttgagtgagatattttacatcactgttaatgtgcaatatttaagattaaaatacattagcttttttatatactttgaagtagcaagtttgttttcgatggcttagagtcatgatttccagcttcccagcctttttatcagtcccttttctaatacaacaaggtgcattaatttgattaggcaaattagagttctaagacacttcttgaattgtagacagaaaatattggattcacaatttcagcagaaatttgagaatgagtgtgtttatattaatttcacaattagctgtattttctgtagcatagattatgtcactgttgcactttcacagcagacatgctttcagaaggttctcatattttatgtttgattgctgataagccatctctattgatacagattttggttaagtaaggaaaaccaggtgtgtgtctgtatcatttattgtaaatgccagctgccacttgccaaccatcatgttcagttcaattcaaagaaaacaaactctcattacttagtgtaaactaaaatac

SEQ ID NO: 437724 - DNA, 5375 bp, Homo sapiens
gtttcactgtgttggccaggatggtctcgatctcctgacctcatgatccacccaccttgacctcccaaagtgctgggattacaggcgtgagccactgcacccagcctcgtatgcattctttatcctaccttttcttgatggaagtacaaggttaaggatttatttaggctttaggctatctagtggagctaaataattatggatttgtacattgagtgcccacgatgtactaggtggatctttgaggcaacacaacgaacatgcagggtctctgttggcatagtccactgtctatttggatccattagcattttaggaaatagttgcaaaaaaatatatgttgtaatagatatagaagacacatgttgagcgtcatagacttggaagggatccagttacttgtctttggagaaagtgagaaatgtatatgactgtttcatgaattcagtttacagatttttgcttgaagtttttttgtgtgtttttgaatttcttattacagcgcagcttatgatgccattcttgaaagaaatgttgcaatcaagaagctaagccgaccatttcagaatcagactcatgccaagcgggcctacagagagctagttcttatgaaatgtgttaatcacaaaaatataattggccttttgaatgttttcacaccacagaaatccctagaagaatttcaagatgtttacatagtcatggagctcatggatgcaaatctttgccaagtgattcagatggagctagatcatgaaagaatgtcctaccttctctatcagatgctgtgtggaatcaagcaccttcattctgctggaattattcatcgggacttaaagcccagtaatatagtagtaaaatctgattgcactttgaagattcttgacttcggtctggccaggactgcaggaacgagttttatgatgacgccttatgtagtgactcgctactacagagcacccgaggtcatccttggcatgggctacaaggaaaacggaggaagaatgggaaaaggcatattcacaaggttacaataagtgagttttaggccttggccttcagggtcctggagtgtaaagactagaggaaaggagaccaagaaatcctaaccttacaacttagcaaaaaactgaatcttttttataagggtcagagctttagaaaatttttttaaacctaagctaaacaaagaatggcaaaagaaaatgccacttttatcgaagcctttatttttattacaactgattattttctgttagtgtagaaaactcagtaaaacaggatgtgttctagaaatattgtctaggagatataatcatgttttctgataaattgacagaaaaggaaaaattttgtatattattatagcattgtgtgcagtttgcagttagagccactatggatagtaattgtcattattcttagttgcttatcattttatttagaatttgtgagtttaagcttccattttaaggtaaaatcagttagtttgaacacacaataaataaggttaataaagcttatttattgatcatttctgtccacctacaatcattgccttttgcagggtgcctgtgagatataaaatttataactgccacatcctttcttaggaatttttaaatttctattttcttgtaatatgaatacaagaatacattcttgtaaatgaatgtattgaacattagttatggagtatttttcttagctacttgatattagatattgatcagtggaataaagttattgaacagcttggaacaccatgtcctgaattcatgaagaaactgcaaccaacagtaaggacttacgttgaaaacagacctaaatatgctggatatagctttgagaaactcttccctgatgtccttttcccagctgactcagaacacaacaaacttaaaggtactttttacaaatatgtacatttaatcccatttggggtgtgtagtgtgtgtgtatgggtttgtgtgtttatatgtattcatattcttatgggacatgaacccaaggttttctctggatggtggggaaaaaaatgaggtttttgttttttttttctttaatcttatatattttaatcatatgtataagataattttacagtaatatttttaaaacatatgctttttaaaaaatctcaaattgctgaaagttattaataatttgagaatctttacaaatatatgtacattaacaccattatgtttgcagccagtcaggcaagggatttgttatccaaaatgctggtaatagatgcatctaaaaggatctctgtagatgaagctctccaacacccgtacatcaatgtctggtatgatccttctgaagcagaagctgtaagttattttcttaatgtttacagaacatattgcattcttagagttagaatgacagttaggtttggaggagaccttttaattttaaataaaaatgtagatacatgatgatgatgtttttctgtttcttcatgaagactacgtcaaataaactaatgaacatattcgagcccctcctacacaaaataaagttacctcccactgttttttgcaatcttgcctggatacctaaccagagaactaggatgttgaatgctctgggggaacatcctaactcaggtataaaacaaattactgtatccaaaggaaaacagaattctgtgatctgtgatataaataaaatgtggcaatttcaagagctagaagaaaagaaaaaagacagttaaacattttatttcctgcaatgaaggagtcttcctaaactattatgtctgtataagtaagttgatgattgatcagtcttgatctaatgatatatttttataagtcatctgtgtggctaatatttcaaataactacagagttaaaatactcccagcatactgacttggttattattgccttgtgtttttcagccaccaccaaagatccctgacaagcagttagatgaaagggaacacacaatagaagagtggaaagaattgatatataaggaagttatggacttggaggagagaaccaagaatggagttatacgggggcagccctctcctttagcacaggtgcagcagtgatcaatggctctcagcatccatcatcatcgtcgtctgtcaatgatgtgtcttcaatgtcaacagatccgactttggcctctgatacagacagcagtctagaagcagcagctgggcctctgggctgctgtagatgactacttgggccatcggggggtgggagggatggggagtcggttagtcattgatagaactactttgaaaacaattcagtggtcttatttttgggtgatttttcaaaaaatgtagaattcattttgtagtaaagtagtttattttttttaatttcaagtgatgtaatttaaaacctaagttgtgtttcaaaacagcaacaaaactgtattgtattttttttgctgtaattaactgtataatgtaaacctaattattttatcatggtttaaattttttgcatatttgctttatcttatgctgctgatttttttaactgaatttgtaagattttgtttatcaaagcaactattatgtggtgacttgcctatatcatgaattatttaagatttttatagttttttttaattagaatttatttcagatgttttgttcatgatactatccttcagggttatgtgcttatcaatgaaataaccccagaggagtgagggaaaataacgtgtagccagttatattcaggaataactactgtaaatgatgaacgtgttaggagacctccaatatttgctacttgccaatcctaatttagttacaagaattggtaggcaatcctacttaattttggcaaaagccccgtcatctaaatggcagaataactcagagcatgtctttgaagatgctgggcgtctaccaccaccttatgtccccaccctacccaacaaaaataagtaaaaagaatatggtgtattctacaaatttgtggcatgctcaaagtttatgatcacataaaggcaagaggatacttcatgaataatacatttcaatgcaaataaacagatggttcacttctactagctatgagcctgtttttgtatacactgagttaatctactcaggctgtaggtcccagcaatgttctagagtctggtctttccctttcctgcagcttcgggtccttggacctttcctgtttcctattacttggagtgtctgtcagttgagcaccagttgttctggtgtttcatttgattctacttgtagcataatcatttatacgagctattgggaggttccaaaccctacctagatttgtgtaggtgatgtatcaaatgagcaatataccgttcatctgaaaatagtagcacacagccatatataggatatcattttctaaggactgtttcttcacattgagcagagcaggcataaatggtggttatttagtctaagtcttttatttttttatacctgattttcaacataacacgcaatgtggatgtcgagtagtgttaagaatggtgctgctcctgacaagtgtatgttaactgtttacattttctatctgtagaattatttctctattactgaacttttcctaagtaaaatgtctttgaagtctcgttatttctgaaatacgttgtctgtaatagacccaggcaccttttaaattatctctggaacaagagggatttcatgtaatgaactaggaaatgcatactcacataagcaacaaggttctaggcagaaagccccttggaatttgtgaccaacaggagcaagaacaggtgcggctcaacatgcaatgtctgaaaatttgcttggcattttattcatatatttagtgcaaaattatttttgagtgagatattttacatcactgttaatgtgcaatatttaagattaaaatacattagcttttttatatactttgaagtagcaagtttgttttcgatggcttagagtcatgatttccagcttcccagcctttttatcagtcccttttctaatacaacaaggtgcattaatttgattaggcaaattagagttctaagacacttcttgaattgtagacagaaaatattggattcacaatttcagcagaaatttgagaatgagtgtgtttatattaatttcacaattagctgtattttctgtagcatagattatgtcactgttgcactttcacagcagacatgctttcagaaggttctcatattttatgtttgattgctgataagccatctctattgatacagattttggttaagtaaggaaaaccaggtgtgtgtctgtatcatttattgtaaatgccagctgccacttgccaaccatcatgttcagttcaattcaaagaaaacaaactctcattacttagtgtaaactaaaatac

SEQ ID NO: 437725 - DNA, 3687 bp, Homo sapiens
cgcggtgacggcccgcgtctctgttactcagccgagcggccgaggccggacgacgcggcttggattgcggagccgcgagcagcgctgggtaacggccgcggcgaccaccccggacggcccctgtccccgctggcgggcttccctgtcgccgttcgctgcgctgccggtcttgcagccttacagtcatttgtaatggttacctcagattcccctgctgtggttaacgttaaacctaggaggtcagatgctctaagtgaacatgtttagtgctgtgcctgacaaaagcaagcaatcaaaatgggacttccttgagggcaggcctgtcttgcatctgtttctccaccacctagcctggaatataactggccttatgggtttctagaaggaaaatcacagaggtaaagcatcatttcatcacatcctgtcaaggcttcttggtgaatttttggatgaagccattaaattaattgcttgccatcatgagcagaagcaagcgtgacaacaatttttatagtgtagagattggagattctacattcacagtcctgaaacgatatcagaatttaaaacctataggctcaggagctcaaggaatagtatgcgcagcttatgatgccattcttgaaagaaatgttgcaatcaagaagctaagccgaccatttcagaatcagactcatgccaagcgggcctacagagagctagttcttatgaaatgtgttaatcacaaaaatataattggccttttgaatgttttcacaccacagaaatccctagaagaatttcaagatgtttacatagtcatggagctcatggatgcaaatctttgccaagtgattcagatggagctagatcatgaaagaatgtcctaccttctctatcagatgctgtgtggaatcaagcaccttcattctgctggaattattcatcgggacttaaagcccagtaatatagtagtaaaatctgattgcactttgaagattcttgacttcggtctggccaggactgcaggaacgagttttatgatgacgccttatgtagtgactcgctactacagagcacccgaggtcatccttggcatgggctacaaggaaaacgtggatttatggtctgtggggtgcattatgggagaaatggtttgccacaagcttggaacaccatgtcctgaattcatgaagaaactgcaaccaacagtaaggacttacgttgaaaacagacctaaatatgctggatatagctttgagaaactcttccctgatgtccttttcccagctgactcagaacacaacaaacttaaagccagtcaggcaagggatttgttatccaaaatgctggtaatagatgcatctaaaaggatctctgtagatgaagctctccaacacccgtacatcaatgtctggtatgatccttctgaagcagaagctgtaagttattttcttaatgtttacagaacatattgcattcttagagttagaatgacagttaggtttggaggagaccttttaattttaaataaaaatgtagatacatgatgatgatgtttttctgtttcttcatgaagactacgtcaaataaactaatgaacatattcgagcccctcctacacaaaataaagttacctcccactgttttttgcaatcttgcctggatacctaaccagagaactaggatgttgaatgctctgggggaacatcctaactcaggtataaaacaaattactgtatccaaaggaaaacagaattctgtgatctgtgatataaataaaatgtggcaatttcaagagctagaagaaaagaaaaaagacagttaaacattttatttcctgcaatgaaggagtcttcctaaactattatgtctgtataagtaagttgatgattgatcagtcttgatctaatgatatatttttataagtcatctgtgtggctaatatttcaaataactacagagttaaaatactcccagcatactgacttggttattattgccttgtgtttttcagccaccaccaaagatccctgacaagcagttagatgaaagggaacacacaatagaagagtggaaagaattgatatataaggaagttatggacttggaggagagaaccaagaatggagttatacgggggcagccctctcctttagcacaggtgcagcagtgatcaatggctctcagcatccatcatcatcgtcgtctgtcaatgatgtgtcttcaatgtcaacagatccgactttggcctctgatacagacagcagtctagaagcagcagctgggcctctgggctgctgtagatgactacttgggccatcggggggtgggagggatggggagtcggttagtcattgatagaactactttgaaaacaattcagtggtcttatttttgggtgatttttcaaaaaatgtagaattcattttgtagtaaagtagtttattttttttaatttcaagtgatgtaatttaaaacctaagttgtgtttcaaaacagcaacaaaactgtattgtattttttttgctgtaattaactgtataatgtaaacctaattattttatcatggtttaaattttttgcatatttgctttatcttatgctgctgatttttttaactgaatttgtaagattttgtttatcaaagcaactattatgtggtgacttgcctatatcatgaattatttaagatttttatagttttttttaattagaatttatttcagatgttttgttcatgatactatccttcagggttatgtgcttatcaatgaaataaccccagaggagtgagggaaaataacgtgtagccagttatattcaggaataactactgtaaatgatgaacgtgttaggagacctccaatatttgctacttgccaatcctaatttagttacaagaattggtaggcaatcctacttaattttggcaaaagccccgtcatctaaatggcagaataactcagagcatgtctttgaagatgctgggcgtctaccaccaccttatgtccccaccctacccaacaaaaataagtaaaaagaatatggtgtattctacaaatttgtggcatgctcaaagtttatgatcacataaaggcaagaggatacttcatgaataatacatttcaatgcaaataaacagatggttcacttctactagctatgagcctgtttttgtatacactgagttaatctactcaggctgtaggtcccagcaatgttctagagtctggtctttccctttcctgcagcttcgggtccttggacctttcctgtttcctattacttggagtgtctgtcagttgagcaccagttgttctggtgtttcatttgattctacttgtagcataatcatttatacgagctattgggaggttccaaaccctacctagatttgtgtaggtgatgtatcaaatgagcaatataccgttcatctgaaaatagtagcacacagccatatataggatatcattttctaaggactgtttcttcacattgagcagagcaggcataaatggtggttatttagtctaagtcttttatttttttatacctgattttcaacataacacgcaatgtggatgtcgagtagtgttaagaatggtgctgctcctgacaagtgtatgttaactgtttacattttctatctgtagaattatttctctattactgaacttttcctaagtaaaatgtctttgaagtctc

SEQ ID NO: 437726 - DNA, 1912 bp, Homo sapiens
  misc_feature (1871)..(1871): n is a, c, g, or t
cgcggtgacggcccgcgtctctgttactcagccgagcggccgaggccggacgacgcggcttggattgcggagccgcgagcagcgctgggtaacggccgcggcgaccaccccggacggcccctgtccccgctggcgggcttccctgtcgccgttcgctgcgctgccggtcttgcagccttacagtcatttgtaatggttacctcagattcccctgctgtggttaacgttaaacctaggaggtcagatgctctaagtgaacatgtttagtgctgtgcctgacaaaagcaagcaatcaaaatgggacttccttgagggcaggcctgtcttgcatctgtttctccaccacctagcctggaatataactggccttatgggtttctagaaggaaaatcacagaggtaaagcatcatttcatcacatcctgtcaaggcttcttggtgaatttttggatgaagccattaaattaattgcttgccatcatgagcagaagcaagcgtgacaacaatttttatagtgtagagattggagattctacattcacagtcctgaaacgatatcagaatttaaaacctataggctcaggagctcaaggaatagtatgcgcagcttatgatgccattcttgaaagaaatgttgcaatcaagaagctaagccgaccatttcagaatcagactcatgccaagcgggcctacagagagctagttcttatgaaatgtgttaatcacaaaaatataattggccttttgaatgttttcacaccacagaaatccctagaagaatttcaagatgtttacatagtcatggagctcatggatgcaaatctttgccaagtgattcagatggagctagatcatgaaagaatgtcctaccttctctatcagatgctgtgtggaatcaagcaccttcattctgctggaattattcatcgggacttaaagcccagtaatatagtagtaaaatctgattgcactttgaagattcttgacttcggtctggccaggactgcaggaacgagttttatgatgacgccttatgtagtgactcgctactacagagcacccgaggtcatccttggcatgggctacaaggaaaacgttgacatttggtcagttgggtgcatcatgggagaaatgatcaaaggtggtgttttgttcccaggtacagatcatattgatcagtggaataaagttattgaacagcttggaacaccatgtcctgaattcatgaagaaactgcaaccaacagtaaggacttacgttgaaaacagacctaaatatgctggatatagctttgagaaactcttccctgatgtccttttcccagctgactcagaacacaacaaacttaaagccagtcaggcaagggatttgttatccaaaatgctggtaatagatgcatctaaaaggatctctgtagatgaagctctccaacacccgtacatcaatgtctggtatgatccttctgaagcagaagctccaccaccaaagatccctgacaagcagttagatgaaagggaacacacaatagaagagtggaaagaattgatatataaggaagttatggacttggaggagagaaccaagaatggagttatacgggggcagccctctcctttagcacaggtgcagcagtgatcaatggctctcagcatccatcatcatcgtcgtctgtcaatgatgtgtcttcaatgtcaacagatccgactttggcctctgatacagacagcagtctagaagcagcagctgggcctctgggctgctgtagatgactacttgggccatcggggggtgggagggatggggagtcggttagtcattgatagaactactttgaaaacaattcagtgatgtcttgatgataagggtgagtanactgaaatcccaaacactgttttgttgcttgttttattatg

SEQ ID NO: 437727 - DNA, 1084 bp, Homo sapiens
cgcggtgacggcccgcgtctctgttactcagccgagcggccgaggccggacgacgcggcttggattgcggagccgcgagcagcgctgggtaacggccgcggcgaccaccccggacggcccctgtccccgctggcgggcttccctgtcgccgttcgctgcgctgccggtcttgcagccttacagtcatttgtaatggttacctcagattcccctgctgtggttaacgttaaacctaggaggtcagatgctctaagtgaacatgtttagtgctgtgcctgacaaaagcaagcaatcaaaatgggacttccttgagggcaggcctgtcttgcatctgtttctccaccacctagcctggaatataactggccttatgggtttctagaaggaaaatcacagaggtaaagcatcatttcatcacatcctgtcaaggcttcttggtgaatttttggatgaagccattaaattaattgcttgccatcatgagcagaagcaagcgtgacaacaatttttatagtgtagagattggagattctacattcacagtcctgaaacgatatcagaatttaaaacctataggctcaggagctcaaggaatagtatgcgcagcttatgatgccattcttgaaagaaatgttgcaatcaagaagctaagccgaccatttcagaatcagactcatgccaagcgggcctacagagagctagttcttatgaaatgtgttaatcacaaaaatataattggccttttgaatgttttcacaccacagaaatccctagaagaatttcaagatgtttacatagtcatggagctcatggatgcaaatctttgccaagtgattcagatggagctagatcatgaaagaatgtcctaccttctctatcagatgctgtgtggaatcaagcaccttcattctgctggaattattcatcgggttagtagaagaaactatcgtcatactctttgttttctcattgaggtgaaattcatgtaacaaaattaaccattctaaagtggcatttttagtacattcacagtgctgtacaactaccacccatattaaattctaaaatattttcattaccccca

SEQ ID NO: 437728 - DNA, 522 bp, Homo sapiens
tttttaaaatagtcttcatttgtagaagttttagttttacagaaaaattgagtatatactacagtttccatataccccagacccaatttctcctataattaacatcgtatgtttgcatggcacatttattacaattagtgaaaagtattggtacattattaactaaaatccatagcttattcagcctttcttagtttttagctagtgtttttgttttgttttttcaagatcccatctggaataccacattacattttgttgtcatatctccttaggatttcttagctgtgagtttctcagatattcctttttgtgattaccttgactgctcaaatattttgtaggataccgttttattggaatttgatgtttttctcatttttagactggccttatgggtttctagaaggaaaatcacagaggtaaagcatcatttcatcacatcctgtcaagggtatgtactgttaacataatttatgacttgattttgactttgatcacctggctgaggtaatgtttgtc

SEQ ID NO: 437729 - DNA, 3166 bp, Homo sapiens
cgcggtgacggcccgcgtctctgttactcagccgagcggccgaggccggacgacgcggcttggattgcggagccgcgagcagcgctgggtaacggccgcggcgaccaccccggacggcccctgtccccgctggcgggcttccctgtcgccgttcgctgcgctgccggtcttgcagccttacagtcatttgtaatggttacctcagattcccctgctgtggttaacgttaaacctaggaggtcagatgctctaagtgaacatgtttagtgctgtgcctgacaaaagcaagcaatcaaaatgggacttccttgagggcaggcctgtcttgcatctgtttctccaccacctagcctggaatataactggccttatgggtttctagaaggaaaatcacagaggtaaagcatcatttcatcacatcctgtcaaggcttcttggtgaatttttggatgaagccattaaattaattgcttgccatcatgagcagaagcaagcgtgacaacaatttttatagtgtagagattggagattctacattcacagtcctgaaacgatatcagaatttaaaacctataggctcaggagctcaaggaatagtatgcgcagcttatgatgccattcttgaaagaaatgttgcaatcaagaagctaagccgaccatttcagaatcagactcatgccaagcgggcctacagagagctagttcttatgaaatgtgttaatcacaaaaatataattggccttttgaatgttttcacaccacagaaatccctagaagaatttcaagatgtttacatagtcatggagctcatggatgcaaatctttgccaagtgattcagatggagctagatcatgaaagaatgtcctaccttctctatcagatgctgtgtggaatcaagcaccttcattctgctggaattattcatcgggacttaaagcccagtaatatagtagtaaaatctgattgcactttgaagattcttgacttcggtctggccaggactgcaggaacgagttttatgatgacgccttatgtagtgactcgctactacagagcacccgaggtcatccttggcatgggctacaaggaaaacgtggatttatggtctgtggggtgcattatgggagaaatggtttgccacaaaatcctctttccaggaagggactatattgatcagtggaataaagttattgaacagcttggaacaccatgtcctgaattcatgaagaaactgcaaccaacagtaaggacttacgttgaaaacagacctaaatatgctggatatagctttgagaaactcttccctgatgtccttttcccagctgactcagaacacaacaaacttaaagccagtcaggcaagggatttgttatccaaaatgctggtaatagatgcatctaaaaggatctctgtagatgaagctctccaacacccgtacatcaatgtctggtatgatccttctgaagcagaagctccaccaccaaagatccctgacaagcagttagatgaaagggaacacacaatagaagagtggaaagaattgatatataaggaagttatggacttggaggagagaaccaagaatggagttatacgggggcagccctctcctttagcacaggtgcagcagtgatcaatggctctcagcatccatcatcatcgtcgtctgtcaatgatgtgtcttcaatgtcaacagatccgactttggcctctgatacagacagcagtctagaagcagcagctgggcctctgggctgctgtagatgactacttgggccatcggggggtgggagggatggggagtcggttagtcattgatagaactactttgaaaacaattcagtggtcttatttttgggtgatttttcaaaaaatgtagaattcattttgtagtaaagtagtttattttttttaatttcaagtgatgtaatttaaaacctaagttgtgtttcaaaacagcaacaaaactgtattgtattttttttgctgtaattaactgtataatgtaaacctaattattttatcatggtttaaattttttgcatatttgctttatcttatgctgctgatttttttaactgaatttgtaagattttgtttatcaaagcaactattatgtggtgacttgcctatatcatgaattatttaagatttttatagttttttttaattagaatttatttcagatgttttgttcatgatactatccttcagggttatgtgcttatcaatgaaataaccccagaggagtgagggaaaataacgtgtagccagttatattcaggaataactactgtaaatgatgaacgtgttaggagacctccaatatttgctacttgccaatcctaatttagttacaagaattggtaggcaatcctacttaattttggcaaaagccccgtcatctaaatggcagaataactcagagcatgtctttgaagatgctgggcgtctaccaccaccttatgtccccaccctacccaacaaaaataagtaaaaagaatatggtgtattctacaaatttgtggcatgctcaaagtttatgatcacataaaggcaagaggatacttcatgaataatacatttcaatgcaaataaacagatggttcacttctactagctatgagcctgtttttgtatacactgagttaatctactcaggctgtaggtcccagcaatgttctagagtctggtctttccctttcctgcagcttcgggtccttggacctttcctgtttcctattacttggagtgtctgtcagttgagcaccagttgttctggtgtttcatttgattctacttgtagcataatcatttatacgagctattgggaggttccaaaccctacctagatttgtgtaggtgatgtatcaaatgagcaatataccgttcatctgaaaatagtagcacacagccatatataggatatcattttctaaggactgtttcttcacattgagcagagcaggcataaatggtggttatttagtctaagtcttttatttttttatacctgattttcaacataacacgcaatgtggatgtcgagtagtgttaagaatggtgctgctcctgacaagtgtatgttaactgtttacattttctatctgtagaattatttctctattactgaacttttcctaagtaaaatgtctttgaagtctc

SEQ ID NO: 437730 - DNA, 2903 bp, Homo sapiens
cgcggtgacggcccgcgtctctgttactcagccgagcggccgaggccggacgacgcggcttggattgcggagccgcgagcagcgctgggtaacggccgcggcgaccaccccggacggcccctgtccccgctggcgggcttccctgtcgccgttcgctgcgctgccggcttcttggtgaatttttggatgaagccattaaattaattgcttgccatcatgagcagaagcaagcgtgacaacaatttttatagtgtagagattggagattctacattcacagtcctgaaacgatatcagaatttaaaacctataggctcaggagctcaaggaatagtatgcgcagcttatgatgccattcttgaaagaaatgttgcaatcaagaagctaagccgaccatttcagaatcagactcatgccaagcgggcctacagagagctagttcttatgaaatgtgttaatcacaaaaatataattggccttttgaatgttttcacaccacagaaatccctagaagaatttcaagatgtttacatagtcatggagctcatggatgcaaatctttgccaagtgattcagatggagctagatcatgaaagaatgtcctaccttctctatcagatgctgtgtggaatcaagcaccttcattctgctggaattattcatcgggacttaaagcccagtaatatagtagtaaaatctgattgcactttgaagattcttgacttcggtctggccaggactgcaggaacgagttttatgatgacgccttatgtagtgactcgctactacagagcacccgaggtcatccttggcatgggctacaaggaaaacgtggatttatggtctgtggggtgcattatgggagaaatggtttgccacaaaatcctctttccaggaagggactatattgatcagtggaataaagttattgaacagcttggaacaccatgtcctgaattcatgaagaaactgcaaccaacagtaaggacttacgttgaaaacagacctaaatatgctggatatagctttgagaaactcttccctgatgtccttttcccagctgactcagaacacaacaaacttaaagccagtcaggcaagggatttgttatccaaaatgctggtaatagatgcatctaaaaggatctctgtagatgaagctctccaacacccgtacatcaatgtctggtatgatccttctgaagcagaagctccaccaccaaagatccctgacaagcagttagatgaaagggaacacacaatagaagagtggaaagaattgatatataaggaagttatggacttggaggagagaaccaagaatggagttatacgggggcagccctctcctttagcacaggtgcagcagtgatcaatggctctcagcatccatcatcatcgtcgtctgtcaatgatgtgtcttcaatgtcaacagatccgactttggcctctgatacagacagcagtctagaagcagcagctgggcctctgggctgctgtagatgactacttgggccatcggggggtgggagggatggggagtcggttagtcattgatagaactactttgaaaacaattcagtggtcttatttttgggtgatttttcaaaaaatgtagaattcattttgtagtaaagtagtttattttttttaatttcaagtgatgtaatttaaaacctaagttgtgtttcaaaacagcaacaaaactgtattgtattttttttgctgtaattaactgtataatgtaaacctaattattttatcatggtttaaattttttgcatatttgctttatcttatgctgctgatttttttaactgaatttgtaagattttgtttatcaaagcaactattatgtggtgacttgcctatatcatgaattatttaagatttttatagttttttttaattagaatttatttcagatgttttgttcatgatactatccttcagggttatgtgcttatcaatgaaataaccccagaggagtgagggaaaataacgtgtagccagttatattcaggaataactactgtaaatgatgaacgtgttaggagacctccaatatttgctacttgccaatcctaatttagttacaagaattggtaggcaatcctacttaattttggcaaaagccccgtcatctaaatggcagaataactcagagcatgtctttgaagatgctgggcgtctaccaccaccttatgtccccaccctacccaacaaaaataagtaaaaagaatatggtgtattctacaaatttgtggcatgctcaaagtttatgatcacataaaggcaagaggatacttcatgaataatacatttcaatgcaaataaacagatggttcacttctactagctatgagcctgtttttgtatacactgagttaatctactcaggctgtaggtcccagcaatgttctagagtctggtctttccctttcctgcagcttcgggtccttggacctttcctgtttcctattacttggagtgtctgtcagttgagcaccagttgttctggtgtttcatttgattctacttgtagcataatcatttatacgagctattgggaggttccaaaccctacctagatttgtgtaggtgatgtatcaaatgagcaatataccgttcatctgaaaatagtagcacacagccatatataggatatcattttctaaggactgtttcttcacattgagcagagcaggcataaatggtggttatttagtctaagtcttttatttttttatacctgattttcaacataacacgcaatgtggatgtcgagtagtgttaagaatggtgctgctcctgacaagtgtatgttaactgtttacattttctatctgtagaattatttctctattactgaacttttcctaagtaaaatgtctttgaagtctc

SEQ ID NO: 437731 - DNA, 5474 bp, Homo sapiens
cgcggtgacggcccgcgtctctgttactcagccgagcggccgaggccggacgacgcggcttggattgcggagccgcgagcagcgctgggtaacggccgcggcgaccaccccggacggcccctgtccccgctggcgggcttccctgtcgccgttcgctgcgctgccggtcttgcagccttacagtcatttgtaatggttacctcagattcccctgctgtggttaacgttaaacctaggaggtcagatgctctaagtgaacatgtttagtgctgtgcctgacaaaagcaagcaatcaaaatgggacttccttgagggcaggcctgtcttgcatctgtttctccaccacctagcctggaatataactggccttatgggtttctagaaggaaaatcacagaggtaaagcatcatttcatcacatcctgtcaaggcttcttggtgaatttttggatgaagccattaaattaattgcttgccatcatgagcagaagcaagcgtgacaacaatttttatagtgtagagattggagattctacattcacagtcctgaaacgatatcagaatttaaaacctataggctcaggagctcaaggaatagtatgcgcagcttatgatgccattcttgaaagaaatgttgcaatcaagaagctaagccgaccatttcagaatcagactcatgccaagcgggcctacagagagctagttcttatgaaatgtgttaatcacaaaaatataattggccttttgaatgttttcacaccacagaaatccctagaagaatttcaagatgtttacatagtcatggagctcatggatgcaaatctttgccaagtgattcagatggagctagatcatgaaagaatgtcctaccttctctatcagatgctgtgtggaatcaagcaccttcattctgctggaattattcatcgggacttaaagcccagtaatatagtagtaaaatctgattgcactttgaagattcttgacttcggtctggccaggactgcaggaacgagttttatgatgacgccttatgtagtgactcgctactacagagcacccgaggtcatccttggcatgggctacaaggaaaacggaggaagaatgggaaaaggcatattcacaaggttacaataagtgagttttaggccttggccttcagggtcctggagtgtaaagactagaggaaaggagaccaagaaatcctaaccttacaacttagcaaaaaactgaatcttttttataagggtcagagctttagaaaatttttttaaacctaagctaaacaaagaatggcaaaagaaaatgccacttttatcgaagcctttatttttattacaactgattattttctgttagtgtagaaaactcagtaaaacaggatgtgttctagaaatattgtctaggagatataatcatgttttctgataaattgacagaaaaggaaaaattttgtatattattatagcattgtgtgcagtttgcagttagagccactatggatagtaattgtcattattcttagttgcttatcattttatttagaatttgtgagtttaagcttccattttaaggtaaaatcagttagtttgaacacacaataaataaggttaataaagcttatttattgatcatttctgtccacctacaatcattgccttttgcagggtgcctgtgagatataaaatttataactgccacatcctttcttaggaatttttaaatttctattttcttgtaatatgaatacaagaatacattcttgtaaatgaatgtattgaacattagttatggagtatttttcttagctacttgatattagatattgatcagtggaataaagttattgaacagcttggaacaccatgtcctgaattcatgaagaaactgcaaccaacagtaaggacttacgttgaaaacagacctaaatatgctggatatagctttgagaaactcttccctgatgtccttttcccagctgactcagaacacaacaaacttaaaggtactttttacaaatatgtacatttaatcccatttggggtgtgtagtgtgtgtgtatgggtttgtgtgtttatatgtattcatattcttatgggacatgaacccaaggttttctctggatggtggggaaaaaaatgaggtttttgttttttttttctttaatcttatatattttaatcatatgtataagataattttacagtaatatttttaaaacatatgctttttaaaaaatctcaaattgctgaaagttattaataatttgagaatctttacaaatatatgtacattaacaccattatgtttgcagccagtcaggcaagggatttgttatccaaaatgctggtaatagatgcatctaaaaggatctctgtagatgaagctctccaacacccgtacatcaatgtctggtatgatccttctgaagcagaagctgtaagttattttcttaatgtttacagaacatattgcattcttagagttagaatgacagttaggtttggaggagaccttttaattttaaataaaaatgtagatacatgatgatgatgtttttctgtttcttcatgaagactacgtcaaataaactaatgaacatattcgagcccctcctacacaaaataaagttacctcccactgttttttgcaatcttgcctggatacctaaccagagaactaggatgttgaatgctctgggggaacatcctaactcaggtataaaacaaattactgtatccaaaggaaaacagaattctgtgatctgtgatataaataaaatgtggcaatttcaagagctagaagaaaagaaaaaagacagttaaacattttatttcctgcaatgaaggagtcttcctaaactattatgtctgtataagtaagttgatgattgatcagtcttgatctaatgatatatttttataagtcatctgtgtggctaatatttcaaataactacagagttaaaatactcccagcatactgacttggttattattgccttgtgtttttcagccaccaccaaagatccctgacaagcagttagatgaaagggaacacacaatagaagagtggaaagaattgatatataaggaagttatggacttggaggagagaaccaagaatggagttatacgggggcagccctctcctttagcacaggtgcagcagtgatcaatggctctcagcatccatcatcatcgtcgtctgtcaatgatgtgtcttcaatgtcaacagatccgactttggcctctgatacagacagcagtctagaagcagcagctgggcctctgggctgctgtagatgactacttgggccatcggggggtgggagggatggggagtcggttagtcattgatagaactactttgaaaacaattcagtggtcttatttttgggtgatttttcaaaaaatgtagaattcattttgtagtaaagtagtttattttttttaatttcaagtgatgtaatttaaaacctaagttgtgtttcaaaacagcaacaaaactgtattgtattttttttgctgtaattaactgtataatgtaaacctaattattttatcatggtttaaattttttgcatatttgctttatcttatgctgctgatttttttaactgaatttgtaagattttgtttatcaaagcaactattatgtggtgacttgcctatatcatgaattatttaagatttttatagttttttttaattagaatttatttcagatgttttgttcatgatactatccttcagggttatgtgcttatcaatgaaataaccccagaggagtgagggaaaataacgtgtagccagttatattcaggaataactactgtaaatgatgaacgtgttaggagacctccaatatttgctacttgccaatcctaatttagttacaagaattggtaggcaatcctacttaattttggcaaaagccccgtcatctaaatggcagaataactcagagcatgtctttgaagatgctgggcgtctaccaccaccttatgtccccaccctacccaacaaaaataagtaaaaagaatatggtgtattctacaaatttgtggcatgctcaaagtttatgatcacataaaggcaagaggatacttcatgaataatacatttcaatgcaaataaacagatggttcacttctactagctatgagcctgtttttgtatacactgagttaatctactcaggctgtaggtcccagcaatgttctagagtctggtctttccctttcctgcagcttcgggtccttggacctttcctgtttcctattacttggagtgtctgtcagttgagcaccagttgttctggtgtttcatttgattctacttgtagcataatcatttatacgagctattgggaggttccaaaccctacctagatttgtgtaggtgatgtatcaaatgagcaatataccgttcatctgaaaatagtagcacacagccatatataggatatcattttctaaggactgtttcttcacattgagcagagcaggcataaatggtggttatttagtctaagtcttttatttttttatacctgattttcaacataacacgcaatgtggatgtcgagtagtgttaagaatggtgctgctcctgacaagtgtatgttaactgtttacattttctatctgtagaattatttctctattactgaacttttcctaagtaaaatgtctttgaagtctcgttatttctgaaatacgttgtctgtaatagacccaggcaccttttaaattatctctggaacaagagggatttcatgtaatgaactaggaaatgcatactcacataagcaacaaggttctaggcagaaagccccttggaatttgtgaccaacaggagcaagaacaggtgcggctcaacatgcaatgtctgaaaatttgcttggcattttattcatatatttagtgcaaaattatttttgagtgagatattttacatcactgttaatgtgcaatatttaagattaaaatacattagcttttttatatactttgaagtagcaagtttgttttcgatggcttagagtcatgatttccagcttcccagcctttttatcagtcccttttctaatacaacaaggtgcattaatttgattaggcaaattagagttctaagacacttcttgaattgtagacagaaaatattggattcacaatttcagcagaaatttgagaatgagtgtgtttatattaatttcacaattagctgtattttctgtagcatagattatgtcactgttgcactttcacagcagacatgctttcagaaggttctcatattttatgtttgattgctgataagccatctctattgatacagattttggttaagtaaggaaaaccaggtgtgtgtctgtatcatttattgtaaatgccagctgccacttgccaaccatcatgttcagttcaattcaaagaaaacaaactctcattacttagtgtaaactaaaatac

SEQ ID NO: 437732 - DNA, 3865 bp, Homo sapiens
cgcggtgacggcccgcgtctctgttactcagccgagcggccgaggccggacgacgcggcttggattgcggagccgcgagcagcgctgggtaacggccgcggcgaccaccccggacggcccctgtccccgctggcgggcttccctgtcgccgttcgctgcgctgccggtcttgcagccttacagtcatttgtaatggttacctcagattcccctgctgtggttaacgttaaacctaggaggtcagatgctctaagtgaacatgtttagtgctgtgcctgacaaaagcaagcaatcaaaatgggacttccttgagggcaggcctgtcttgcatctgtttctccaccacctagcctggaatataactggccttatgggtttctagaaggaaaatcacagaggtaaagcatcatttcatcacatcctgtcaaggcttcttggtgaatttttggatgaagccattaaattaattgcttgccatcatgagcagaagcaagcgtgacaacaatttttatagtgtagagattggagattctacattcacagtcctgaaacgatatcagaatttaaaacctataggctcaggagctcaaggaatagtatgcgcagcttatgatgccattcttgaaagaaatgttgcaatcaagaagctaagccgaccatttcagaatcagactcatgccaagcgggcctacagagagctagttcttatgaaatgtgttaatcacaaaaatataattggccttttgaatgttttcacaccacagaaatccctagaagaatttcaagatgtttacatagtcatggagctcatggatgcaaatctttgccaagtgattcagatggagctagatcatgaaagaatgtcctaccttctctatcagatgctgtgtggaatcaagcaccttcattctgctggaattattcatcgggacttaaagcccagtaatatagtagtaaaatctgattgcactttgaagattcttgacttcggtctggccaggactgcaggaacgagttttatgatgacgccttatgtagtgactcgctactacagagcacccgaggtcatccttggcatgggctacaaggaaaacggaggaagaatgggaaaaggcatattcacaaggttacaataaggtgcctgtgagatataaaatttataactgccacatcctttcttaggaatttttaaatttctattttcttgtaatatgaatacaagaatacattcttgtaaatgaatgtattgaacattagttatggagtatttttcttagctacttgatattagatattgatcagtggaataaagttattgaacagcttggaacaccatgtcctgaattcatgaagaaactgcaaccaacagtaaggacttacgttgaaaacagacctaaatatgctggatatagctttgagaaactcttccctgatgtccttttcccagctgactcagaacacaacaaacttaaagccagtcaggcaagggatttgttatccaaaatgctggtaatagatgcatctaaaaggatctctgtagatgaagctctccaacacccgtacatcaatgtctggtatgatccttctgaagcagaagctgtaagttattttcttaatgtttacagaacatattgcattcttagagttagaatgacagttaggtttggaggagaccttttaattttaaataaaaatgtagatacatgatgatgatgtttttctgtttcttcatgaagactacgtcaaataaactaatgaacatattcgagcccctcctacacaaaataaagttacctcccactgttttttgcaatcttgcctggatacctaaccagagaactaggatgttgaatgctctgggggaacatcctaactcaggtataaaacaaattactgtatccaaaggaaaacagaattctgtgatctgtgatataaataaaatgtggcaatttcaagagctagaagaaaagaaaaaagacagttaaacattttatttcctgcaatgaaggagtcttcctaaactattatgtctgtataagtaagttgatgattgatcagtcttgatctaatgatatatttttataagtcatctgtgtggctaatatttcaaataactacagagttaaaatactcccagcatactgacttggttattattgccttgtgtttttcagccaccaccaaagatccctgacaagcagttagatgaaagggaacacacaatagaagagtggaaagaattgatatataaggaagttatggacttggaggagagaaccaagaatggagttatacgggggcagccctctcctttagcacaggtgcagcagtgatcaatggctctcagcatccatcatcatcgtcgtctgtcaatgatgtgtcttcaatgtcaacagatccgactttggcctctgatacagacagcagtctagaagcagcagctgggcctctgggctgctgtagatgactacttgggccatcggggggtgggagggatggggagtcggttagtcattgatagaactactttgaaaacaattcagtggtcttatttttgggtgatttttcaaaaaatgtagaattcattttgtagtaaagtagtttattttttttaatttcaagtgatgtaatttaaaacctaagttgtgtttcaaaacagcaacaaaactgtattgtattttttttgctgtaattaactgtataatgtaaacctaattattttatcatggtttaaattttttgcatatttgctttatcttatgctgctgatttttttaactgaatttgtaagattttgtttatcaaagcaactattatgtggtgacttgcctatatcatgaattatttaagatttttatagttttttttaattagaatttatttcagatgttttgttcatgatactatccttcagggttatgtgcttatcaatgaaataaccccagaggagtgagggaaaataacgtgtagccagttatattcaggaataactactgtaaatgatgaacgtgttaggagacctccaatatttgctacttgccaatcctaatttagttacaagaattggtaggcaatcctacttaattttggcaaaagccccgtcatctaaatggcagaataactcagagcatgtctttgaagatgctgggcgtctaccaccaccttatgtccccaccctacccaacaaaaataagtaaaaagaatatggtgtattctacaaatttgtggcatgctcaaagtttatgatcacataaaggcaagaggatacttcatgaataatacatttcaatgcaaataaacagatggttcacttctactagctatgagcctgtttttgtatacactgagttaatctactcaggctgtaggtcccagcaatgttctagagtctggtctttccctttcctgcagcttcgggtccttggacctttcctgtttcctattacttggagtgtctgtcagttgagcaccagttgttctggtgtttcatttgattctacttgtagcataatcatttatacgagctattgggaggttccaaaccctacctagatttgtgtaggtgatgtatcaaatgagcaatataccgttcatctgaaaatagtagcacacagccatatataggatatcattttctaaggactgtttcttcacattgagcagagcaggcataaatggtggttatttagtctaagtcttttatttttttatacctgattttcaacataacacgcaatgtggatgtcgagtagtgttaagaatggtgctgctcctgacaagtgtatgttaactgtttacattttctatctgtagaattatttctctattactgaacttttcctaagtaaaatgtctttgaagtctc

SEQ ID NO: 437733 - DNA, 1930 bp, Homo sapiens
cgcggtgacggcccgcgtctctgttactcagccgagcggccgaggccggacgacgcggcttggattgcggagccgcgagcagcgctgggtaacggccgcggcgaccaccccggacggcccctgtccccgctggcgggcttccctgtcgccgttcgctgcgctgccggtcttgcagccttacagtcatttgtaatggttacctcagattcccctgctgtggttaacgttaaacctaggaggtcagatgctctaagtgaacatgtttagtgctgtgcctgacaaaagcaagcaatcaaaatgggacttccttgagggcaggcctgtcttgcatctgtttctccaccacctagcctggaatataactggccttatgggtttctagaaggaaaatcacagaggtaaagcatcatttcatcacatcctgtcaaggcttcttggtgaatttttggatgaagccattaaattaattgcttgccatcatgagcagaagcaagcgtgacaacaatttttatagtgtagagattggagattctacattcacagtcctgaaacgatatcagaatttaaaacctataggctcaggagctcaaggaatagtatgcgcagcttatgatgccattcttgaaagaaatgttgcaatcaagaagctaagccgaccatttcagaatcagactcatgccaagcgggcctacagagagctagttcttatgaaatgtgttaatcacaaaaatataattggccttttgaatgttttcacaccacagaaatccctagaagaatttcaagatgtttacatagtcatggagctcatggatgcaaatctttgccaagtgattcagatggagctagatcatgaaagaatgtcctaccttctctatcagatgctgtgtggaatcaagcaccttcattctgctggaattattcatcgggacttaaagcccagtaatatagtagtaaaatctgattgcactttgaagattcttgacttcggtctggccaggactgcaggaacgagttttatgatgacgccttatgtagtgactcgctactacagagcacccgaggtcatccttggcatgggctacaaggaaaacggaggaagaatgggaaaaggcatattcacaaggttacaataaggtgcctgtgagatataaaatttataactgccacatcctttcttaggaatttttaaatttctattttcttgtaatatgaatacaagaatacattcttgtaaatgaatgtattgaacattagttatggagtatttttcttagctacttgatattagatattgatcagtggaataaagttattgaacagcttggaacaccatgtcctgaattcatgaagaaactgcaaccaacagtaaggacttacgttgaaaacagacctaaatatgctggatatagctttgagaaactcttccctgatgtccttttcccagctgactcagaacacaacaaacttaaagccagtcaggcaagggatttgttatccaaaatgctggtaatagatgcatctaaaaggatctctgtagatgaagctctccaacacccgtacatcaatgtctggtatgatccttctgaagcagaagctccaccaccaaagatccctgacaagcagttagatgaaagggaacacacaatagaagagtggaaaggtacattcgtcagattcttagagggaaaactgtgaaggagcttctggtttttatatggtgatttattatcatgttagagaaatttgtgactttaatatgcataaccgaaatgtggtaatattaatatttttacataagtagaaagtaagtctgcttccttccttaacttaatcttaagttcccaagtttcccaccccagacacagacacattagtgctctgtctcatatttttttccatggtttgtgaatacacaaatgtgtttagt

SEQ ID NO: 437734 - DNA, 3209 bp, Homo sapiens
ggcgggacaaccgcggcgcggctcggcgctccgggcctggcgttgtggcgccgcagcccttgccaccttccctgcacctgccctgcccggcctcatgtaccgcgcgctgtacgcgttccgctcggcggagcccaacgcgctggcgttcgccgcgggcgagaccttcctggtgctagagcgaagcagcgcgcactggtggctggccgcgcgggcgcgcagtggtgagacgggctacgtgccgccagcctacctgcgccgcctgcagggcctggagcaggatgtcctccaggccattgaccgggccatcgaggctgtacacaacacagccatgcgggatggtggcaagtacagcctggaacagcgtggagtcctccagaagctgatccaccaccggaaagagaccctgtcacgcagaggcccttcagcctccagtgttgcagttatgacctcatcaaccagtgaccaccacttggatgctgctgcagccaggcagcccaatggggtgtgtcgagctgggttcgagcggcagcacagcctacccagttctgagcatcttggggcagatggaggcctctaccagatcccacttccatcttcccagatcccaccacagcctcgccgagcagcacccaccacaccgcccccaccagtgaagcgccgagaccgcgaggccctgatggcctctgggagtggtggccacaacaccatgccctccgggggtaactctgtgtccagcggctcctcagtcagcagcacctccctggacacgctctataccagctccagcccatctgaaccaggctccagctgctcacccacacccccacctgtgccccgccgaggcacccacaccaccgtgtcccaagtccagccccctccctccaaggcatcagcacctgaaccccctgcagaagaagaagtggcaactggtacaacctcagcctctgatgacctggaagccctgggtacactgagcctggggaccacagaggagaaggcagcagctgaggcggctgtgcccaggaccattggggccgagctgatggagctggtgcggagaaacactggcctgagccacgaattatgccgggtggccatcggcatcatagtgggtcacatccaggcctcggtgccggccagctcaccagtcatggagcaggtcctcctctcactcgtagagggcaaggacctcagcatggccctgccctcagggcaggtctgccacgaccagcagaggctggaggtgatctttgcagacctggctcgccggaaggacgacgcccagcagcgcagttgggcactatatgaggatgagggtgtcatccgctgctacctagaggagctgctgcatattctgactgatgcagaccctgaagtttgcaagaaaatgtgcaagagaaacgagttcgagtctgtcctggccttggtggcctattaccaaatggaacaccgagcatcactgcggctgctgctcctcaagtgctttggcgccatgtgcagcctggatgcagccatcatctccacgcttgtgtcatccgtgctgcctgtagagctggcgagggacatgcagacagacacgcaggaccaccagaaactctgttactctgccctcatcctggccatggtcttctccatgggagaggcagtgccctatgcacactatgagcacctgggcacgcctttcgcccagttcctactgaacatcgtcgaggatgggctgcccttggacaccacagagcagctgccggacctctgcgtgaacctgcttctggctctcaacctgcacctgccagctgctgaccagaatgtcatcatggctgccctgagcaaacacgccaatgtcaagatcttctccgagaagctgttgttgctcctgaacagaggggatgaccctgtgcgcatcttcaaacatgagccacagccaccacactctgtcctcaagttcctgcaggacgtgtttggcagcccggccacagctgccatcttctaccacacagacatgatggctctcattgacatcactgtgcggcacatcgcagacctgtcaccaggagacaagggaccgttcggggcgggccagaggccttggccaggagttcctcgcctgttagaaccaggatccaccccatcgcgggagccgcaccctgtggagcgttctggggtcccggccctgacctcttcctgggcttcgggatgcccgcgtcctctgcacccggcgctgcagctcgttatcgattccgcctttggaggccggtccgtatagtgtacctcccggactctctcacggttagccggcaacccgcggagccccctcccccatgcgatgagtccgccgtgaggggcggggcctcccattgtgccaatagaaacaatgactgaccgattggagtgctccgcgttcacccctcgcctccgctcctctcgtgacgtctgttgcgccaggtccacccattggcctggcgagaccggcgcgtgccaggagttacgcagggagagctggaatgcaccgagggtggggggaggactgagtttctgtgtcagtcccttcaaggggttaaggcatgcggtcgtgacggacgaggggcggggacccgaagaagcggggcccgcagccatggggcaacgccgggctccacgtggcatcccagagcactcgggactcgcagcctgggagggggtgcagcctccagtgaaggggccccgagcccgggagactgctggggaccagcaaggcagggaagaatttggcctctgctcccgcctcgggagggtcatctctggtccctgctccgcaggggcgatccaaacaagcaggtggtcgcgacatgtttcataaaactagctgatgggatagttaaagctattgttcggggtgctggcaccccagacccctctccagccatcgtcccctctaccccaggatttcacacagtaccccctcccagagctatgagaacgctcatgggcaccaaaatttcagaccaaaatccgggacacggttcagaactagtggtcaggaagggggaacaagagatctggaaggacagaaaaaggctgggagacggagctgggacagcgccctagaaggagggaggtgggtgaaggcggcgaccgaaagtggggagggcggacccaacgacggcgaaccttcgcgctctgttcagcaccaggagcaacgctcacgtcctcaataaagatggcggcaacac

SEQ ID NO: 437735 - DNA, 463 bp, Homo sapiens
ggcgtggtggttcacgcctgtaatcccagcactttgagagcccgaggtgggtggatcacttgaagtttggagtttgaaaccagcctggccaacatggcgaaaccccgtctctgtatcctgggcctcagcaagccatgcccctggggtgaggggaggcatctcccaccagctctattctttgccttagctttgcagtgagtgctgctcatgtcctcccctccacccgcacatgggggtcgctgcccttcactcctacccccagaggccttggccaagctgctgctttgaaagcgggatcttggagacaggccatccatcctggagcctcatggaacaggatgatggcactgagaaagccaatgaccgaatctcttttctctgtaaaaatgtagactgaaaagccatgtgtattttcctatgtgctgtagctctcctttggaaataaatcacaggcatctggaaa

SEQ ID NO: 437736 - DNA, 1074 bp, Homo sapiens
ccggcactcggtgaagacaggtggtgaggcctagacacaccgagagccgggccccgcggggcttccaagtgtcggatcagcaagatcatcctttcgaggtcgccgtccttgcaattagtagatgggacccactgccccagggcggtaggggcgcacccgctacgagcggagcgcgctttcaccgggagggcctggagcaggatgtcctccaggccattgaccgggccatcgaggctgtacacaacacagccatgcgggatggtggcaagtacagcctggaacagcgtggagtcctccagtgagtgttgaggggagtgaagtgggacctcccggaagctgatccaccaccggaaagagaccctgtcacgcagaggcccttcagcctccagtgttgcagttatgacctcatcaaccagtgaccaccacttggatgctgctgcagccaggcagcccaatggggtgtgtcgagctgggttcgagcggcagcacagcctacccagttctgagcatcttggggcagatggaggcctctaccagatcccacttccatcttcccagatcccaccacagcctcgccgagcagcacccaccacaccgcccccaccagtgaagcgccgagaccgcgaggccctgatggcctctgggagtggtggcaaaaaccatgccctcaggggtaatctgggtccacggctcctcagtcagcagcacctcctggaaagccttatacagctccagcccattcgacaagatccaggtgctcaaccacacccccttggtcccccgaccacacccaccgtttcacagcaatccctccactagtatcaccatgaccccgtgggccagggagatggcaacagtgatacaccgtctcctaggcacggaaacacggtgtcacgtcgccgcggcatccagcgccgccatagggcgctgcgtgacactcgactcgtcgtaactaagccccgacccacagcctcagaggaacgagcaacacctagcgtgtcctgagtgcgccagctacgtagcagacagcacgagacaacggcccgcaccgcacgcgatggcgtactcaggcgc

SEQ ID NO: 437737 - DNA, 789 bp, Homo sapiens
ggatttaccgttctgcaacaacggactggtacatacatggaacaggatgatggcactgagaaagccaatgaccgaatctcttttctctgtaaaaatgtagactgaaaagccatgtgtattttcctatgtgctgtagctctcctttggaaataaatcacaggcatctggaaaaaaaaaaaaaaaaaaaaaaaaaaaaaaaaaaaaaaaaaaaaaaaaaaaaaaaaaaaaaaaaagacgagggagcagccgagaaaaatagtgttccaagaagaaaggagacaaagatagataaagagacaaaccagcaagatatgttttgtaggaaaaaaggggcgcacccaaaataggagagctactaatataaaacgccaacgcacaccggcgcgcgcgtgtaataacacgccgtgtgtagtcgaaacaaaagcggccaatggtgaccttcttgggagacagcccccaccatctgtggcggggagacacagatgggagaacaaccatccaactgagagaagatgatttaagagcgctcgcggaagggagaaaacattaaaaataataatggaggggggatatagtggttggagtacaaccacacggacgagtattattgtagaggagctgggtaaaaaatttgtctaactacgagatatattaatgattggaagaaaatttattataaccagcggagtgttgctagtaaaaaacgagataaattaagtattgatgtacaatatgagaagtacaaacaagttaatatcagtaggtagaaatatgacaaagggggacacg

SEQ ID NO: 437738 - DNA, 2942 bp, Homo sapiens
ggcgggacaaccgcggcgcggctcggcgctccgggcctggcgttgtggcgccgcagcccttgccaccttccctgcacctgccctgcccggcctcatgtaccgcgcgctgtacgcgttccgctcggcggagcccaacgcgctggcgttcgccgcgggcgagaccttcctggtgctagagcgaagcagcgcgcactggtggctggccgcgcgggcgcgcagtggtgagacgggctacgtgccgccagcctacctgcgccgcctgcagggcctggagcaggatgtcctccaggccattgaccgggccatcgaggctgtacacaacacagccatgcgggatggtggcaagtacagcctggaacagcgtggagtcctccagaagctgatccaccaccggaaagagaccctgtcacgcagaggcccttcagcctccagtgttgcagttatgacctcatcaaccagtgaccaccacttggatgctgctgcagccaggcagcccaatggggtgtgtcgagctgggttcgagcggcagcacagcctacccagttctgagcatcttggggcagatggaggcctctaccagatcccaccacagcctcgccgagcagcacccaccacaccgcccccaccagtgaagcgccgagaccgcgaggccctgatggcctctgggagtggtggccacaacaccatgccctccgggggtaactctgtgtccagcggctcctcagtcagcagcacctccctggacacgctctataccagctccagcccatctgaaccaggctccagctgctcacccacacccccacctgtgccccgccgaggcacccacaccaccgtgtcccaagtccagccccctccctccaaggcatcagcacctgaaccccctgcagaagaagaagtggcaactggtacaacctcagcctctgatgacctggaagccctgggtacactgagcctggggaccacagaggagaaggcagcagctgaggcggctgtgcccaggaccattggggccgagctgatggagctggtgcggagaaacactggcctgagccacgaattatgccgggtggccatcggcatcatagtgggtcacatccaggcctcggtgccggccagctcaccagtcatggagcaggtcctcctctcactcgtagagggcaaggacctcagcatggccctgccctcagggcaggtctgccacgaccagcagaggctggaggtgatctttgcagacctggctcgccggaaggacgacgcccagcagcgcagttgggcactatatgaggatgagggtgtcatccgctgctacctagaggagctgctgcatattctgactgatgcagaccctgaagtttgcaagaaaatgtgcaagagaaacgagttcgagtctgtcctggccttggtggcctattaccaaatggaacaccgagcatcactgcggctgctgctcctcaagtgctttggcgccatgtgcagcctggatgcagccatcatctccacgcttgtgtcatccgtgctgcctgtagagctggcgagggacatgcagacagacacgcaggaccaccagaaactctgttactctgccctcatcctggccatggtcttctccatgggagaggcagtgccctatgcacactatgagcacctgggcacgcctttcgcccagttcctactgaacatcgtcgaggatgggctgcccttggacaccacagagcagctgccggacctctgcgtgaacctgcttctggctctcaacctgcacctgccagctgctgaccagaatgtcatcatggctgccctgagcaaacacgccaatgtcaagatcttctccgagaagctgttgttgctcctgaacagaggggatgaccctgtgcgcatcttcaaacatgagccacagccaccacactctgtcctcaagttcctgcaggacgtgtttggcagcccggccacagctgccatcttctaccacacagacatgatggctctcattgacatcactgtgcggcacatcgcagacctgtcaccaggagacaagctgcgcatggagtacctctccctgatgcatgctatagtccgcaccacaccctacctgcagcaccgccaccggctacccgacctgcaggccatactgcgacgcatcctgaatgaggaggagacctcaccccagtgccagatggaccgcatgattgtccgagagatgtgcaaggaattcctggtgctgggggaggctcccagctagcaccttgctgtcctcccttccctgcagctccagtcagtgtgcaggggactcaggggcttggccctaagaatgttttgcactgacagtgggaggggataaggtggcagaaggaacctgagcaggacccccacctgaagtagaacttaagagaggggccaagtgtaggattggggaccatggtctgggagctgttctggggcagggggaatatgcaagctaaagcccctctataccctggtaggcttcctcttcagcatgcccccctcttcaccccacacccatgtgtacactcagagtcctgctgccgctccaggctggaccagacccccatccccacccctcctggtctgtatcctgggcctcagcaagccatgcccctggggtgaggggaggcatctcccaccagctctattctttgccttagctttgcagtgagtgctgctcatgtcctcccctccacccgcacatgggggtcgctgcccttcactcctacccccagaggccttggccaagctgctgctttgaaagcgggatcttggagacaggccatccatcctggagcctcatggaacaggatgatggcactgagaaagccaatgaccgaatctcttttctctgtaaaaatgtagactgaaaagccatgtgtattttcctatgtgctgtagctctcctttggaaataaatcacaggcatctggaaa

SEQ ID NO: 437739 - DNA, 3352 bp, Homo sapiens
ggcgggacaaccgcggcgcggctcggcgctccgggcctggcgttgtggcgccgcagcccttgccaccttccctgcacctgccctgcccggcctcatgtaccgcgcgctgtacgcgttccgctcggcggagcccaacgcgctggcgttcgccgcgggcgagaccttcctggtgctagagcgaagcagcgcgcactggtggctggccgcgcgggcgcgcagtggtgagacgggctacgtgccgccagcctacctgcgccgcctgcagggcctggagcaggatgtcctccaggccattgaccgggccatcgaggctgtacacaacacagccatgcgggatggtggcaagtacagcctggaacagcgtggagtcctccagaagctgatccaccaccggaaagagaccctgtcacgcagaggcccttcagcctccagtgttgcagttatgacctcatcaaccagtgaccaccacttggatgctgctgcagccaggcagcccaatggggtgtgtcgagctgggttcgagcggcagcacagcctacccagttctgagcatcttggggcagatggaggcctctaccagatcccaccacagcctcgccgagcagcacccaccacaccgcccccaccagtgaagcgccgagaccgcgaggccctgatggcctctgggagtggtggccacaacaccatgccctccgggggtaactctgtgtccagcggctcctcagtcagcagcacctccctggacacgctctataccagctccagcccatctgaaccaggctccagctgctcacccacacccccacctgtgccccgccgaggcacccacaccaccgtgtcccaagtccagccccctccctccaaggcatcagcacctgaaccccctgcagaagaagaagtggcaactggtacaacctcagcctctgatgacctggaagccctgggtacactgagcctggggaccacagaggagaaggcagcagctgaggcggctgtgcccaggaccattggggccgagctgatggagctggtgcggagaaacactggcctgagccacgaattatgccgggtggccatcggcatcatagtgggtcacatccaggcctcggtgccggccagctcaccagtcatggagcaggtcctcctctcactcgtagagggcaaggacctcagcatggccctgccctcagggcaggtctgccacgaccagcagaggctggaggtgatctttgcagacctggctcgccggaaggacgacgcccagcagcgcagttgggcactatatgaggatgagggtgtcatccgctgctacctagaggagctgctgcatattctgactgatgcagaccctgaagtttgcaagaaaatgtgcaagagaaacgagttcgagtctgtcctggccttggtggcctattaccaaatggaacaccgagcatcactgcggctgctgctcctcaagtgctttggcgccatgtgcagcctggatgcagccatcatctccacgcttgtgtcatccgtgctgcctgtagagctggcgagggacatgcagacagacacgcaggaccaccagaaactctgttactctgccctcatcctggccatggtcttctccatgggagaggcagtgccctatgcacactatgagcacctgggcacgcctttcgcccagttcctactgaacatcgtcgaggatgggctgcccttggacaccacagagcagctgccggacctctgcgtgaacctgcttctggctctcaacctgcacctgccagctgctgaccagaatgtcatcatggctgccctgagcaaacacgccaatgtcaagatcttctccgagaagctgttgttgctcctgaacagaggggatgaccctgtgcgcatcttcaaacatgagccacagccaccacactctgtcctcaagttcctgcaggacgtgtttggcagcccggccacagctgccatcttctaccacacagacatgatggctctcattgacatcactgtgcggcacatcgcagacctgtcaccaggagacaagctgcgcatggagtacctctccctgatgcatgctatagtccgcaccacaccctacctgcagcaccgccaccggctacccgacctgcaggccatactgcgacgcatcctgaatgaggaggagacctcaccccagtgccagatggaccgcatgattgtccgagagatgtgcaaggaattcctggtgctgggggaggctcccagctagcaccttgctgtcctcccttccctgcagctccagtcagtgtgcaggggactcaggggcttggccctaagaatgttttgcactgacagtgggaggggataaggtggcagaaggaacctgagcaggacccccacctgaagtagaacttaagagaggggccaagtgtaggattggggaccatggtctgggagctgttctggggcagggggaatatgcaagctaaagcccctctataccctggtaggcttcctcttcagcatgcccccctcttcaccccacacccatgtgtacactcagagtcctgctgccgctccaggctggaccagacccccatccccacccctcctggtctgtatcctgggcctcagcaagccatgcccctggggtgaggggaggcatctcccaccagctctattctttgccttagctttgcagtgagtgctgctcatgtcctcccctccacccgcacatgggggtcgctgcccttcactcctacccccagaggccttggccaagctgctgctttgaaagcgggatcttggagacaggccatccatcctggagcctcatggaacaggatgatggcactgagaaagccaatgaccgaatctcttttctctgtaaaaatgtagactgaaaagccatgtgtattttcctatgtgctgtagctctcctttggaaataaatcacaggcatctggaaaaaaaaaaaaaaaaaaaaaaaaaaaaaaaaaaaaaccccggggacaaaattaagacggggggccggaacaaaagggctaataaaaaggggcccatgggtcccaaagcggtgtttcccggaccccatttttttgtcacacggggggaaaacccggcgccgggcccccccataatggaggagcagccacaaaaaactcccaaagaagcccgggtaacccgccgcaataaaaaaaccgcgccaatcaagcacgcagagaagaacaaagcgagcacgagcagaaagaggaagataatagacaaacaaaacggaagtaacctatgaacaaccactaaatgagcccgaataacaaaggaagccgccagcaaacaaagcacacagacaacagcgaagttagtaggagcaacaaagacc

SEQ ID NO: 437740 - DNA, 2861 bp, Homo sapiens
ggcgggacaaccgcggcgcggctcggcgctccgggcctggcgttgtggcgccgcagcccttgccaccttccctgcacctgccctgcccggcctcatgtaccgcgcgctgtacgcgttccgctcggcggagcccaacgcgctggcgttcgccgcgggcgagaccttcctggtgctagagcgaagcagcgcgcactggtggctggccgcgcgggcgcgcagtggtgagacgggctacgtgccgccagcctacctgcgccgcctgcagggcctggagcaggatgtcctccaggccattgaccgggccatcgaggctgtacacaacacagccatgcgggatggtggcaagtacagcctggaacagcgtggagtcctccagaagctgatccaccaccggaaagagaccctgtcacgcagaggcccttcagcctccagtgttgcagttatgacctcatcaaccagtgaccaccacttggatgctgctgcagccaggcagcccaatggggtgtgtcgagctgggttcgagcggcagcacagcctacccagttctgagcatcttggggcagatggaggcctctaccagatcccaccacagcctcgccgagcagcacccaccacaccgcccccaccagtgaagcgccgagaccgcgaggccctgatggcctctgggagtggtggccacaacaccatgccctccgggggtaactctgtgtccagcggctcctcagtcagcagcacctccctggacacgctctataccagctccagcccatctgaaccaggctccagctgctcacccacacccccacctgtgccccgccgaggcacccacaccaccgtgtcccaagtccagccccctccctccaaggcatcagcacctgaaccccctgcagaagaagaagtggcaactggtacaacctcagcctctgatgacctggaagccctgggtacactgagcctggggaccacagaggagaaggcagcagctgaggcggctgtgcccaggaccattggggccgagctgatggagctggtgcggagaaacactggcctgagccacgaattatgccgggtggccatcggcatcatagtgggtcacatccaggcctcggtgccggccagctcaccagtcatggagcaggtcctcctctcactcgtagagggcaaggacctcagcatggccctgccctcagggcaggtctgccacgaccagcagaggctggaggtgatctttgcagacctggctcgccggaaggacgacgcccagcagcgcagttgggcactatatgaggatgagggtgtcatccgctgctacctagaggagctgctgcatattctgactgatgcagaccctgaagtttgcaagaaaatgtgcaagagaaacgagttcgagtctgtcctggccttggtggcctattaccaaatggaacaccgagcatcactgcggctgctgctcctcaagtgctttggcgccatgtgcagcctggatgcagccatcatctccacgcttgtgtcatccgtgctgcctgtagagctggcgagggacatgcagacagacacgcaggagcacctgggcacgcctttcgcccagttcctactgaacatcgtcgaggatgggctgcccttggacaccacagagcagctgccggacctctgcgtgaacctgcttctggctctcaacctgcacctgccagctgctgaccagaatgtcatcatggctgccctgagcaaacacgccaatgtcaagatcttctccgagaagctgttgttgctcctgaacagaggggatgaccctgtgcgcatcttcaaacatgagccacagccaccacactctgtcctcaagttcctgcaggacgtgtttggcagcccggccacagctgccatcttctaccacacagacatgatggctctcattgacatcactgtgcggcacatcgcagacctgtcaccaggagacaagctgcgcatggagtacctctccctgatgcatgctatagtccgcaccacaccctacctgcagcaccgccaccggctacccgacctgcaggccatactgcgacgcatcctgaatgaggaggagacctcaccccagtgccagatggaccgcatgattgtccgagagatgtgcaaggaattcctggtgctgggggaggctcccagctagcaccttgctgtcctcccttccctgcagctccagtcagtgtgcaggggactcaggggcttggccctaagaatgttttgcactgacagtgggaggggataaggtggcagaaggaacctgagcaggacccccacctgaagtagaacttaagagaggggccaagtgtaggattggggaccatggtctgggagctgttctggggcagggggaatatgcaagctaaagcccctctataccctggtaggcttcctcttcagcatgcccccctcttcaccccacacccatgtgtacactcagagtcctgctgccgctccaggctggaccagacccccatccccacccctcctggtctgtatcctgggcctcagcaagccatgcccctggggtgaggggaggcatctcccaccagctctattctttgccttagctttgcagtgagtgctgctcatgtcctcccctccacccgcacatgggggtcgctgcccttcactcctacccccagaggccttggccaagctgctgctttgaaagcgggatcttggagacaggccatccatcctggagcctcatggaacaggatgatggcactgagaaagccaatgaccgaatctcttttctctgtaaaaatgtagactgaaaagccatgtgtattttcctatgtgctgtagctctcctttggaaataaatcacaggcatctggaaa

SEQ ID NO: 437741 - DNA, 3027 bp, Homo sapiens
ggcgggacaaccgcggcgcggctcggcgctccgggcctggcgttgtggcgccgcagcccttgccaccttccctgcacctgccctgcccggcctcatgtaccgcgcgctgtacgcgttccgctcggcggagcccaacgcgctggcgttcgccgcgggcgagaccttcctggtgctagagcgaagcagcgcgcactggtggctggccgcgcgggcgcgcagtggtgagacgggctacgtgccgccagcctacctgcgccgcctgcagggcctggagcaggatgtcctccaggccattgaccgggccatcgaggctgtacacaacacagccatgcgggatggtggcaagtacagcctggaacagcgtggagtcctccagaagctgatccaccaccggaaagagaccctgtcacgcagaggcccttcagcctccagtgttgcagttatgacctcatcaaccagtgaccaccacttggatgctgctgcagccaggcagcccaatggggtgtgtcgagctgggttcgagcggcagcacagcctacccagttctgagcatcttggggcagatggaggcctctaccagatcccaccacagcctcgccgagcagcacccaccacaccgcccccaccagtgaagcgccgagaccgcgaggccctgatggcctctgggagtggtggccacaacaccatgccctccgggggtaactctgtgtccagcggctcctcagtcagcagcacctccctggacacgctctataccagctccagcccatctgaaccaggctccagctgctcacccacacccccacctgtgccccgccgaggcacccacaccaccgtgtcccaagtccagccccctccctccaaggcatcagcacctgaaccccctgcagaagaagaagtggcaactggtacaacctcagcctctgatgacctggaagccctgggtacactgagcctggggaccacagaggagaaggcagcagctgaggcggctgtgcccaggaccattggggccgagctgatggagctggtgcggagaaacactggcctgagccacgaattatgccgggtggccatcggcatcatagtgggtcacatccaggcctcggtgccggccagctcaccagtcatggagcaggtcctcctctcactcgtagagggcaaggacctcagcatggccctgccctcagggcaggtctgccacgaccagcagaggctggaggtgatctttgcagacctggctcgccggaaggacgacgcccagcagcgcagttgggcactatatgaggatgagggtgtcatccgctgctacctagaggagctgctgcatattctgactgatgcagaccctgaagtttgcaagaaaatgtgcaagagaaacgagttcgagtctgtcctggccttggtggcctattaccaaatggaacaccgagcatcactgcggctgctgctcctcaagtgctttggcgccatgtgcagcctggatgcagccatcatctccacgcttgtgtcatccgtgctgcctgtagagctggcgagggacatgcagacagacacgcaggaccaccagaaactctgttactctgccctcatcctggccatggtcttctccatgggagaggcagtgccctatgcacactatgagcacctgggcacgcctttcgcccagttcctactgaacatcgtcgaggatgggctgcccttggacaccacagagcagctgccggacctctgcgtgaacctgcttctggctctcaacctgcacctgccaggtggggtggggcctggctgggcggtggctgagcacatggtggctctcaggctcagcaccctgtctatacccatgtccttccttagctgctgaccagaatgtcatcatggctgccctgagcaaacacgccaatgtcaagatcttctccgagaagctgttgttgctcctgaacagaggggatgaccctgtgcgcatcttcaaacatgagccacagccaccacactctgtcctcaagttcctgcaggacgtgtttggcagcccggccacagctgccatcttctaccacacagacatgatggctctcattgacatcactgtgcggcacatcgcagacctgtcaccaggagacaagctgcgcatggagtacctctccctgatgcatgctatagtccgcaccacaccctacctgcagcaccgccaccggctacccgacctgcaggccatactgcgacgcatcctgaatgaggaggagacctcaccccagtgccagatggaccgcatgattgtccgagagatgtgcaaggaattcctggtgctgggggaggctcccagctagcaccttgctgtcctcccttccctgcagctccagtcagtgtgcaggggactcaggggcttggccctaagaatgttttgcactgacagtgggaggggataaggtggcagaaggaacctgagcaggacccccacctgaagtagaacttaagagaggggccaagtgtaggattggggaccatggtctgggagctgttctggggcagggggaatatgcaagctaaagcccctctataccctggtaggcttcctcttcagcatgcccccctcttcaccccacacccatgtgtacactcagagtcctgctgccgctccaggctggaccagacccccatccccacccctcctggtctgtatcctgggcctcagcaagccatgcccctggggtgaggggaggcatctcccaccagctctattctttgccttagctttgcagtgagtgctgctcatgtcctcccctccacccgcacatgggggtcgctgcccttcactcctacccccagaggccttggccaagctgctgctttgaaagcgggatcttggagacaggccatccatcctggagcctcatggaacaggatgatggcactgagaaagccaatgaccgaatctcttttctctgtaaaaatgtagactgaaaagccatgtgtattttcctatgtgctgtagctctcctttggaaataaatcacaggcatctggaaa

SEQ ID NO: 437742 - DNA, 2659 bp, Homo sapiens
ggcgggacaaccgcggcgcggctcggcgctccgggcctggcgttgtggcgccgcagcccttgccaccttccctgcacctgccctgcccggcctcatgtaccgcgcgctgtacgcgttccgctcggcggagcccaacgcgctggcgttcgccgcgggcgagaccttcctggtgctagagcgaagcagcgcgcactggtggctggccgcgcgggcgcgcagtggtgagacgggctacgtgccgccagcctacctgcgccgcctgcagggcctggagcaggatgtcctccaggccattgaccgggccatcgaggctgtacacaacacagccatgcgggatggtggcaagtacagcctggaacagcgtggagtcctccagaagctgatccaccaccggaaagagaccctgtcacgcagaggcccttcagcctccagtgttgcagttatgacctcatcaaccagtgaccaccacttggatgctgctgcagccaggcagcccaatggggtgtgtcgagctgggttcgagcggcagcacagcctacccagttctgagcatcttggggcagatggaggcctctaccagatcccaccacagcctcgccgagcagcacccaccacaccgcccccaccagtgaagcgccgagaccgcgaggccctgatggcctctgggagtggtggccacaacaccatgccctccgggggtaactctgtgtccagcggctcctcagtcagcagcacctccctggacacgctctataccagctccagcccatctgaaccaggctccagctgctcacccacacccccacctgtgccccgccgaggcacccacaccaccgtgtcccaagtccagccccctccctccaaggcatcagcacctgaaccccctgcagaagaagaagtggcaactggtacaacctcagcctctgatgacctggaagccctgggtacactgagcctggggaccacagaggagaaggcagcagctgaggcggctgtgcccaggaccattggggccgagctgatggagctggtgcggagaaacactggcctgagccacgaattatgccgggtggccatcggcatcatagtgggtcacatccaggcctcggtgccggccagctcaccagtcatggagcaggtcctcctctcactcgtagagggcaaggacctcagcatggccctgccctcagggcaggtctgccacgaccagcagaggctggaggtgatctttgcagacctggctcgccggaaggacgacgcccagcagcgcagttgggcactatatgaggatgagggtgtcatccgctgctacctagaggagctgctgcatattctgactgatgcagaccctgaagtttgcaagaaaatgtgcaagagaaacgagttcgagtctgtcctggccttggtggcctattaccaaatggaacaccgagcatcactgcggctgctgctcctcaagtgctttggcgccatgtgcagcctggatgcagccatcatctccacgcttgtgtcatccgtgctgcctgtagagctggcgagggacatgcagacagacacgcaggaccaccagaaactctgttactctgccctcatcctggccatggtcttctccatgggagaggcagtgccctatgcacactatgagcacctgggcacgcctttcgcccagttcctactgaacatcgtcgaggatgggctgcccttggacaccacagagcagctgccggacctctgcgtgaacctgcttctggctctcaacctgcacctgccagctgctgaccagaatgtcatcatggctgccctgagcaaacacgccaatgtcaagatcttctccgagaagctgttgttgctcctgaacagaggggatgaccctgtgcgcatcttcaaacatgagccacagccaccacactctgtcctcaagttcctgcaggacgtgtttggcagcccggccacagctgccatcttctaccacacagacatgatggctctcattgacatcactgtgcggcacatcgcagacctgtcaccaggagacaagctgcgcatggagtacctctccctgatgcatgctatagtccgcaccacaccctacctgcagcaccgccaccggctacccgacctgcaggccatactgcgacgcatcctgaatgaggaggagacctcaccccagtgccagatggaccgcatgattgtccgagagatgtgcaaggaattcctggtgctgggggaggctcccagctagcaccttgctgtcctcccttccctgcagctccagtcagtgtgcaggggactcaggggcttggccctaagaatgttttgcactgacagtgggaggggataaggtggcagaaggaacctgagcaggacccccacctgaagtagaacttaagagaggggccaagtgtaggattggggaccatggtctgggagctgttctggggcagggggaatatgcaagctaaagcccctctataccctggtaggcttcctcttcagcatgcccccctcttcaccccacacccatgtgtacactcagagtcctgctgccgctccaggctggaccagacccatcccacctctggttgatcctggctcagagcctggcctgggtgacgagttccccagtcattttgcttattgggtggtctttctcctcccg

SEQ ID NO: 437743 - DNA, 364 bp, Homo sapiens
cgaaaggatgcgccgactgattggttgatggtgatgtcatagggaccgttcggggcgggccagaggccttggccaggagttcctcgcctgttagaaccaggatccaccccatcgcgggagccgcaccctgtggagcgttctggggtcccggccctgacctcttcctgggcttcgggatgcccgcgtcctctgcacccggcgctgcagctcgttatcgattccgcctttggaggccggtccgtatagtgtacctcccggactctctcacggttagccggcaacccgcggagccccctcccccatgcgatgagtccgccgtgaggggcggggcctcccattgtgccaatagaaacaatgactgacc

SEQ ID NO: 437744 - DNA, 2963 bp, Homo sapiens
ggcgggacaaccgcggcgcggctcggcgctccgggcctggcgttgtggcgccgcagcccttgccaccttccctgcacctgccctgcccggcctcatgtaccgcgcgctgtacgcgttccgctcggcggagcccaacgcgctggcgttcgccgcgggcgagaccttcctggtgctagagcgaagcagcgcgcactggtggctggccgcgcgggcgcgcagtggtgagacgggctacgtgccgccagcctacctgcgccgcctgcagggcctggagcaggatgtcctccaggccattgaccgggccatcgaggctgtacacaacacagccatgcgggatggtggcaagtacagcctggaacagcgtggagtcctccagaagctgatccaccaccggaaagagaccctgtcacgcagaggcccttcagcctccagtgttgcagttatgacctcatcaaccagtgaccaccacttggatgctgctgcagccaggcagcccaatggggtgtgtcgagctgggttcgagcggcagcacagcctacccagttctgagcatcttggggcagatggaggcctctaccagatcccacttccatcttcccagatcccaccacagcctcgccgagcagcacccaccacaccgcccccaccagtgaagcgccgagaccgcgaggccctgatggcctctgggagtggtggccacaacaccatgccctccgggggtaactctgtgtccagcggctcctcagtcagcagcacctccctggacacgctctataccagctccagcccatctgaaccaggctccagctgctcacccacacccccacctgtgccccgccgaggcacccacaccaccgtgtcccaagtccagccccctccctccaaggcatcagcacctgaaccccctgcagaagaagaagtggcaactggtacaacctcagcctctgatgacctggaagccctgggtacactgagcctggggaccacagaggagaaggcagcagctgaggcggctgtgcccaggaccattggggccgagctgatggagctggtgcggagaaacactggcctgagccacgaattatgccgggtggccatcggcatcatagtgggtcacatccaggcctcggtgccggccagctcaccagtcatggagcaggtcctcctctcactcgtagagggcaaggacctcagcatggccctgccctcagggcaggtctgccacgaccagcagaggctggaggtgatctttgcagacctggctcgccggaaggacgacgcccagcagcgcagttgggcactatatgaggatgagggtgtcatccgctgctacctagaggagctgctgcatattctgactgatgcagaccctgaagtttgcaagaaaatgtgcaagagaaacgagttcgagtctgtcctggccttggtggcctattaccaaatggaacaccgagcatcactgcggctgctgctcctcaagtgctttggcgccatgtgcagcctggatgcagccatcatctccacgcttgtgtcatccgtgctgcctgtagagctggcgagggacatgcagacagacacgcaggaccaccagaaactctgttactctgccctcatcctggccatggtcttctccatgggagaggcagtgccctatgcacactatgagcacctgggcacgcctttcgcccagttcctactgaacatcgtcgaggatgggctgcccttggacaccacagagcagctgccggacctctgcgtgaacctgcttctggctctcaacctgcacctgccagctgctgaccagaatgtcatcatggctgccctgagcaaacacgccaatgtcaagatcttctccgagaagctgttgttgctcctgaacagaggggatgaccctgtgcgcatcttcaaacatgagccacagccaccacactctgtcctcaagttcctgcaggacgtgtttggcagcccggccacagctgccatcttctaccacacagacatgatggctctcattgacatcactgtgcggcacatcgcagacctgtcaccaggagacaagctgcgcatggagtacctctccctgatgcatgctatagtccgcaccacaccctacctgcagcaccgccaccggctacccgacctgcaggccatactgcgacgcatcctgaatgaggaggagacctcaccccagtgccagatggaccgcatgattgtccgagagatgtgcaaggaattcctggtgctgggggaggctcccagctagcaccttgctgtcctcccttccctgcagctccagtcagtgtgcaggggactcaggggcttggccctaagaatgttttgcactgacagtgggaggggataaggtggcagaaggaacctgagcaggacccccacctgaagtagaacttaagagaggggccaagtgtaggattggggaccatggtctgggagctgttctggggcagggggaatatgcaagctaaagcccctctataccctggtaggcttcctcttcagcatgcccccctcttcaccccacacccatgtgtacactcagagtcctgctgccgctccaggctggaccagacccccatccccacccctcctggtctgtatcctgggcctcagcaagccatgcccctggggtgaggggaggcatctcccaccagctctattctttgccttagctttgcagtgagtgctgctcatgtcctcccctccacccgcacatgggggtcgctgcccttcactcctacccccagaggccttggccaagctgctgctttgaaagcgggatcttggagacaggccatccatcctggagcctcatggaacaggatgatggcactgagaaagccaatgaccgaatctcttttctctgtaaaaatgtagactgaaaagccatgtgtattttcctatgtgctgtagctctcctttggaaataaatcacaggcatctggaaa

SEQ ID NO: 437745 - DNA, 1355 bp, Homo sapiens
ggcgggacaaccgcggcgcggctcggcgctccgggcctggcgttgtggcgccgcagcccttgccaccttccctgcacctgccctgcccggcctcatgtaccgcgcgctgtacgcgttccgctcggcggagcccaacgcgctggcgttcgccgcgggcgagaccttcctggtgctagagcgaagcagcgcgcactggtggctggccgcgcgggcgcgcagtggtgagacgggctacgtgccgccagcctacctgcgccgcctgcagggcctggagcaggatgtcctccaggccattgaccgggccatcgaggctgtacacaacacagccatgcgggatggtggcaagtacagcctggaacagcgtggagtcctccagaagctgatccaccaccggaaagagaccctgtcacgcagaggcccttcagcctccagtgttgcagttatgacctcatcaaccagtgaccaccacttggatgctgctgcagccaggcagcccaatggggtgtgtcgagctgggttcgagcggcagcacagcctacccagttctgagcatcttggggcagatggaggcctctaccagatcccacttccatcttcccagatcccaccacagcctcgccgagcagcacccaccacaccgcccccaccagtgaagcgccgagaccgcgaggccctgatggcctctgggagtggtggccacaacaccatgccctccgggggtaactctgtgtccagcggctcctcagtcagcagcacctccctggacacgctctataccagctccagcccatctgaaccaggctccagctgctcacccacacccccacctgtgccccgccgaggcacccacaccaccgtgtcccaagtccagccccctccctccaaggcatcagcacctgaaccccctgcagaagaagaagtggcaactggtacaacctcagcctctgatgacctggaagccctgggtacactgagcctggggaccacagaggagaaggcagcagctgaggcggctgtgcccaggaccattggggccgagctgatggagctggtgcggagaaacactggcctgagccacgaattatgccgggtggccatcggcatcatagtgggtcacatccaggcctcggtgccggccagctcaccagtcatggagcaggtcctcctctcactcgtagagggcaaggtgagggtgggcggcacagcagggccaccctgctacccaccctgttcccaccgtcacacacttgtccagcctgtacattacaggtatttctcaagctctggctctgagctcttactgtgctgggcactggggacgttgagctgatttctgaagcagaaaggaaggacaa

SEQ ID NO: 437746 - DNA, 790 bp, Homo sapiens
ggcgggacaaccgcggcgcggctcggcgctccgggcctggcgttgtggcgccgcagcccttgccaccttccctgcacctgccctgcccggcctcatgtaccgcgcgctgtacgcgttccgctcggcggagcccaacgcgctggcgttcgccgcgggcgagaccttcctggtgctagagcgaagcagcgcgcactggtggctggccgcgcgggcgcgcagtggtgagacgggctacgtgccgccagcctacctgcgccgcctgcaggtctaactgctgtcccctgccccccccagggcctggagcaggatgtcctccaggccattgaccgggccatcgaggctgtacacaacacagccatgcgggatggtggcaagtacagcctggaacagcgtggagtcctccagaagctgatccaccaccggaaagagaccctgtcacgcagaggcccttcagcctccagtgttgcagttatgacctcatcaaccagtgaccaccacttggatgctgctgcagccaggcagcccaatggggtgtgtcgagctgggttcgagcggcagcacagcctacccagttctgagcatcttggggcagatggaggcctctaccagatcccacttccatcttcccagatcccaccacagcctcgccgagcagcacccaccacaccgcccccaccagtgaagcgccgagaccgcgaggccctgatggcctctgggagtggtggcacaaaaccattgcctccgggggtaactctgtgtacaagcgagtcctcagttcagaggcaactcc

SEQ ID NO: 437747 - DNA, 2828 bp, Homo sapiens
agcggagggcgcggggagcagcaggcagagcagcggcccgaggcggccggggacaggcccgcgggctccatgggccgcggctacgccgcccgcgagggctggaaggcactagaagcgccgccggggctgcccagaggccgggtccccgctccactttgcgcaaacttgtttttctgaggtcagcgctgcgagctggctacatcgtcctcttaaggtggcctggggaagttgcggccgacctcccctcgcctccggactccggccgcgcggctactcccgcttcccactggcgagaggctggaggcggcgaaggagtcggggagtggaggcgcgggggtgggggggtgtctgccttttaaccctccccaagaggtcgtgcctctgagccccaaagctgaaggcccctcttgggggtgggtgcgggccggaggggaccgatcctttcagagccgtgccatcttcccagatcccaccacagcctcgccgagcagcacccaccacaccgcccccaccagtgaagcgccgagaccgcgaggccctgatggcctctgggagtggtggccacaacaccatgccctccgggggtaactctgtgtccagcggctcctcagtcagcagcacctccctggacacgctctataccagctccagcccatctgaaccaggctccagctgctcacccacacccccacctgtgccccgccgaggcacccacaccaccgtgtcccaagtccagccccctccctccaaggcatcagcacctgaaccccctgcagaagaagaagtggcaactggtacaacctcagcctctgatgacctggaagccctgggtacactgagcctggggaccacagaggagaaggcagcagctgaggcggctgtgcccaggaccattggggccgagctgatggagctggtgcggagaaacactggcctgagccacgaattatgccgggtggccatcggcatcatagtgggtcacatccaggcctcggtgccggccagctcaccagtcatggagcaggtcctcctctcactcgtagagggcaaggacctcagcatggccctgccctcagggcaggtctgccacgaccagcagaggctggaggtgatctttgcagacctggctcgccggaaggacgacgcccagcagcgcagttgggcactatatgaggatgagggtgtcatccgctgctacctagaggagctgctgcatattctgactgatgcagaccctgaagtttgcaagaaaatgtgcaagagaaacgagttcgagtctgtcctggccttggtggcctattaccaaatggaacaccgagcatcactgcggctgctgctcctcaagtgctttggcgccatgtgcagcctggatgcagccatcatctccacgcttgtgtcatccgtgctgcctgtagagctggcgagggacatgcagacagacacgcaggaccaccagaaactctgttactctgccctcatcctggccatggtcttctccatgggagaggcagtgccctatgcacactatgagcacctgggcacgcctttcgcccagttcctactgaacatcgtcgaggatgggctgcccttggacaccacagagcagctgccggacctctgcgtgaacctgcttctggctctcaacctgcacctgccagctgctgaccagaatgtcatcatggctgccctgagcaaacacgccaatgtcaagatcttctccgagaagctgttgttgctcctgaacagaggggatgaccctgtgcgcatcttcaaacatgagccacagccaccacactctgtcctcaagttcctgcaggacgtgtttggcagcccggccacagctgccatcttctaccacacagacatgatggctctcattgacatcactgtgcggcacatcgcagacctgtcaccaggagacaagctgcgcatggagtacctctccctgatgcatgctatagtccgcaccacaccctacctgcagcaccgccaccggctacccgacctgcaggccatactgcgacgcatcctgaatgaggaggagacctcaccccagtgccagatggaccgcatgattgtccgagagatgtgcaaggaattcctggtgctgggggaggctcccagctagcaccttgctgtcctcccttccctgcagctccagtcagtgtgcaggggactcaggggcttggccctaagaatgttttgcactgacagtgggaggggataaggtggcagaaggaacctgagcaggacccccacctgaagtagaacttaagagaggggccaagtgtaggattggggaccatggtctgggagctgttctggggcagggggaatatgcaagctaaagcccctctataccctggtaggcttcctcttcagcatgcccccctcttcaccccacacccatgtgtacactcagagtcctgctgccgctccaggctggaccagacccccatccccacccctcctggtctgtatcctgggcctcagcaagccatgcccctggggtgaggggaggcatctcccaccagctctattctttgccttagctttgcagtgagtgctgctcatgtcctcccctccacccgcacatgggggtcgctgcccttcactcctacccccagaggccttggccaagctgctgctttgaaagcgggatcttggagacaggccatccatcctggagcctcatggaacaggatgatggcactgagaaagccaatgaccgaatctcttttctctgtaaaaatgtagactgaaaagccatgtgtattttcctatgtgctgtagctctcctttggaaataaatcacaggcatctggaaa

SEQ ID NO: 437748 - DNA, 1877 bp, Homo sapiens
tctagccaccaagcatactctcctgggtcacatccaggcctcggtgccggccagctcaccagtcatggagcaggtcctcctctcactcgtagagggcaaggacctcagcatggccctgccctcagggcaggtctgccacgaccagcagaggctggaggtgatctttgcagacctggctcgccggaaggacgacgcccagcagcgcagttgggcactatatgaggatgagggtgtcatccgctgctacctagaggagctgctgcatattctgactgatgcagaccctgaagtttgcaagaaaatgtgcaagagaaacgagttcgagtctgtcctggccttggtggcctattaccaaatggaacaccgagcatcactgcggctgctgctcctcaagtgctttggcgccatgtgcagcctggatgcagccatcatctccacgcttgtgtcatccgtgctgcctgtagagctggcgagggacatgcagacagacacgcaggaccaccagaaactctgttactctgccctcatcctggccatggtcttctccatgggagaggcagtgccctatgcacactatgagcacctgggcacgcctttcgcccagttcctactgaacatcgtcgaggatgggctgcccttggacaccacagagcagctgccggacctctgcgtgaacctgcttctggctctcaacctgcacctgccagctgctgaccagaatgtcatcatggctgccctgagcaaacacgccaatgtcaagatcttctccgagaagctgttgttgctcctgaacagaggggatgaccctgtgcgcatcttcaaacatgagccacagccaccacactctgtcctcaagttcctgcaggacgtgtttggcagcccggccacagctgccatcttctaccacacagacatgatggctctcattgacatcactgtgcggcacatcgcagacctgtcaccaggagacaagctgcgcatggagtacctctccctgatgcatgctatagtccgcaccacaccctacctgcagcaccgccaccggctacccgacctgcaggccatactgcgacgcatcctgaatgaggaggagacctcaccccagtgccagatggaccgcatgattgtccgagagatgtgcaaggaattcctggtgctgggggaggctcccagctagcaccttgctgtcctcccttccctgcagctccagtcagtgtgcaggggactcaggggcttggccctaagaatgttttgcactgacagtgggaggggataaggtggcagaaggaacctgagcaggacccccacctgaagtagaacttaagagaggggccaagtgtaggattggggaccatggtctgggagctgttctggggcagggggaatatgcaagctaaagcccctctataccctggtaggcttcctcttcagcatgcccccctcttcaccccacacccatgtgtacactcagagtcctgctgccgctccaggctggaccagacccccatccccacccctcctggtctgtatcctgggcctcagcaagccatgcccctggggtgaggggaggcatctcccaccagctctattctttgccttagctttgcagtgagtgctgctcatgtcctcccctccacccgcacatgggggtcgctgcccttcactcctacccccagaggccttggccaagctgctgctttgaaagcgggatcttggagacaggccatccatcctggagcctcatggaacaggatgatggcactgagaaagccaatgaccgaatctcttttctctgtaaaaatgtagactgaaaagccatgtgtattttcctatgtgctgtagctctcctttggaaataaatcacaggcatctggaaa

SEQ ID NO: 437749 - DNA, 2098 bp, Homo sapiens
cattttgtgtggaatgggagagtgaggtctcagagtcacattctggcagtgacagagttcatggccctcctagttgggggtgtttatccaggtctgggatgagaggcgagctgttgaaaaccccctacagatgagtctcccgttgactcctgtcctgggaggtcatcaagactggagttgagcctcctgtccagtgtgggccaggagggacttgagttcatggagtaaaagtccacagatggactctccaggccttggaggctccctggagatggtgagggcagggagtgtgctgagtcatgccttgccctctccctctaggacctcagcatggccctgccctcagggcaggtctgccacgaccagcagaggctggaggtgatctttgcagacctggctcgccggaaggacgacgcccagcagcgcagttgggcactatatgaggatgagggtgtcatccgctgctacctagaggagctgctgcatattctgactgatgcagaccctgaagtttgcaagaaaatgtgcaagagaaacgagttcgagtctgtcctggccttggtggcctattaccaaatggaacaccgagcatcactgcggctgctgctcctcaagtgctttggcgccatgtgcagcctggatgcagccatcatctccacgcttgtgtcatccgtgctgcctgtagagctggcgagggacatgcagacagacacgcaggaccaccagaaactctgttactctgccctcatcctggccatggtcttctccatgggagaggcagtgccctatgcacactatgagcacctgggcacgcctttcgcccagttcctactgaacatcgtcgaggatgggctgcccttggacaccacagagcagctgccggacctctgcgtgaacctgcttctggctctcaacctgcacctgccagctgctgaccagaatgtcatcatggctgccctgagcaaacacgccaatgtcaagatcttctccgagaagctgttgttgctcctgaacagaggggatgaccctgtgcgcatcttcaaacatgagccacagccaccacactctgtcctcaagttcctgcaggacgtgtttggcagcccggccacagctgccatcttctaccacacagacatgatggctctcattgacatcactgtgcggcacatcgcagacctgtcaccaggagacaagctgcgcatggagtacctctccctgatgcatgctatagtccgcaccacaccctacctgcagcaccgccaccggctacccgacctgcaggccatactgcgacgcatcctgaatgaggaggagacctcaccccagtgccagatggaccgcatgattgtccgagagatgtgcaaggaattcctggtgctgggggaggctcccagctagcaccttgctgtcctcccttccctgcagctccagtcagtgtgcaggggactcaggggcttggccctaagaatgttttgcactgacagtgggaggggataaggtggcagaaggaacctgagcaggacccccacctgaagtagaacttaagagaggggccaagtgtaggattggggaccatggtctgggagctgttctggggcagggggaatatgcaagctaaagcccctctataccctggtaggcttcctcttcagcatgcccccctcttcaccccacacccatgtgtacactcagagtcctgctgccgctccaggctggaccagacccccatccccacccctcctggtctgtatcctgggcctcagcaagccatgcccctggggtgaggggaggcatctcccaccagctctattctttgccttagctttgcagtgagtgctgctcatgtcctcccctccacccgcacatgggggtcgctgcccttcactcctacccccagaggccttggccaagctgctgctttgaaagcgggatcttggagacaggccatccatcctggagcctcatggaacaggatgatggcactgagaaagccaatgaccgaatctcttttctctgtaaaaatgtagactgaaaagccatgtgtattttcctatgtgctgtagctctcctttggaaataaatcacaggcatctggaaa

SEQ ID NO: 437750 - DNA, 986 bp, Homo sapiens
  misc_feature (9)..(9): n is a, c, g, or t
aaaacatanggcatggtacgaggctgggtggtgcccagatcctcaccaggctgatgaatgttatcgagaaggagagggtaccctacactgatgacggcctagaagccatcatcttcacggcccagggagacatgaggcaggcgctgaacaacctgcagtccaccttctcaggatttggcttcattaacagtgagaacgtgttcaaggtctgtgacgagccccacccactgctggtaaaggagatgatccagcactgtgtgaatgccaacattgacgaagcctacaagattcttgctcacttgtggcatctgggctactcaccagaagatatcattggcaacatctttcgagtgtgtaaaactttccaaatggcagaatacctgaaactggagtttatcaaggaaattggatacactcacatgaaaatagcggaaggagtgaactctcttttgcagatggcaggcctcctggcaaggctgtgtcagaagacaatggccccggtggccagttagagcagagacttcactgactgacttacaggtgccctattctgaggtacaggagccgcggctttctgatgggggaaaatgccgccttaggctggagccaacatgactgtcctttaaactccagtggctggccaggcacggtagctcacgcctgtaatcccaacactttgggaggccgaggcaggtggatcacctgaggtcagaagttcaagaccagcctggccaacatggggaaaccctgtctttactaaaaatataaaaattagctgggtgtggtggcgggcacctgtaatcccagctactcgggaggctgtggcaggagaatcgcttgaacccaggaggtggaggttgcagtgagccaagatcacaccattgcactccagcctgggcgaaaagtctctgggaaataataataatccgggtgaaaaaaaaaccggctttggcgaaggtagcggagtcccctttagggaggctggt

SEQ ID NO: 437751 - DNA, 173 bp, Homo sapiens
gacagagacctggcaccctcctgggacagtgggctgtctagctcggactccaagaagagaggcagggaagggcagagctttaaaagtcaccccggaggctgaggcaggaggatcacctgaggtcaggagttcaagaccagcctggccaacatggtgaaatcccatctctacta

SEQ ID NO: 437752 - DNA, 1561 bp, Homo sapiens
ggcgtcaaggggcggtgcctcgggtggcgggaagagggaagaggaggcgcgagaatggaggtggaggccgtctgtggtggcgcgggcgaggtggaggcccaggactctgaccctgcccctgccttcagcaaggcccccggcagcgccggccactacgaactgccgtgggttgaaaaatataggccagtaaagctgaatgaaattgtcgggaatgaagacaccgtgagcaggctagaggtctttgcaagggaaggaaatgtgcccaacatcatcattgcgggccctccaggaaccggcaagaccacaagcattctgtgcttggcccgggccctgctgggcccagcactcaaagatgccatgttggaactcaatgcttcaaatgacaggggcattgacgttgtgaggaataaaattaaaatgtttgctcaacaaaaagtcactcttcccaaaggccgacataagatcatcattctggatgaagcagacagcatgaccgacggagcccagcaagccttgaggagaaccatggaaatctactctaaaaccactcgcttcgcccttgcttgtaatgcttcggataagatcatcgagcccattcagtcccgctgtgcagtcctccggtacacaaagctgaccgacgcccagatcctcaccaggctgatgaatgttatcgagaaggagagggtaccctacactgatgacggcctagaagccatcatcttcacggcccagggagacatgaggcaggcgctgaacaacctgcagtccaccttctcaggatttggcttcattaacagtgagaacgtgttcaaggtctgtgacgagccccacccactgctggtaaaggagatgatccagcactgtgtgaatgccaacattgacgaagcctacaagattcttgctcacttgtggcatctgggctactcaccagaagatatcattggcaacatctttcgagtgtgtaaaactttccaaatggcagaatacctgaaactggagtttatcaaggaaattggatacactcacatgaaaatagcggaaggagtgaactctcttttgcagatggcaggcctcctggcaaggctgtgtcagaagacaatggccccggtggccagttagagcagagacttcactgactgacttacaggtgccctattctgaggtacaggagccgcggctttctgatgggggaaaatgccgccttaggctggagccaacatgactgtcctttaaactccagtggctggccaggcacggtagctcacgcctgtaatcccaacactttgggaggccgaggcaggtggatcacctgaggtcagaagttcaagaccagcctggccaacatggggaaaccctgtctttactaaaaatataaaaattagctgggtgtggtggcgggcacctgtaatcccagctactcgggaggctgtggcaggagaatcgcttgaacccaggaggtggaggttgcagtgagccaagatcacaccattgcactccagcctgggcgacagagtctccatctggggaaaaaaattaaataaataaactcccgtgacttgca

SEQ ID NO: 437753 - DNA, 1875 bp, Homo sapiens
caatttgagtttccatttctcggatttgggaactggtataagcattgtctgtgatgtaaacaaagtcttcaatatttggagaaaacatctcctcatacttgagagcacaagaggaagagagagaccctcactgctggggagtccctgccacactcagtcccccaccacactgaatcggaattccgagagggaagaggaggcgcgagaatggaggtggaggccgtctgtggtggcgcgggcgaggtggaggcccaggactctgaccctgcccctgccttcagcaaggcccccggcagcgccggccactacgaactgccgtgggttgaaaaatataggccagtaaagctgaatgaaattgtcgggaatgaagacaccgtgagcaggctagaggtctttgcaagggaaggaaatgtgcccaacatcatcattgcgggccctccaggaaccggcaagaccacaagcattctgtgcttggcccgggccctgctgggcccagcactcaaagatgccatgttggaactcaatgcttcaaatgacaggggcattgacgttgtgaggaataaaattaaaatgtttgctcaacaaaaagtcactcttcccaaaggccgacataagatcatcattctggatgaagcagacagcatgaccgacggagcccagcaagccttgaggagaaccatggaaatctactctaaaaccactcgcttcgcccttgcttgtaatgcttcggataagatcatcgagcccattcagtcccgctgtgcagtcctccggtacacaaagctgaccgacgcccagatcctcaccaggctgatgaatgttatcgagaaggagagggtaccctacactgatgacggcctagaagccatcatcttcacggcccagggagacatgaggcaggcgctgaacaacctgcagtccaccttctcaggatttggcttcattaacagtgagaacgtgttcaaggtctgtgacgagccccacccactgctggtaaaggagatgatccagcactgtgtgaatgccaacattgacgaagcctacaagattcttgctcacttgtggcatctgggctactcaccagaagatatcattggcaacatctttcgagtgtgtaaaactttccaaatggcagaatacctgaaactggagtttatcaaggaaattggatacactcacatgaaaatagcggaaggagtgaactctcttttgcagatggcaggcctcctggcaaggctgtgtcagaagacaatggccccggtggccagttagagcagagacttcactgactgacttacaggtgccctattctgaggtacaggagccgcggctttctgatgggggaaaatgccgccttaggctggagccaacatgactgtcctttaaactccagtggctggccaggcacggtagctcacgcctgtaatcccaacactttgggaggccgaggcaggtggatcacctgaggtcagaagttcaagaccagcctggccaacatggggaaaccctgtctttactaaaaatataaaaattagctgggtgtggtggcgggcacctgtaatcccagctactcgggaggctgtggcaggagaatcgcttgaacccaggaggtggaggttgcagtgagccaagatcacaccattgcactccagcctgggcgacagagtctccatctggggaaaaaaattaaataaataaactcccgtgacttgcatgtttgcttctgggacgtctgtgccccgcaagtgtttgagtttggcctccaccccattgatgcggtgacggggcggaaaggcgcagagaagctgagggcggtctctgatctgtgtgtgggttgacattttagctaataaagccttgcagtgtttgttggca

SEQ ID NO: 437754 - DNA, 1358 bp, Homo sapiens
ggcgtcaaggggcggtgcctcgggtggcgggaagagggaagaggaggcgcgagaatggaggtggaggccgtctgtggtggcgcgggcgaggtggaggcccaggactctgaccctgcccctgccttcagcaaggcccccggcagcgccggccactacgaactgccgtgggttgaaaaatataggccagtaaagctgaatgaaattgtcgggaatgaagacaccgtgagcaggctagaggtctttgcaagggaaggaaatgtgcccaacatcatcattgcgggccctccaggaaccggcaagaccacaagcattctgtgcttggcccgggccctgctgggcccagcactcaaagatgccatgttggaactcaatgcttcaaatgacaggggcattgacgttgtgaggaataaaattaaaatgtttgctcaacaaaaagtcactcttcccaaaggccgacataagatcatcattctggatgaagcagacagcatgaccgacggagcccagcaagccttgaggagaaccatggaaatctactctaaaaccactcgcttcgcccttgcttgtaatgcttcggataagatcatcgagcccattcagtcccgctgtgcagtcctccggtacacaaagctgaccgacgcccagatcctcaccaggctgatgaatgttatcgagaaggagagggtaccctacactgatgacggcctagaagccatcatcttcacggcccagggagacatgaggcaggcgctgaacaacctgcagtccaccttctcaggatttggcttcattaacagtgagaacgtgttcaaggtctgtgacgagccccacccactgctggtaaaggagatgatccagcactgtgtgaatgccaacattgacgaagcctacaagattcttgctcacttgtggcatctgggctactcaccagaagatatcattggcaacatctttcgagtgtgtaaaactttccaaatggcagaatacctgaaactggagtttatcaaggaaattggatacactcacatgaaaatagcggaaggagtgaactctcttttgcagatggcaggcctcctggcaaggctgtgtcagaagacaatggccccggtggccagttagagcagagacttcactgactgacttacaggtgccctattctgaggtacaggagccgcggctttctgatgggggaaaatgccgccttaggctggagccaacatgactgtcctttaaactccagtggctggccaggcacggtagctcacgcctgtaatcccaaagtgctagaattacaggtgtgagccactgcgcctgggctacctttttaatggtttttaagagacagggtcttgctctgt

SEQ ID NO: 437755 - DNA, 1254 bp, Homo sapiens
ggcgtcaaggggcggtgcctcgggtggcgggaagagggaagaggaggcgcgagaatggaggtggaggccgtctgtggtggcgcgggcgaggtggaggcccaggactctgaccctgcccctgccttcagcaaggcccccggcagcgccggccactacgaactgccgtgggttgaaaaatataggccagtaaagctgaatgaaattgtcgggaatgaagacaccgtgagcaggctagaggtctttgcaagggaaggaaatgtgcccaacatcatcattgcgggccctccaggaaccggcaagaccacaagcattctgtgcttggcccgggccctgctgggcccagcactcaaagatgccatgttggaactcaatgcttcaaatgacaggggcattgacgttgtgaggaataaaattaaaatgtttgctcaacaaaaagtcactcttcccaaaggccgacataagatcatcattctggatgaagcagacagcatgaccgacggagcccagcaagccttgaggagaaccatggaaatctactctaaaaccactcgcttcgcccttgcttgtaatgcttcggataagatcatcgagcccattcagtcccgctgtgcagtcctccggtacacaaagctgaccgacgcccagatcctcaccaggctgatgaatgttatcgagaaggagagggtaccctacactgatgacggcctagaagccatcatcttcacggcccagggagacatgaggcaggcgctgaacaacctgcagtccaccttctcaggatttggcttcattaacagtgagaacgtgttcaaggtctgtgacgagccccacccactgctggtaaaggagatgatccagcactgtgtgaatgccaacattgacgaagcctacaagattcttgctcacttgtggcatctgggctactcaccagaagatatcattggcaacatctttcgagtgtgtaaaactttccaaatggcagaatacctgaaactggagtttatcaaggaaattggatacactcacatgaaaatagcggaaggagtgaactctcttttgcagatggcaggcctcctggcaaggctgtgtcagaagacaatggccccggtggccagttagagcagagacttcactgactgacttacaggtgccctattctgaggtacaggagccgcggctttctgatgggggaaaatgccgccagagtctccatctggggaaaaaaattaaataaataaactcccgtgacttgca

SEQ ID NO: 437756 - DNA, 1459 bp, Homo sapiens
ggcgtcaaggggcggtgcctcgggtggcgggaagagggaagaggaggcgcgagaatggaggtggaggccgtctgtggtggcgcgggcgaggtggaggcccaggactctgaccctgcccctgccttcagcaaggcccccggcagcgccggccactacgaactgccgtgggttgaaaaatataggccagtaaagctgaatgaaattgtcgggaatgaagacaccgtgagcaggctagaggtctttgcaagggaaggaaatgtgcccaacatcatcattgcgggccctccaggaaccggcaagaccacaagcattctgtgcttggcccgggccctgctgggcccagcactcaaagatgccatgttggaactcaatgcttcaaatgacagcatgaccgacggagcccagcaagccttgaggagaaccatggaaatctactctaaaaccactcgcttcgcccttgcttgtaatgcttcggataagatcatcgagcccattcagtcccgctgtgcagtcctccggtacacaaagctgaccgacgcccagatcctcaccaggctgatgaatgttatcgagaaggagagggtaccctacactgatgacggcctagaagccatcatcttcacggcccagggagacatgaggcaggcgctgaacaacctgcagtccaccttctcaggatttggcttcattaacagtgagaacgtgttcaaggtctgtgacgagccccacccactgctggtaaaggagatgatccagcactgtgtgaatgccaacattgacgaagcctacaagattcttgctcacttgtggcatctgggctactcaccagaagatatcattggcaacatctttcgagtgtgtaaaactttccaaatggcagaatacctgaaactggagtttatcaaggaaattggatacactcacatgaaaatagcggaaggagtgaactctcttttgcagatggcaggcctcctggcaaggctgtgtcagaagacaatggccccggtggccagttagagcagagacttcactgactgacttacaggtgccctattctgaggtacaggagccgcggctttctgatgggggaaaatgccgccttaggctggagccaacatgactgtcctttaaactccagtggctggccaggcacggtagctcacgcctgtaatcccaacactttgggaggccgaggcaggtggatcacctgaggtcagaagttcaagaccagcctggccaacatggggaaaccctgtctttactaaaaatataaaaattagctgggtgtggtggcgggcacctgtaatcccagctactcgggaggctgtggcaggagaatcgcttgaacccaggaggtggaggttgcagtgagccaagatcacaccattgcactccagcctgggcgacagagtctccatctggggaaaaaaattaaataaataaactcccgtgacttgca

SEQ ID NO: 437757 - DNA, 1456 bp, Homo sapiens
caccccaaaaaataggctaggtacgaggctgggtgttgggaagaggaggcgcgagaatggaggtggaggccgtctgtggtggcgcgggcgaggtggaggcccaggactctgaccctgcccctgccttcagcaaggcccccggcagcgccggccactacgaactgccgtgggttgaaaaatataggccagtaaagctgaatgaaattgtcgggaatgaagacaccgtgagcaggctagaggtctttgcaagggaaggaaatgtgcccaacatcatcattgcggggcattgacgttgtgaggaataaaattaaaatgtttgctcaacaaaaagtcactcttcccaaaggccgacataagatcatcattctggatgaagcagacagcatgaccgacggagcccagcaagccttgaggagaaccatggaaatctactctaaaaccactcgcttcgcccttgcttgtaatgcttcggataagatcatcgagcccattcagtcccgctgtgcagtcctccggtacacaaagctgaccgacgcccagatcctcaccaggctgatgaatgttatcgagaaggagagggtaccctacactgatgacggcctagaagccatcatcttcacggcccagggagacatgaggcaggcgctgaacaacctgcagtccaccttctcaggatttggcttcattaacagtgagaacgtgttcaaggtctgtgacgagccccacccactgctggtaaaggagatgatccagcactgtgtgaatgccaacattgacgaagcctacaagattcttgctcacttgtggcatctgggctactcaccagaagatatcattggcaacatctttcgagtgtgtaaaactttccaaatggcagaatacctgaaactggagtttatcaaggaaattggatacactcacatgaaaatagcggaaggagtgaactctcttttgcagatggcaggcctcctggcaaggctgtgtcagaagacaatggccccggtggccagttagagcagagacttcactgactgacttacaggtgccctattctgaggtacaggagccgcggctttctgatgggggaaaatgccgccttaggctggagccaacatgactgtcctttaaactccagtggctggccaggcacggtagctcacgcctgtaatcccaacactttgggaggccgaggcaggtggatcacctgaggtcagaagttcaagaccagcctggccaacatggggaaaccctgtctttactaaaaatataaaaattagctgggtgtggtggcgggcacctgtaatcccagctactcgggaggctgtggcaggagaatcgcttgaacccaggaggtggaggttgcagtgagccaagatcacaccattgcactccagcctgggcgacagagtctccatctggggaaaaaaattaaataaataaactcccgtgacttgca

SEQ ID NO: 437758 - DNA, 1665 bp, Homo sapiens
caccccaaaaaataggctaggtacgaggctgggtgttgggaagaggaggcgcgagaatggaggtggaggccgtctgtggtggcgcgggcgaggtggaggcccaggactctgaccctgcccctgccttcagcaaggcccccggcagcgccggccactacgaactgccgtgggttgaaaaatataggccagtaaagctgaatgaaattgtcgggaatgaagacaccgtgagcaggctagaggtctttgcaagggaaggaaatgtgcccaacatcatcattgcggggtcagaggtgacggagatgcaaacagcagtgaacataactcaagagctacctgaggtccttctggtggtttgaagtctttactggagatctcattcccagggccctccaggaaccggcaagaccacaagcattctgtgcttggcccgggccctgctgggcccagcactcaaagatgccatgttggaactcaatgcttcaaatgacaggggcattgacgttgtgaggaataaaattaaaatgtttgctcaacaaaaagtcactcttcccaaaggccgacataagatcatcattctggatgaagcagacagcatgaccgacggagcccagcaagccttgaggagaaccatggaaatctactctaaaaccactcgcttcgcccttgcttgtaatgcttcggataagatcatcgagcccattcagtcccgctgtgcagtcctccggtacacaaagctgaccgacgcccagatcctcaccaggctgatgaatgttatcgagaaggagagggtaccctacactgatgacggcctagaagccatcatcttcacggcccagggagacatgaggcaggcgctgaacaacctgcagtccaccttctcaggatttggcttcattaacagtgagaacgtgttcaaggtctgtgacgagccccacccactgctggtaaaggagatgatccagcactgtgtgaatgccaacattgacgaagcctacaagattcttgctcacttgtggcatctgggctactcaccagaagatatcattggcaacatctttcgagtgtgtaaaactttccaaatggcagaatacctgaaactggagtttatcaaggaaattggatacactcacatgaaaatagcggaaggagtgaactctcttttgcagatggcaggcctcctggcaaggctgtgtcagaagacaatggccccggtggccagttagagcagagacttcactgactgacttacaggtgccctattctgaggtacaggagccgcggctttctgatgggggaaaatgccgccttaggctggagccaacatgactgtcctttaaactccagtggctggccaggcacggtagctcacgcctgtaatcccaacactttgggaggccgaggcaggtggatcacctgaggtcagaagttcaagaccagcctggccaacatggggaaaccctgtctttactaaaaatataaaaattagctgggtgtggtggcgggcacctgtaatcccagctactcgggaggctgtggcaggagaatcgcttgaacccaggaggtggaggttgcagtgagccaagatcacaccattgcactccagcctgggcgacagagtctccatctggggaaaaaaattaaataaataaactcccgtgacttgca

SEQ ID NO: 437759 - DNA, 954 bp, Homo sapiens
  misc_feature (9)..(9): n is a, c, g, or t
aaaacatanggcatggtacgaggctgggtggtgcccagatcctcaccaggctgatgaatgttatcgagaaggagagggtaccctacactgatgacggcctagaagccatcatcttcacggcccagggagacatgaggcaggcgctgaacaacctgcagtccaccttctcaggatttggcttcattaacagtgagaacgtgttcaaggtctgtgacgagccccacccactgctggtaaaggagatgatccagcactgtgtgaatgccaacattgacgaagcctacaagattcttgctcacttgtggcatctgggctactcaccagaagatatcattggcaacatctttcgagtgtgtaaaactttccaaatggcagaatacctgaaactggagtttatcaaggaaattggatacactcacatgaaaatagcggaaggagtgaactctcttttgcagatggcaggcctcctggcaaggctgtgtcagaagacaatggccccggtggccagttagagcagagacttcactgactgacttacaggtgccctattctgaggtacaggagccgcggctttctgatgggggaaaatgccgccttaggctggagccaacatgactgtcctttaaactccagtggctggccaggcacggtagctcacgcctgtaatcccaacactttgggaggccgaggcaggtggatcacctgaggtcagaagttcaagaccagcctggccaacatggggaaaccctgtctttactaaaaatataaaaattagctgggtgtggtggcgggcacctgtaatcccagctactcgggaggctgtggcaggagaatcgcttgaacccaggaggtggaggttgcagtgagccaagatcacaccattgcactccagcctgggcgacagagtctccatctggggaaaaaaattaaataaataaactcccgtgacttgca

SEQ ID NO: 437760 - DNA, 514 bp, Homo sapiens
caccccaaaaaataggctaggtacgaggctgggtgttgggaagaggaggcgcgagaatggaggtggaggccgtctgtggtggcgcgggcgaggtggaggcccaggactctgaccctgcccctgccttcagcaaggcccccggcagcgccggccactacgaactgccgtgggttgaaaaatataggccagtaaagctgaatgaaattgtcgggaatgaagacaccgtgagcaggctagaggtctttgcaagggaaggaaatgtgcccaacatcatcattgcgggccctccaggaaccggcaagaccacaagcattctgtgcttggcccgggccctgctgggcccagcactcaaagatgccatgttggaactcaatgcttcaaatgacaggggcattgacgttgtgaggaataaaattaaaatgtttgctcaacaaaaagtcactcttcccaaaggccgacataagatcatcattctggatgaagcagacaggtagagtgctttgccaaatgtatt

SEQ ID NO: 437761 - DNA, 437 bp, Homo sapiens
ggcgtgagccctcgtgtccggcctaccaagtctctattgagtgcctggggctgtgtggattgtgcagctgcagccttatgaccaaagagctagcaggatgatgccggcctctgcagggaagcctcactactgtcccgtctctgttcagagcccattcagtcccgctgtgcagtcctccggtacacaaagctgaccgacgcccagatcctcaccaggctgatgaatgttatcgagaaggagagggtaccctacactgatgacggcctagaagccatcatcttcacggcccagggagacatgaggcaggtatgtgggctgctaccattcaggcgtgggcatcctgtgcctgccatgccccttccatggggaaggggagggaagtgacagctgcacaaggtacaacaagagaaagagacagagacctggcaccctcctgg

SEQ ID NO: 437762 - DNA, 355 bp, Homo sapiens
attgtgccactacactccatgctgggtgacagagtgagactctgtctcaaaaaaaaaaaaaaaaaaaaaaagtcacccttggcccggtgcggtggctcatgcctgtaatcccagcacttgggaggcggaggtgggagaatcgcttaagcccaggagttcgagaccagcctgggcaacatagcgagactcctgtctctactcaaaaagaaataaatataaaaatcatccttgacatgtgtttgctcctgaacaggcgctgaacaacctgcagtccaccttctcaggatttggcttcattaacagtgagaacgtgttcaaggtacaagcgctagtgtgggtggtactgtcagcagaa

SEQ ID NO: 437763 - DNA, 1714 bp, Homo sapiens
caatttgagtttccatttctcggatttgggaactggtataagcattgtctgtgatgtaaacaaagtcttcaatatttggagaaaacatctcctcatacttgagagcacaagaggaagagagagaccctcactgctggggagtccctgccacactcagtcccccaccacactgaatcggaattccgagagggaagaggaggcgcgagaatggaggtggaggccgtctgtggtggcgcgggcgaggtggaggcccaggactctgaccctgcccctgccttcagcaaggcccccggcagcgccggccactacgaactgccgtgggttgaaaaatataggccagtaaagctgaatgaaattgtcgggaatgaagacaccgtgagcaggctagaggtctttgcaagggaaggaaatgtgcccaacatcatcattgcgggccctccaggaaccggcaagaccacaagcattctgtgcttggcccgggccctgctgggcccagcactcaaagatgccatgttggaactcaatgcttcaaatgacaggggcattgacgttgtgaggaataaaattaaaatgtttgctcaacaaaaagtcactcttcccaaaggccgacataagatcatcattctggatgaagcagacagcatgaccgacggagcccagcaagccttgaggagaaccatggaaatctactctaaaaccactcgcttcgcccttgcttgtaatgcttcggataagatcatcgagcccattcagtcccgctgtgcagtcctccggtacacaaagctgaccgacgcccagatcctcaccaggctgatgaatgttatcgagaaggagagggtaccctacactgatgacggcctagaagccatcatcttcacggcccagggagacatgaggcaggcgctgaacaacctgcagtccaccttctcaggatttggcttcattaacagtgagaacgtgttcaaggtctgtgacgagccccacccactgctggtaaaggagatgatccagcactgtgtgaatgccaacattgacgaagcctacaagattcttgctcacttgtggcatctgggctactcaccagaagatatcattggcaacatctttcgagtgtgtaaaactttccaaatggcagaatacctgaaactggagtttatcaaggaaattggatacactcacatgaaaatagcggaaggagtgaactctcttttgcagatggcaggcctcctggcaaggctgtgtcagaagacaatggccccggtggccagttagagcagagacttcactgactgacttacaggtgccctattctgaggtacaggagccgcggctttctgatgggggaaaatgccgccttaggctggagccaacatgactgtcctttaaactccagtggctggccaggcacggtagctcacgcctgtaatcccaacactttgggaggccgaggcaggtggatcacctgaggtcagaagttcaagaccagcctggccaacatggggaaaccctgtctttactaaaaatataaaaattagctgggtgtggtggcgggcacctgtaatcccagctactcgggaggctgtggcaggagaatcgcttgaacccaggaggtggaggttgcagtgagccaagatcacaccattgcactccagcctgggcgacagagtctccatctggggaaaaaaattaaataaataaactcccgtgacttgca

SEQ ID NO: 437764 - DNA, 1581 bp, Homo sapiens
cacccccccccccccccccccaacatacgtctggtaggctggtgtgttatcggccgggaagaggaggcgcgagaatggaggtggaggccgtctgtggtggcgcgggcgaggtggaggcccaggactctgaccctgcccctgccttcagcaaggcccccggcagcgccggccactacgaactgccgtgggttgaaaaatataggccagtaaagctgaatgaaattgtcgggaatgaagacaccgtgagcaggctagaggtctttgcaagggaaggaaatgtgcccaacatcatcattgcgggccctccaggaaccggcaagaccacaagcattctgtgcttggcccgggccctgctgggcccagcactcaaagatgccatgttggaactcaatgcttcaaatgacaggggcattgacgttgtgaggaataaaattaaaatgtttgctcaacaaaaagtcactcttcccaaaggccgacataagatcatcattctggatgaagcagacagcatgaccgacggagcccagcaagccttgaggagaaccatggaaatctactctaaaaccactcgcttcgcccttgcttgtaatgcttcggataagatcatcgagcccattcagtcccgctgtgcagtcctccggtacacaaagctgaccgacgcccagatcctcaccaggctgatgaatgttatcgagaaggagagggtaccctacactgatgacggcctagaagccatcatcttcacggcccagggagacatgaggcaggcgctgaacaacctgcagtccaccttctcaggatttggcttcattaacagtgagaacgtgttcaaggtctgtgacgagccccacccactgctggtaaaggagatgatccagcactgtgtgaatgccaacattgacgaagcctacaagattcttgctcacttgtggcatctgggctactcaccagaagatatcattggcaacatctttcgagtgtgtaaaactttccaaatggcagaatacctgaaactggagtttatcaaggaaattggatacactcacatgaaaatagcggaaggagtgaactctcttttgcagatggcaggcctcctggcaaggctgtgtcagaagacaatggccccggtggccagttagagcagagacttcactgactgacttacaggtgccctattctgaggtacaggagccgcggctttctgatgggggaaaatgccgccttaggctggagccaacatgactgtcctttaaactccagtggctggccaggcacggtagctcacgcctgtaatcccaacactttgggaggccgaggcaggtggatcacctgaggtcagaagttcaagaccagcctggccaacatggggaaaccctgtctttactaaaaatataaaaattagctgggtgtggtggcgggcacctgtaatcccagctactcgggaggctgtggcaggagaatcgcttgaacccaggaggtggaggttgcagtgagccaagatcacaccattgcactccagcctgggcgacagagtctccatctggggaaaaaaattaaataaataaactcccgtgacttgca

SEQ ID NO: 437765 - DNA, 1746 bp, Homo sapiens
caatttgagtttccatttctcggatttgggaactggtataagcattgtctgtgatgtaaacaaagtcttcaatatttggagaaaacatctcctcatacttgagagcacaagaggaagagagagaccctcactgctggggagtccctgccacactcagtcccccaccacactgaatcggaattccgagagggaagaggaggcgcgagaatggaggtggaggccgtctgtggtggcgcgggcgaggtggaggcccaggactctgaccctgcccctgccttcagcaaggcccccggcagcgccggccactacgaactgccgtgggttgaaaaatataggccagtaaagctgaatgaaattgtcgggaatgaagacaccgtgagcaggctagaggtctttgcaagggaaggaaatgtgcccaacatcatcattgcgggccctccaggaaccggcaagaccacaagcattctgtgcttggcccgggccctgctgggcccagcactcaaagatgccatgttggaactcaatgcttcaaatgacaggggcattgacgttgtgaggaataaaattaaaatgtttgctcaacaaaaagtcactcttcccaaaggccgacataagatcatcattctggatgaagcagacagcatgaccgacggagcccagcaagccttgaggagaaccatggaaatctactctaaaaccactcgcttcgcccttgcttgtaatgcttcggataagatcatcgagcccattcagtcccgctgtgcagtcctccggtacacaaagctgaccgacgcccagatcctcaccaggctgatgaatgttatcgagaaggagagggtaccctacactgatgacggcctagaagccatcatcttcacggcccagggagacatgaggcaggcgctgaacaacctgcagtccaccttctcaggatttggcttcattaacagtgagaacgtgttcaaggtctgtgacgagccccacccactgctggtaaaggagatgatccagcactgtgtgaatgccaacattgacgaagcctacaagattcttgctcacttgtggcatctgggctactcaccagaagatatcattggcaacatctttcgagtgtgtaaaactttccaaatggcagaatacctgaaactggagtttatcaaggaaattggatacactcacatgaaaatagcggaaggagtgaactctcttttgcagatggcaggcctcctggcaaggctgtgtcagaagacaatggccccggtggccagttagagcagagacttcactgactgacttacaggtgccctattctgaggtacaggagccgcggctttctgatgggggaaaatgccgccttaggctggagccaacatgactgtcctttaaactccagtggctggccaggcacggtagctcacgcctgtaatcccaacactttgggaggccgaggcaggtggatcacctgaggtcagaagttcaagaccagcctggccaacatggggaaaccctgtctttactaaaaatataaaaattagctgggtgtggtggcgggcacctgtaatcccagctactcgggaggctgtggcaggagaatcgcttgaacccaggaggtggaggttgcagtgagccaagatcacaccattgcactccagcctgggcgaaaagtctctgggaaataataataatccgggtgaaaaaaaaaccggctttggcgaaggtagcggagtcccctttagggaggctggt

SEQ ID NO: 437766 - DNA, 1461 bp, Homo sapiens
caccccaaaaaataggctaggtacgaggctgggtgttgggaagaggaggcgcgagaatggaggtggaggccgtctgtggtggcgcgggcgaggtggaggcccaggactctgaccctgcccctgccttcagcaaggcccccggcagcgccggccactacgaactgccgtgggttgaaaaatataggccagtaaagctgaatgaaattgtcgggaatgaagacaccgtgagcaggctagaggtctttgcaagggaaggaaatgtgcccaacatcatcattgcgggccctccaggaaccggcaagaccacaagcattctgtgcttggcccgggccctgctgggcccagcactcaaagatgccatgttggaactcaatgcttcaaatgacagcatgaccgacggagcccagcaagccttgaggagaaccatggaaatctactctaaaaccactcgcttcgcccttgcttgtaatgcttcggataagatcatcgagcccattcagtcccgctgtgcagtcctccggtacacaaagctgaccgacgcccagatcctcaccaggctgatgaatgttatcgagaaggagagggtaccctacactgatgacggcctagaagccatcatcttcacggcccagggagacatgaggcaggcgctgaacaacctgcagtccaccttctcaggatttggcttcattaacagtgagaacgtgttcaaggtctgtgacgagccccacccactgctggtaaaggagatgatccagcactgtgtgaatgccaacattgacgaagcctacaagattcttgctcacttgtggcatctgggctactcaccagaagatatcattggcaacatctttcgagtgtgtaaaactttccaaatggcagaatacctgaaactggagtttatcaaggaaattggatacactcacatgaaaatagcggaaggagtgaactctcttttgcagatggcaggcctcctggcaaggctgtgtcagaagacaatggccccggtggccagttagagcagagacttcactgactgacttacaggtgccctattctgaggtacaggagccgcggctttctgatgggggaaaatgccgccttaggctggagccaacatgactgtcctttaaactccagtggctggccaggcacggtagctcacgcctgtaatcccaacactttgggaggccgaggcaggtggatcacctgaggtcagaagttcaagaccagcctggccaacatggggaaaccctgtctttactaaaaatataaaaattagctgggtgtggtggcgggcacctgtaatcccagctactcgggaggctgtggcaggagaatcgcttgaacccaggaggtggaggttgcagtgagccaagatcacaccattgcactccagcctgggcgacagagtctccatctggggaaaaaaattaaataaataaactcccgtgacttgca

SEQ ID NO: 437767 - DNA, 1635 bp, Homo sapiens
ggcgtcaaggggcggtgcctcgggtggcgggaagagggaagaggaggcgcgagaatggaggtggaggccgtctgtggtggcgcgggcgaggtggaggcccaggactctgaccctgcccctgccttcagcaaggcccccggcagcgccggccactacgaactgccgtgggttgaaaaatataggccagtaaagctgaatgaaattgtcgggaatgaagacaccgtgagcaggctagaggtctttgcaagggaaggaaatgtgcccaacatcatcattgcgggccctccaggaaccggcaagaccacaagcattctgtgcttggcccgggccctgctgggcccagcactcaaagatgccatgttggaactcaatgcttcaaatgacaggggcattgacgttgtgaggaataaaattaaaatgtttgctcaacaaaaagtcactcttcccaaaggccgacataagatcatcattctggatgaagcagacagcatgaccgacggagcccagcaagccttgaggagaaccatggaaatctactctaaaaccactcgcttcgcccttgcttgtaatgcttcggataagatcatcgagcccattcagtcccgctgtgcagtcctccggtacacaaagctgaccgacgcccagatcctcaccaggctgatgaatgttatcgagaaggagagggtaccctacactgatgacggcctagaagccatcatcttcacggcccagggagacatgaggcaggcgctgaacaacctgcagtccaccttctcaggatttggcttcattaacagtgagaacgtgttcaaggtctgtgacgagccccacccactgctggtaaaggagatgatccagcactgtgtgaatgccaacattgacgaagcctacaagggttggcctccttccccccgtcctggcagaggaaccgctcacttcttgggcagaggagagcgggagcccttctgattcttgctcacttgtggcatctgggctactcaccagaagatatcattggcaacatctttcgagtgtgtaaaactttccaaatggcagaatacctgaaactggagtttatcaaggaaattggatacactcacatgaaaatagcggaaggagtgaactctcttttgcagatggcaggcctcctggcaaggctgtgtcagaagacaatggccccggtggccagttagagcagagacttcactgactgacttacaggtgccctattctgaggtacaggagccgcggctttctgatgggggaaaatgccgccttaggctggagccaacatgactgtcctttaaactccagtggctggccaggcacggtagctcacgcctgtaatcccaacactttgggaggccgaggcaggtggatcacctgaggtcagaagttcaagaccagcctggccaacatggggaaaccctgtctttactaaaaatataaaaattagctgggtgtggtggcgggcacctgtaatcccagctactcgggaggctgtggcaggagaatcgcttgaacccaggaggtggaggttgcagtgagccaagatcacaccattgcactccagcctgggcgacagagtctccatctggggaaaaaaattaaataaataaactcccgtgacttgca

SEQ ID NO: 437768 - DNA, 1612 bp, Homo sapiens
caccccaaaaaataggctaggtacgaggctgggtgttgggaagaggaggcgcgagaatggaggtggaggccgtctgtggtggcgcgggcgaggtggaggcccaggactctgaccctgcccctgccttcagcaaggcccccggcagcgccggccactacgaactgccgtgggttgaaaaatataggccagtaaagctgaatgaaattgtcgggaatgaagacaccgtgagcaggctagagtcatccagaagcaagttttaaccggttttaatgatcattttcgccgtaggtctttgcaagggaaggaaatgtgcccaacatcatcattgcgggccctccaggaaccggcaagaccacaagcattctgtgcttggcccgggccctgctgggcccagcactcaaagatgccatgttggaactcaatgcttcaaatgacaggggcattgacgttgtgaggaataaaattaaaatgtttgctcaacaaaaagtcactcttcccaaaggccgacataagatcatcattctggatgaagcagacagcatgaccgacggagcccagcaagccttgaggagaaccatggaaatctactctaaaaccactcgcttcgcccttgcttgtaatgcttcggataagatcatcgagcccattcagtcccgctgtgcagtcctccggtacacaaagctgaccgacgcccagatcctcaccaggctgatgaatgttatcgagaaggagagggtaccctacactgatgacggcctagaagccatcatcttcacggcccagggagacatgaggcaggcgctgaacaacctgcagtccaccttctcaggatttggcttcattaacagtgagaacgtgttcaaggtctgtgacgagccccacccactgctggtaaaggagatgatccagcactgtgtgaatgccaacattgacgaagcctacaagattcttgctcacttgtggcatctgggctactcaccagaagatatcattggcaacatctttcgagtgtgtaaaactttccaaatggcagaatacctgaaactggagtttatcaaggaaattggatacactcacatgaaaatagcggaaggagtgaactctcttttgcagatggcaggcctcctggcaaggctgtgtcagaagacaatggccccggtggccagttagagcagagacttcactgactgacttacaggtgccctattctgaggtacaggagccgcggctttctgatgggggaaaatgccgccttaggctggagccaacatgactgtcctttaaactccagtggctggccaggcacggtagctcacgcctgtaatcccaacactttgggaggccgaggcaggtggatcacctgaggtcagaagttcaagaccagcctggccaacatggggaaaccctgtctttactaaaaatataaaaattagctgggtgtggtggcgggcacctgtaatcccagctactcgggaggctgtggcaggagaatcgcttgaacccaggaggtggaggttgcagtgagccaagatcacaccattgcactccagcctgggcgacagagtctccatctggggaaaaaaattaaataaataaactcccgtgacttgca

SEQ ID NO: 437769 - DNA, 991 bp, Homo sapiens
  misc_feature (794)..(794): n is a, c, g, or t
  misc_feature (810)..(810): n is a, c, g, or t
  misc_feature (818)..(818): n is a, c, g, or t
  misc_feature (820)..(820): n is a, c, g, or t
ggcgtcaaggggcggtgcctcgggtggcgggaagagggaagaggaggcgcgagaatggaggtggaggccgtctgtggtggcgcgggcgaggtggaggcccaggactctgaccctgcccctgccttcagcaaggcccccggcagcgccggccactacgaactgccgtgggttgaaaaatataggccagtaaagctgaatgaaattgtcgggaatgaagacaccgtgagcaggctagaggtctttgcaagggaaggaaatgtgcccaacatcatcattgcgggccctccaggaaccggcaagaccacaagcattctgtgcttggcccgggccctgctgggcccagcactcaaagatgccatgttggaactcaatgcttcaaatgacaggggcattgacgttgtgaggaataaaattaaaatgtttgctcaacaaaaagtcactcttcccaaaggccgacataagatcatcattctggatgaagcagacagcatgaccgacggagcccagcaagccttgaggagaaccatggaaatctactctaaaaccactcgcttcgcccttgcttgtaatgcttcggataagatcatcgagcccattcagtcccgctgtgcagtcctccggtacacaaagctgaccgacgcccagatcctcaccaggctgatgaatgttatcgagaaggagagggtaccctacactgatgacggcctagaagccatcatcttcacggcccagggagacatgaggcaggcgctgaacaactgggtcacttctcaggattggttcttaccagtggnacgtgtcaagtcgtgngagcccancntgtggtagggtggtcccctggtgtgcgctgggggcctcaggttggtcttggggtggtccccgaatcttggcctcggggatcaagggacccgggtcgggtcccaaggggctcggggcgggggaaaccggggcttcgtcttccggtctccttcttccgccgggcgtgctcccc

SEQ ID NO: 437770 - DNA, 2386 bp, Homo sapiens
aaaggcagggctgggcctgcgggagcgcggccttgcggttcccaggactcttctccgggcgcctcgtctccttacgccacccgcaacccaagccagggccccggtgacagcggcggggtgggccaggaccggggagggggtgcccagcagcgacccccggctccccctaaggccgggcgcagctcggagccaggagctggcccggcgcgtggcttcccggaaggcccggcgcagccggaaggtgggacggagggcggggccagcgccggggccgccaccaaggcctgcgcgaccctccgcggggctggggagctgggcggggagcccggggcctgccaggcccgggctgcagccgcgtctgatcgccgagcgcgccgcgtagacctccgctcccccaggcccgccacgatgactatcatggtggaggacatcatgaagctgctgtgctccctttctggggagaggaagatgaaggcggctgtcaagcactctgggaagggtgccctggtcacaggggccatggccttcgtcgggggtttggtgggcggcccaccgggactcgccgttgggggggctgtcggggggctgttaggtgcctggatgacaagtggacagtttaagccggttcctcagatcctaatggagctgccccctgccgagcaacagaggctctttaacgaagccgcagccatcatcaggcacctggagtggacggacgccgtgcagctgaccgcgctggtcatgggcagcgaggccctgcagcagcagctgctggccatgctggtgaactacgtcaccaaggagctgcgggccgagatccagtatgatgactaggccgcacctccggggaggtggggggcccctttaaatgactctgtgattctgaagaggtggcttgggagttgggagaagcccagcggatgccccctggggaatctccacatcatcagtgtattactagtaatgtcccgctggagaggccaccgctgtgcagtgtcatgttccagaaattactgatgaagcagcatgtgttggtggcatgtgcactggcctgccatgacagccctctgactggccccccagtgaagagtaaaggcctgcctgccgcaggcttcggaggcgtctgctgagtcctctcacccgcatgggtctggggaagtgatcacgctcagccgacggtctgaccacacttcatcctccccccggggccttctcatcttgggagatgactcctcttcagagcacctgctgcaggactggatcccacccccctgcaggtcctggggtctcagggccttggagcagcccatgctggaatcatgtttacctcctagtgcaaccgtcccctacccagggactgtcgaatggccccacggaggggacgggcggcctgctgagtgaagccacaaataccgagtggacttgaccccggcccccactaggctgcacacctagactcgccctgccagggcctcgctcttcccatctgaaaagtcctggtagttcttgaggtttacttctcaaatgaaatatttttagtaaaaagtacaggtatatctcggagatattgtgggttcagttccagaccacctcggtaaagccaacatcacaataaagcaaggaagcgcattgttttagtttcccagtgcatctaagtcatgtttactgcatattgcagtccactaaatgtgcaatagcattatgtctaacaaatatacaaaccttaatttaaaaatatttactgttcaaaatgctgacacagaaacgcaaagtgagcacatgctgttggaaaatggtgccaaatagacttgcctgatgccaggctgctacaaaccttcaatttaaaaaaaaaacacagtattcacaaagcatagtagaatgaggtatgcctgtattgctctttctgaagtggtgtgatataaaccatctctaagaaatgtttctaccctaaagatttccccagtacagtcagctctccgtaactgtggtctccacatttagatccaaccagccttggataggaaatatttgaaaaaagaaattgcattggtactgaacacgtacagacctttttttcttgccattattccctaaacaatatggtgtagcatatttacatagcatttatattgtatttggtattataagaaatctagagatgatttaaattatacaggaaggtgtgcgtaggttacgtgcaaacgctatgccattgcccatcagggacttgagcatcctcagatgtcggtgtctgagggttgaggttgcagtcctggaacccatcccccatggatactgaggcatagctgtactgtgtgttttcactttgctttcagaactacgacttgaatgtgatcgattacaataaatgtttttctaaaaagcc

SEQ ID NO: 437771 - DNA, 2138 bp, Homo sapiens
caagagcaggcctggagacccgggagtgccttggggagagggtccccgccctgccgggagcccggccctcccggtgccggggtggacactgttagtgtagtcattgtccctatggagaaactgaggcatggagaggctgaagtcacacaagcccgccacgatgactatcatggtggaggacatcatgaagctgctgtgctccctttctggggagaggaagatgaaggcggctgtcaagcactctgggaagggtgccctggtcacaggggccatggccttcgtcgggggtttggtgggcggcccaccgggactcgccgttgggggggctgtcggggggctgttaggtgcctggatgacaagtggacagtttaagccggttcctcagatcctaatggagctgccccctgccgagcaacagaggctctttaacgaagccgcagccatcatcaggcacctggagtggacggacgccgtgcagctgaccgcgctggtcatgggcagcgaggccctgcagcagcagctgctggccatgctggtgaactacgtcaccaaggagctgcgggccgagatccagtatgatgactaggccgcacctccggggaggtggggggcccctttaaatgactctgtgattctgaagaggtggcttgggagttgggagaagcccagcggatgccccctggggaatctccacatcatcagtgtattactagtaatgtcccgctggagaggccaccgctgtgcagtgtcatgttccagaaattactgatgaagcagcatgtgttggtggcatgtgcactggcctgccatgacagccctctgactggccccccagtgaagagtaaaggcctgcctgccgcaggcttcggaggcgtctgctgagtcctctcacccgcatgggtctggggaagtgatcacgctcagccgacggtctgaccacacttcatcctccccccggggccttctcatcttgggagatgactcctcttcagagcacctgctgcaggactggatcccacccccctgcaggtcctggggtctcagggccttggagcagcccatgctggaatcatgtttacctcctagtgcaaccgtcccctacccagggactgtcgaatggccccacggaggggacgggcggcctgctgagtgaagccacaaataccgagtggacttgaccccggcccccactaggctgcacacctagactcgccctgccagggcctcgctcttcccatctgaaaagtcctggtagttcttgaggtttacttctcaaatgaaatatttttagtaaaaagtacaggtatatctcggagatattgtgggttcagttccagaccacctcggtaaagccaacatcacaataaagcaaggaagcgcattgttttagtttcccagtgcatctaagtcatgtttactgcatattgcagtccactaaatgtgcaatagcattatgtctaacaaatatacaaaccttaatttaaaaatatttactgttcaaaatgctgacacagaaacgcaaagtgagcacatgctgttggaaaatggtgccaaatagacttgcctgatgccaggctgctacaaaccttcaatttaaaaaaaaaacacagtattcacaaagcatagtagaatgaggtatgcctgtattgctctttctgaagtggtgtgatataaaccatctctaagaaatgtttctaccctaaagatttccccagtacagtcagctctccgtaactgtggtctccacatttagatccaaccagccttggataggaaatatttgaaaaaagaaattgcattggtactgaacacgtacagacctttttttcttgccattattccctaaacaatatggtgtagcatatttacatagcatttatattgtatttggtattataagaaatctagagatgatttaaattatacaggaaggtgtgcgtaggttacgtgcaaacgctatgccattgcccatcagggacttgagcatcctcagatgtcggtgtctgagggttgaggttgcagtcctggaacccatcccccatggatactgaggcatagctgtactgtgtgttttcactttgctttcagaactacgacttgaatgtgatcgattacaataaatgtttttctaaaaagcc

SEQ ID NO: 437772 - DNA, 2507 bp, Homo sapiens
cttagaagggaggtatctgaccctctgctcagggcccactgcaggtcagtgcccgtgtggtcacagggtcccatcccttccctggctctggcttggcctcagctcagatgcctcacgccgggacttcccgttctctgctgggctttgtgtgcagggcattccccgggccagtgcaaaggccactaatgccagaagggtcagaccacctccctcgtgatgaaccagcagaacatgtggccgggttgctccttaatctgtcgtaagtcagaagttaatcagagggcaaagaagacctttcatccactcagctgctgctatttgcttattcactaactgctgcctgtcctgtctgtgggaactttccaccgtctggatgctgtctgtcatacaggcgcttggagctgctgagctttcctgaaaagggggacccttccttaaaactctaggaactagagtggcattgtgatggaaatactcttatgctcattgaaactgtccctctgaacttctccctcgaaggcccgccacgatgactatcatggtggaggacatcatgaagctgctgtgctccctttctggggagaggaagatgaaggcggctgtcaagcactctgggaagggtgccctggtcacaggggccatggccttcgtcgggggtttggtgggcggcccaccgggactcgccgttgggggggctgtcggggggctgttaggtgcctggatgacaagtggacagtttaagccggttcctcagatcctaatggagctgccccctgccgagcaacagaggctctttaacgaagccgcagccatcatcaggcacctggagtggacggacgccgtgcagctgaccgcgctggtcatgggcagcgaggccctgcagcagcagctgctggccatgctggtgaactacgtcaccaaggagctgcgggccgagatccagtatgatgactaggccgcacctccggggaggtggggggcccctttaaatgactctgtgattctgaagaggtggcttgggagttgggagaagcccagcggatgccccctggggaatctccacatcatcagtgtattactagtaatgtcccgctggagaggccaccgctgtgcagtgtcatgttccagaaattactgatgaagcagcatgtgttggtggcatgtgcactggcctgccatgacagccctctgactggccccccagtgaagagtaaaggcctgcctgccgcaggcttcggaggcgtctgctgagtcctctcacccgcatgggtctggggaagtgatcacgctcagccgacggtctgaccacacttcatcctccccccggggccttctcatcttgggagatgactcctcttcagagcacctgctgcaggactggatcccacccccctgcaggtcctggggtctcagggccttggagcagcccatgctggaatcatgtttacctcctagtgcaaccgtcccctacccagggactgtcgaatggccccacggaggggacgggcggcctgctgagtgaagccacaaataccgagtggacttgaccccggcccccactaggctgcacacctagactcgccctgccagggcctcgctcttcccatctgaaaagtcctggtagttcttgaggtttacttctcaaatgaaatatttttagtaaaaagtacaggtatatctcggagatattgtgggttcagttccagaccacctcggtaaagccaacatcacaataaagcaaggaagcgcattgttttagtttcccagtgcatctaagtcatgtttactgcatattgcagtccactaaatgtgcaatagcattatgtctaacaaatatacaaaccttaatttaaaaatatttactgttcaaaatgctgacacagaaacgcaaagtgagcacatgctgttggaaaatggtgccaaatagacttgcctgatgccaggctgctacaaaccttcaatttaaaaaaaaaacacagtattcacaaagcatagtagaatgaggtatgcctgtattgctctttctgaagtggtgtgatataaaccatctctaagaaatgtttctaccctaaagatttccccagtacagtcagctctccgtaactgtggtctccacatttagatccaaccagccttggataggaaatatttgaaaaaagaaattgcattggtactgaacacgtacagacctttttttcttgccattattccctaaacaatatggtgtagcatatttacatagcatttatattgtatttggtattataagaaatctagagatgatttaaattatacaggaaggtgtgcgtaggttacgtgcaaacgctatgccattgcccatcagggacttgagcatcctcagatgtcggtgtctgagggttgaggttgcagtcctggaacccatcccccatggatactgaggcatagctgtactgtgtgttttcactttgctttcagaactacgacttgaatgtgatcgattacaataaatgtttttctaaaaagcc

SEQ ID NO: 437773 - DNA, 4307 bp, Homo sapiens
aaaggcagggctgggcctgcgggagcgcggccttgcggttcccaggactcttctccgggcgcctcgtctccttacgccacccgcaacccaagccagggccccggtgacagcggcggggtgggccaggaccggggagggggtgcccagcagcgacccccggctccccctaaggccgggcgcagctcggagccaggagctggcccggcgcgtggcttcccggaaggcccggcgcagccggaaggtgggacggagggcggggccagcgccggggccgccaccaaggcctgcgcgaccctccgcggggctggggagctgggcggggagcccggggcctgccaggcccgggctgcagccgcgtctgatcgccgagcgcgccgcgtagacctccgctcccccaggcccgccacgatgactatcatggtggaggacatcatgaagctgctgtgctccctttctggggagaggaagatgaaggcggctgtcaagcactctgggaagggtgccctggtcacaggggccatggccttcgtcgggggtttggtgggcggcccaccgggactcgccgttgggggggctgtcggggggctgttaggtgcctggatgacaagtggacagtttaagccggttcctcagatcctaatggagctgccccctgccgagcaacagaggctctttaacgaagccgcagccatcatcaggcacctggagtggacggacgccgtgcagctgaccgcgctggtcatgggcagcgaggccctgcagcagcagctgctggccatgctggtgaactacgtcaccaaggagctgcgggccgagatccagtatgatgactaggccgcacctccggggaggtggggggcccctttaaatgactctgtgattctgaagaggtggcttgggagttgggagaagcccagcggatgccccctggggaatctccacatcatcagtgtattactagtaatgtcccgctggagaggccaccgctgtgcagtgtcatgttccagaaattactgatgaagcagcatgtgttggtggcatgtgcactggcctgccatgacagccctctgactggccccccagtgaagagtaaaggcctgcctgccgcaggcttcggaggcgtctgctgagtcctctcacccgcatgggtctggggaagtgatcacgctcagccgacggtctgaccacacttcatcctccccccggggccttctcatcttgggagatgactcctcttcagagcacctgctgcaggactggatcccacccccctgcaggtcctggggtctcagggccttggagcagcccatgctggaatcatgtttacctcctagtgcaaccgtcccctacccagggactgtcgaatggccccacggaggggacgggcggcctgctgagtgaagccacaaataccgagtggacttgaccccggcccccactaggctgcacacctagactcgccctgccagggcctcgctcttcccatctgaaaagtcctggtagttcttgaggtttacttctcaaatgaaatatttttagtaaaaagtacaggtatatctcggagatattgtgggttcagttccagaccacctcggtaaagccaacatcacaataaagcaaggaagcgcattgttttagtttcccagtgcatctaagtcatgtttactgcatattgcagtccactaaatgtgcaatagcattatgtctaacaaatatacaaaccttaatttaaaaatatttactgttcaaaatgctgacacagaaacgcaaagtgagcacatgctgttggaaaatggtgccaaatagacttgcctgatgccaggctgctacaaaccttcaatttaaaaaaaaaacacagtattcacaaagcatagtagaatgaggtatgcctgtattgctctttctgaagtggtgtgatataaaccatctctaagaaatgtttctaccctaaagatttccccagtacagtcagctctccgtaactgtggtctccacatttagatccaaccagccttggataggaaatatttgaaaaaagaaattgcattggtactgaacacgtacagacctttttttcttgccattattccctaaacaatatggtgtagcatatttacatagcatttatattgtatttggtattataagaaatctagagatgatttaaattatacaggaaggtgtgcgtaggttacgtgcaaacgctatgccattgcccatcagggacttgagcatcctcagatgtcggtgtctgagggttgaggttgcagtcctggaacccatcccccatggatactgaggcatagctgtactgtgtgttttcactttgctttcagaactacgacttgaatgtgatcgattacaataaatgtttttctaaaaagccattttcccacatattatgtgtaaaatatctctaatattcaaagtcttacaaatggaacaagagggaaggtaccagatttgtggctttaaagaatgcaagagtaggtcaggtgaggtggctcatgcttgtaatgtcggcacttttggaggccaaagtgggaggatcgcttgaggccaagagtttgaaactagcctgggcaatatagtgagacctccatctctacaaaaaatgttattccttggtccccaggtcctggggcagggcagggacttggggctctcctctcaggccctggaggctcggagggaggcacttctgctgaggccctgcttataggaaagctcagtatcctggcacctccatgtgtgtaaggacgtcagggtgaattataacccatggtgattaaggaagggccgagcctttctcttgcagagcgattgctcttctgctggcctcgtctagcacaaatcaggtgccctagcacaggccacactcctggagttaatgaagccactttaatcatttatatgccacttaagttgatgggggacagggcaggggtgggaaggaggggttgtctgtctgtgaaaactgagtgtggcttttcttgttgaactgatcattcctgctcttcctgcaaataagtcctgcatacggaccctggaactaaaaatggaaaatcagagcatgccccctcccaattttgtatagctttagtgggctctaaagttgcccgtttttagtgtgaaggaaaaaacgttgatttgcagatatcgtgagaatgaaacctcaacaaagatgtttggttcagtgcttcaaagttgggggacactttttccatgttgaacaaatgccaacttctccggttgcttacagcaaatccttctggaacaatcggggctgaaattgagttgcctttgttaggcgattgggccccattcattcttactcgtgcatcaggtcctggtctgtgtcaggcccaggggacacaggtggtcccagctcagaggcccagtgtccactgcagcccctcccacagcctgcccacccctactgcagggaaaaatgcccagggaggagatggtccaactcctgatcagttttgttcccatgccgaccccagaggcagccactgttaccaatttcatgtgtattcctttaactctgttttaaagtaagtctctgaaaactgttcatttccttttgtcagtatttgttgctgaaaacctagaaaaacccagaaaagtataatgaaataaaaactacaaatttcacaacccagaaaactgctggtaacagatttggtgtctttcctgcaattgttttaatgctatgtaggtacacatatatttttttctttttttcttttttttttgagatggagtctcgcactgtcgcccgggctggagtgcagtagcgcgatcttggttcactgcaagctctgcctcctgggttcaagccattctcctgcctcagcctcccgagtagctttgactacagtcgcccgccaccatgcccggctaatttttatttttttattttttttttatttttagtagagacggggtttcaccatgttggccaggatggtctcaatctccttacctcgtgatctgcccacctcagcctcccagagtgctgggattacaggcgtgagccactgcgcccggcctatgtatgtatatttctaacgtacttgccttcttatcctatatgcccctttgaacacctgtatcaatgaatgttaaataatatttttgatgtaatttaaaattccttgtaaatatttgtaatggctgcataatattccactgtgcctaaccatgtgcctggtgtgaattccatttgtggatttttactactgtaatgctgaagtattacagtaatactgtgttaatattctctttattgaattctggta

SEQ ID NO: 437774 - DNA, 4849 bp, Homo sapiens
cttagaagggaggtatctgaccctctgctcagggcccactgcaggtcagtgcccgtgtggtcacagggtcccatcccttccctggctctggcttggcctcagctcagatgcctcacgccgggacttcccgttctctgctgggctttgtgtgcagggcattccccgggccagtgcaaaggccactaatgccagaagggtcagaccacctccctcgtgatgaaccagcagaacatgtggccgggttgctccttaatctgtcgtaagtcagaagttaatcagagggcaaagaagacctttcatccactcagctgctgctatttgcttattcactaactgctgcctgtcctgtctgtgggaactttccaccgtctggatgctgtctgtcatacaggcgcttggagctgctgagctttcctgaaaagggggacccttccttaaaactctaggaactagagtggcattgtgatggaaatactcttatgctcattgaaactgtccctctgaacttctccctcgaaggcccgccacgatgactatcatggtggaggacatcatgaagctgctgtgctccctttctggggagaggaagatgaaggcggctgtcaagcactctgggaagggtgccctggtcacaggggccatggccttcgtcgggggtttggtgggcggcccaccgggactcgccgttggatccagtctaagacaccgcattgcattgaatcgcctgctttcttagtctcctctggcctttaacactttctcagacttgccttgttcacagccttgatagttttgaggagtactgggcagggggggctgtcggggggctgttaggtgcctggatgacaagtggacagtttaagccggttcctcagatcctaatggagctgccccctgccgagcaacagaggctctttaacgaagccgcagccatcatcaggcacctggagtggacggacgccgtgcagctgaccgcgctggtcatgggcagcgaggccctgcagcagcagctgctggccatgctggtgaactacgtcaccaaggagctgcgggccgagatccagtatgatgactaggccgcacctccggggaggtggggggcccctttaaatgactctgtgattctgaagaggtggcttgggagttgggagaagcccagcggatgccccctggggaatctccacatcatcagtgtattactagtaatgtcccgctggagaggccaccgctgtgcagtgtcatgttccagaaattactgatgaagcagcatgtgttggtggcatgtgcactggcctgccatgacagccctctgactggccccccagtgaagagtaaaggcctgcctgccgcaggcttcggaggcgtctgctgagtcctctcacccgcatgggtctggggaagtgatcacgctcagccgacggtctgaccacacttcatcctccccccggggccttctcatcttgggagatgactcctcttcagagcacctgctgcaggactggatcccacccccctgcaggtcctggggtctcagggccttggagcagcccatgctggaatcatgtttacctcctagtgcaaccgtcccctacccagggactgtcgaatggccccacggaggggacgggcggcctgctgagtgaagccacaaataccgagtggacttgaccccggcccccactaggctgcacacctagactcgccctgccagggcctcgctcttcccatctgaaaagtcctggtagttcttgaggtttacttctcaaatgaaatatttttagtaaaaagtacaggtatatctcggagatattgtgggttcagttccagaccacctcggtaaagccaacatcacaataaagcaaggaagcgcattgttttagtttcccagtgcatctaagtcatgtttactgcatattgcagtccactaaatgtgcaatagcattatgtctaacaaatatacaaaccttaatttaaaaatatttactgttcaaaatgctgacacagaaacgcaaagtgagcacatgctgttggaaaatggtgccaaatagacttgcctgatgccaggctgctacaaaccttcaatttaaaaaaaaaacacagtattcacaaagcatagtagaatgaggtatgcctgtattgctctttctgaagtggtgtgatataaaccatctctaagaaatgtttctaccctaaagatttccccagtacagtcagctctccgtaactgtggtctccacatttagatccaaccagccttggataggaaatatttgaaaaaagaaattgcattggtactgaacacgtacagacctttttttcttgccattattccctaaacaatatggtgtagcatatttacatagcatttatattgtatttggtattataagaaatctagagatgatttaaattatacaggaaggtgtgcgtaggttacgtgcaaacgctatgccattgcccatcagggacttgagcatcctcagatgtcggtgtctgagggttgaggttgcagtcctggaacccatcccccatggatactgaggcatagctgtactgtgtgttttcactttgctttcagaactacgacttgaatgtgatcgattacaataaatgtttttctaaaaagccattttcccacatattatgtgtaaaatatctctaatattcaaagtcttacaaatggaacaagagggaaggtaccagatttgtggctttaaagaatgcaagagtaggtcaggtgaggtggctcatgcttgtaatgtcggcacttttggaggccaaagtgggaggatcgcttgaggccaagagtttgaaactagcctgggcaatatagtgagacctccatctctacaaaaaatgttattccttggtccccaggtcctggggcagggcagggacttggggctctcctctcaggccctggaggctcggagggaggcacttctgctgaggccctgcttataggaaagctcagtatcctggcacctccatgtgtgtaaggacgtcagggtgaattataacccatggtgattaaggaagggccgagcctttctcttgcagagcgattgctcttctgctggcctcgtctagcacaaatcaggtgccctagcacaggccacactcctggagttaatgaagccactttaatcatttatatgccacttaagttgatgggggacagggcaggggtgggaaggaggggttgtctgtctgtgaaaactgagtgtggcttttcttgttgaactgatcattcctgctcttcctgcaaataagtcctgcatacggaccctggaactaaaaatggaaaatcagagcatgccccctcccaattttgtatagctttagtgggctctaaagttgcccgtttttagtgtgaaggaaaaaacgttgatttgcagatatcgtgagaatgaaacctcaacaaagatgtttggttcagtgcttcaaagttgggggacactttttccatgttgaacaaatgccaacttctccggttgcttacagcaaatccttctggaacaatcggggctgaaattgagttgcctttgttaggcgattgggccccattcattcttactcgtgcatcaggtcctggtctgtgtcaggcccaggggacacaggtggtcccagctcagaggcccagtgtccactgcagcccctcccacagcctgcccacccctactgcagggaaaaatgcccagggaggagatggtccaactcctgatcagttttgtgtccgatggagcaggccttgctgagtgaagacactggaactagctgggtcctggggtgacttggaggctttgggcctaaaagggcagcctgaacctggagtcttatctcccccaggagccgaaagcactttttcttgatttcccccaggaaatcaagcgctgcttctcagctcctgtggttttagtatttatatatctgtatcttctttgtagaaatttatttatttttgaataagtaatacctgcctggtacaaaatttaaaaggtacgggagggcgcaagctgcaagggaaggcctgctcccatgccgaccccagaggcagccactgttaccaatttcatgtgtattcctttaactctgttttaaagtaagtctctgaaaactgttcatttccttttgtcagtatttgttgctgaaaacctagaaaaacccagaaaagtataatgaaataaaaactacaaatttcacaacccagaaaactgctggtaacagatttggtgtctttcctgcaattgttttaatgctatgtaggtacacatatatttttttctttttttcttttttttttgagatggagtctcgcactgtcgcccgggctggagtgcagtagcgcgatcttggttcactgcaagctctgcctcctgggttcaagccattctcctgcctcagcctcccgagtagctttgactacagtcgcccgccaccatgcccggctaatttttatttttttattttttttttatttttagtagagacggggtttcaccatgttggccaggatggtctcaatctccttacctcgtgatctgcccacctcagcctcccagagtgctgggattacaggcgtgagccactgcgcccggcctatgtatgtatatttctaacgtacttgccttcttatcctatatgcccctttgaacacctgtatcaatgaatgttaaataatatttttgatgtaatttaaaattccttgtaaatatttgtaatggctgcataatattccactgtgcctaaccatgtgcctggtgtgaattccatttgtggatttttactactgtaatgctgaagtattacagtaatactgtgttaatattctctttattgaattctggta

SEQ ID NO: 437775 - DNA, 4807 bp, Homo sapiens
tctcggctcactgcaacctctacttcccgggttcaagtgattctcctgcctcagcttccaagtatctgggattacaggcatgtgcccccaagcccagctaatttttgtatttttagtagagatggtgtttcacctgaggtcaggagttcaagaccagcctgccaacatggtgaaaccctgtttctacaaaaatacaaaaattagccaggtgtggtggtgtgcgcctgtaatcccagctacttgggaggctgaggtgggagaatcgcttgaacctgggaggcagaggttgcagcgagccaagatcatgccattgcactccagcctgggcaacagagcaagactccgtctcaaaaaaaaaaaaaaaaaaagaaaagaaaaagaaaatgcttttgtttctcagccttctccttggtgattagagagggatttttacagtaagcccagaaacctccgtcagctcatgaagaagaaagtgggcccagcactgaggtgggagatggggcaggcaggcttcattttgcatccttaaatgtggagcccagggaatgcatgtggggtgtcaattatctgagccaaatggacagaagactgataaacctttgccctccacactggctggcggagcaggcgtggcaccggttgagcccgctgcagcccgctcatgaatgtgcctgctcatggtgatggtggtgtgcactcagtgggaacttaagtaaggccatcgcttatgaataagacccactaattgaacgattccatgttttctagggggggctgtcggggggctgttaggtgcctggatgacaagtggacagtttaagccggttcctcagatcctaatggagctgccccctgccgagcaacagaggctctttaacgaagccgcagccatcatcaggcacctggagtggacggacgccgtgcagctgaccgcgctggtcatgggcagcgaggccctgcagcagcagctgctggccatgctggtgaactacgtcaccaaggagctgcgggccgagatccagtatgatgactaggccgcacctccggggaggtggggggcccctttaaatgactctgtgattctgaagaggtggcttgggagttgggagaagcccagcggatgccccctggggaatctccacatcatcagtgtattactagtaatgtcccgctggagaggccaccgctgtgcagtgtcatgttccagaaattactgatgaagcagcatgtgttggtggcatgtgcactggcctgccatgacagccctctgactggccccccagtgaagagtaaaggcctgcctgccgcaggcttcggaggcgtctgctgagtcctctcacccgcatgggtctggggaagtgatcacgctcagccgacggtctgaccacacttcatcctccccccggggccttctcatcttgggagatgactcctcttcagagcacctgctgcaggactggatcccacccccctgcaggtcctggggtctcagggccttggagcagcccatgctggaatcatgtttacctcctagtgcaaccgtcccctacccagggactgtcgaatggccccacggaggggacgggcggcctgctgagtgaagccacaaataccgagtggacttgaccccggcccccactaggctgcacacctagactcgccctgccagggcctcgctcttcccatctgaaaagtcctggtagttcttgaggtttacttctcaaatgaaatatttttagtaaaaagtacaggtatatctcggagatattgtgggttcagttccagaccacctcggtaaagccaacatcacaataaagcaaggaagcgcattgttttagtttcccagtgcatctaagtcatgtttactgcatattgcagtccactaaatgtgcaatagcattatgtctaacaaatatacaaaccttaatttaaaaatatttactgttcaaaatgctgacacagaaacgcaaagtgagcacatgctgttggaaaatggtgccaaatagacttgcctgatgccaggctgctacaaaccttcaatttaaaaaaaaaacacagtattcacaaagcatagtagaatgaggtatgcctgtattgctctttctgaagtggtgtgatataaaccatctctaagaaatgtttctaccctaaagatttccccagtacagtcagctctccgtaactgtggtctccacatttagatccaaccagccttggataggaaatatttgaaaaaagaaattgcattggtactgaacacgtacagacctttttttcttgccattattccctaaacaatatggtgtagcatatttacatagcatttatattgtatttggtattataagaaatctagagatgatttaaattatacaggaaggtgtgcgtaggttacgtgcaaacgctatgccattgcccatcagggacttgagcatcctcagatgtcggtgtctgagggttgaggttgcagtcctggaacccatcccccatggatactgaggcatagctgtactgtgtgttttcactttgctttcagaactacgacttgaatgtgatcgattacaataaatgtttttctaaaaagccattttcccacatattatgtgtaaaatatctctaatattcaaagtcttacaaatggaacaagagggaaggtaccagatttgtggctttaaagaatgcaagagtaggtcaggtgaggtggctcatgcttgtaatgtcggcacttttggaggccaaagtgggaggatcgcttgaggccaagagtttgaaactagcctgggcaatatagtgagacctccatctctacaaaaaatgttattccttggtccccaggtcctggggcagggcagggacttggggctctcctctcaggccctggaggctcggagggaggcacttctgctgaggccctgcttataggaaagctcagtatcctggcacctccatgtgtgtaaggacgtcagggtgaattataacccatggtgattaaggaagggccgagcctttctcttgcagagcgattgctcttctgctggcctcgtctagcacaaatcaggtgccctagcacaggccacactcctggagttaatgaagccactttaatcatttatatgccacttaagttgatgggggacagggcaggggtgggaaggaggggttgtctgtctgtgaaaactgagtgtggcttttcttgttgaactgatcattcctgctcttcctgcaaataagtcctgcatacggaccctggaactaaaaatggaaaatcagagcatgccccctcccaattttgtatagctttagtgggctctaaagttgcccgtttttagtgtgaaggaaaaaacgttgatttgcagatatcgtgagaatgaaacctcaacaaagatgtttggttcagtgcttcaaagttgggggacactttttccatgttgaacaaatgccaacttctccggttgcttacagcaaatccttctggaacaatcggggctgaaattgagttgcctttgttaggcgattgggccccattcattcttactcgtgcatcaggtcctggtctgtgtcaggcccaggggacacaggtggtcccagctcagaggcccagtgtccactgcagcccctcccacagcctgcccacccctactgcagggaaaaatgcccagggaggagatggtccaactcctgatcagttttgtgtccgatggagcaggccttgctgagtgaagacactggaactagctgggtcctggggtgacttggaggctttgggcctaaaagggcagcctgaacctggagtcttatctcccccaggagccgaaagcactttttcttgatttcccccaggaaatcaagcgctgcttctcagctcctgtggttttagtatttatatatctgtatcttctttgtagaaatttatttatttttgaataagtaatacctgcctggtacaaaatttaaaaggtacgggagggcgcaagctgcaagggaaggcctgctcccatgccgaccccagaggcagccactgttaccaatttcatgtgtattcctttaactctgttttaaagtaagtctctgaaaactgttcatttccttttgtcagtatttgttgctgaaaacctagaaaaacccagaaaagtataatgaaataaaaactacaaatttcacaacccagaaaactgctggtaacagatttggtgtctttcctgcaattgttttaatgctatgtaggtacacatatatttttttctttttttcttttttttttgagatggagtctcgcactgtcgcccgggctggagtgcagtagcgcgatcttggttcactgcaagctctgcctcctgggttcaagccattctcctgcctcagcctcccgagtagctttgactacagtcgcccgccaccatgcccggctaatttttatttttttattttttttttatttttagtagagacggggtttcaccatgttggccaggatggtctcaatctccttacctcgtgatctgcccacctcagcctcccagagtgctgggattacaggcgtgagccactgcgcccggcctatgtatgtatatttctaacgtacttgccttcttatcctatatgcccctttgaacacctgtatcaatgaatgttaaataatatttttgatgtaatttaaaattccttgtaaatatttgtaatggctgcataatattccactgtgcctaaccatgtgcctggtgtgaattccatttgtggatttttactactgtaatgctgaagtattacagtaatactgtgttaatattctctttattgaattctggta

SEQ ID NO: 437776 - DNA, 4552 bp, Homo sapiens
aaaggcagggctgggcctgcgggagcgcggccttgcggttcccaggactcttctccgggcgcctcgtctccttacgccacccgcaacccaagccagggccccggtgacagcggcggggtgggccaggaccggggagggggtgcccagcagcgacccccggctccccctaaggccgggcgcagctcggagccaggagctggcccggcgcgtggcttcccggaaggcccggcgcagccggaaggtgggacggagggcggggccagcgccggggccgccaccaaggcctgcgcgaccctccgcggggctggggagctgggcggggagcccggggcctgccaggcccgggctgcagccgcgtctgatcgccgagcgcgccgcgtagacctccgctcccccaggcccgccacgatgactatcatggtggaggacatcatgaagctgctgtgctccctttctggggagaggaagatgaaggcggctgtcaagcactctgggaagggtgccctggtcacaggggccatggccttcgtcgggggtttggtgggcggcccaccgggactcgccgttgggggggctgtcggggggctgttaggtgcctggatgacaagtggacagtttaagccggttcctcagatcctaatggagctgccccctgccgagcaacagaggctctttaacgaagccgcagccatcatcaggccctgcagcagcagctgctggccatgctggtgaactacgtcaccaaggagctgcgggccgagatccagtatgatgactaggccgcacctccggggaggtggggggcccctttaaatgactctgtgattctgaagaggtggcttgggagttgggagaagcccagcggatgccccctggggaatctccacatcatcagtgtattactagtaatgtcccgctggagaggccaccgctgtgcagtgtcatgttccagaaattactgatgaagcagcatgtgttggtggcatgtgcactggcctgccatgacagccctctgactggccccccagtgaagagtaaaggcctgcctgccgcaggcttcggaggcgtctgctgagtcctctcacccgcatgggtctggggaagtgatcacgctcagccgacggtctgaccacacttcatcctccccccggggccttctcatcttgggagatgactcctcttcagagcacctgctgcaggactggatcccacccccctgcaggtcctggggtctcagggccttggagcagcccatgctggaatcatgtttacctcctagtgcaaccgtcccctacccagggactgtcgaatggccccacggaggggacgggcggcctgctgagtgaagccacaaataccgagtggacttgaccccggcccccactaggctgcacacctagactcgccctgccagggcctcgctcttcccatctgaaaagtcctggtagttcttgaggtttacttctcaaatgaaatatttttagtaaaaagtacaggtatatctcggagatattgtgggttcagttccagaccacctcggtaaagccaacatcacaataaagcaaggaagcgcattgttttagtttcccagtgcatctaagtcatgtttactgcatattgcagtccactaaatgtgcaatagcattatgtctaacaaatatacaaaccttaatttaaaaatatttactgttcaaaatgctgacacagaaacgcaaagtgagcacatgctgttggaaaatggtgccaaatagacttgcctgatgccaggctgctacaaaccttcaatttaaaaaaaaaacacagtattcacaaagcatagtagaatgaggtatgcctgtattgctctttctgaagtggtgtgatataaaccatctctaagaaatgtttctaccctaaagatttccccagtacagtcagctctccgtaactgtggtctccacatttagatccaaccagccttggataggaaatatttgaaaaaagaaattgcattggtactgaacacgtacagacctttttttcttgccattattccctaaacaatatggtgtagcatatttacatagcatttatattgtatttggtattataagaaatctagagatgatttaaattatacaggaaggtgtgcgtaggttacgtgcaaacgctatgccattgcccatcagggacttgagcatcctcagatgtcggtgtctgagggttgaggttgcagtcctggaacccatcccccatggatactgaggcatagctgtactgtgtgttttcactttgctttcagaactacgacttgaatgtgatcgattacaataaatgtttttctaaaaagccattttcccacatattatgtgtaaaatatctctaatattcaaagtcttacaaatggaacaagagggaaggtaccagatttgtggctttaaagaatgcaagagtaggtcaggtgaggtggctcatgcttgtaatgtcggcacttttggaggccaaagtgggaggatcgcttgaggccaagagtttgaaactagcctgggcaatatagtgagacctccatctctacaaaaaatgttattccttggtccccaggtcctggggcagggcagggacttggggctctcctctcaggccctggaggctcggagggaggcacttctgctgaggccctgcttataggaaagctcagtatcctggcacctccatgtgtgtaaggacgtcagggtgaattataacccatggtgattaaggaagggccgagcctttctcttgcagagcgattgctcttctgctggcctcgtctagcacaaatcaggtgccctagcacaggccacactcctggagttaatgaagccactttaatcatttatatgccacttaagttgatgggggacagggcaggggtgggaaggaggggttgtctgtctgtgaaaactgagtgtggcttttcttgttgaactgatcattcctgctcttcctgcaaataagtcctgcatacggaccctggaactaaaaatggaaaatcagagcatgccccctcccaattttgtatagctttagtgggctctaaagttgcccgtttttagtgtgaaggaaaaaacgttgatttgcagatatcgtgagaatgaaacctcaacaaagatgtttggttcagtgcttcaaagttgggggacactttttccatgttgaacaaatgccaacttctccggttgcttacagcaaatccttctggaacaatcggggctgaaattgagttgcctttgttaggcgattgggccccattcattcttactcgtgcatcaggtcctggtctgtgtcaggcccaggggacacaggtggtcccagctcagaggcccagtgtccactgcagcccctcccacagcctgcccacccctactgcagggaaaaatgcccagggaggagatggtccaactcctgatcagttttgtgtccgatggagcaggccttgctgagtgaagacactggaactagctgggtcctggggtgacttggaggctttgggcctaaaagggcagcctgaacctggagtcttatctcccccaggagccgaaagcactttttcttgatttcccccaggaaatcaagcgctgcttctcagctcctgtggttttagtatttatatatctgtatcttctttgtagaaatttatttatttttgaataagtaatacctgcctggtacaaaatttaaaaggtacgggagggcgcaagctgcaagggaaggcctgctcccatgccgaccccagaggcagccactgttaccaatttcatgtgtattcctttaactctgttttaaagtaagtctctgaaaactgttcatttccttttgtcagtatttgttgctgaaaacctagaaaaacccagaaaagtataatgaaataaaaactacaaatttcacaacccagaaaactgctggtaacagatttggtgtctttcctgcaattgttttaatgctatgtaggtacacatatatttttttctttttttcttttttttttgagatggagtctcgcactgtcgcccgggctggagtgcagtagcgcgatcttggttcactgcaagctctgcctcctgggttcaagccattctcctgcctcagcctcccgagtagctttgactacagtcgcccgccaccatgcccggctaatttttatttttttattttttttttatttttagtagagacggggtttcaccatgttggccaggatggtctcaatctccttacctcgtgatctgcccacctcagcctcccagagtgctgggattacaggcgtgagccactgcgcccggcctatgtatgtatatttctaacgtacttgccttcttatcctatatgcccctttgaacacctgtatcaatgaatgttaaataatatttttgatgtaatttaaaattccttgtaaatatttgtaatggctgcataatattccactgtgcctaaccatgtgcctggtgtgaattccatttgtggatttttactactgtaatgctgaagtattacagtaatactgtgttaatattctctttattgaattctggta

SEQ ID NO: 437777 - DNA, 2172 bp, Homo sapiens
aaaggcagggctgggcctgcgggagcgcggccttgcggttcccaggactcttctccgggcgcctcgtctccttacgccacccgcaacccaagccagggccccggtgacagcggcggggtgggccaggaccggggagggggtgcccagcagcgacccccggctccccctaaggccgggcgcagctcggagccaggagctggcccggcgcgtggcttcccggaaggcccggcgcagccggaaggtgggacggagggcggggccagcgccggggccgccaccaaggcctgcgcgaccctccgcggggctggggagctgggcggggagcccggggcctgccaggcccgggctgcagccgcgtctgatcgccgagcgcgccgcgtagacctccgctcccccaggcccgccacgatgactatcatggtggaggacatcatgaagctgctgtgctccctttctggggagaggaagatgaaggcggctgtcaagcactctgggaagggtgccctggtcacaggggccatggccttcgtcgggggtttggtgggcggcccaccgggactcgccgttgggggggctgtcggggggctgttaggtgcctggatgacaagtggacagtttaagccggttcctcagatcctaatggagctgccccctgccgagcaacagaggctctttaacgaagccgcagccatcatcaggcacctggagtggacggacgccgtgcagctgaccgcgctggtcatgggcagcgaggccctgcagcagcagctgctggccatgctggtgaactacgtcaccaaggagctgcgggccgagatccagtatgatgactaggccgcacctccggggaggtggggggcccctttaaatgactctgtgattctgaagaggtggcttgggagttgggagaagcccagcggatgccccctggggaatctccacatcatcagtgtattactagtaatgtcccgctggagaggccaccgctgtgcagtgtcatgttccagaaattactgatgaagcagcatgtgttggtggcatgtgcactggcctgccatgacagccctctgactggccccccagtgaagagtaaaggcctgcctgccgcaggcttcggaggcgtctgctgagtcctctcacccgcatgggtctggggaagtgatcacgctcagccgacggtctgaccacacttcatcctccccccggggccttctcatcttgggagatgactcctcttcagagcacctgctgcaggactggatcccacccccctgcaggtcctggggtctcagggccttggagcagcccatgctggaatcatgtttacctcctagtgcaaccgtcccctacccagggactgtcgaatggccccacggaggggacgggcggcctgctgagtgaagccacaaataccgagtggacttgaccccggcccccactaggctgcacacctagactcgccctgccagggcctcgctcttcccatctgaaaagtcctggtagttcttgaggtttacttctcaaatgaaatatttttagtaaaaagtacaggtatatctcggagatattgtgggttcagttccagaccacctcggtaaagccaacatcacaataaagcaaggaagcgcattgttttagtttcccagtgcatctaagtcatgtttactgcatattgcagtccactaaatgtgcaatagcattatgtctaacaaatatacaaaccttaatttaaaaatatttactgttcaaaatgctgacacagaaacgcaaagtgagcacatgctgttggaaaatggtgccaaatagacttgcctgatgccaggctgctacaaaccttcaatttaaaaaaaaaacacagtattcacaaagcatagtagaatgaggtatgcctgtattgctctttctgaagtggtgtgatataaaccatctctaagaaatgtttctaccctaaagatttccccagtacagtcagctctccgtaactgtggtctccacatttagatccaaccagccttggataggaaatatttgaaaaaagaaattgcattggtactgaacacgtacagacctttttttcagcccactattagccaactcatatgagtagcatagataaatacgcatatgataattgcatgtctgctacttataagtaatctcagagtactgatc

SEQ ID NO: 437778 - DNA, 1637 bp, Homo sapiens
cttagaagggaggtatctgaccctctgctcagggcccactgcaggtcagtgcccgtgtggtcacagggtcccatcccttccctggctctggcttggcctcagctcagatgcctcacgccgggacttcccgttctctgctgggctttgtgtgcagggcattccccgggccagtgcaaaggccactaatgccagaagggtcagaccacctccctcgtgatgaaccagcagaacatgtggccgggttgctccttaatctgtcgtaagtcagaagttaatcagagggcaaagaagacctttcatccactcagctgctgctatttgcttattcactaactgctgcctgtcctgtctgtgggaactttccaccgtctggatgctgtctgtcatacaggcgcttggagctgctgagctttcctgaaaagggggacccttccttaaaactctaggaactagagtggcattgtgatggaaatactcttatgctcattgaaactgtccctctgaacttctccctcgaaggcccgccacgatgactatcatggtggaggacatcatgaagctgctgtgctccctttctggggagaggaagatgaaggcggctgtcaagcactctgggaagggtgccctggtcacaggggccatggccttcgtcgggggtttggtgggcggcccaccgggactcgccgttggatccagtctaagacaccgcattgcattgaatcgcctgctttcttagtctcctctggcctttaacactttctcagacttgccttgttcacagccttgatagttttgaggagtactgggcaggtatttcgtagaacatctctcagtttgaatttgccagttgtgtttaggatgggactggagttaggagtctttgggaggcatgcctgggaggtgacatgcccctctcccttgtcttgcattaattctgggggtgtgtgatattcacatgacgtcagtgatattcaccttgaacacttggttaagggcatgtttgctgggtttttccactgcaaagtttctgtttccctttccatactctgtctgttgaaagtgagtcactaagtctagtgggcttcatctttaaatatctgattggtgatatttaaaaatcgtgagatgttttaaagctacaaatctggtattttgtgtggtagcaatgaactggcgtgaagtagccactgccactccataggaaccaagctgtccagctcttctgtgtcctgggcctcggaaggtccatgcgattcaaggcttggttggcccagactatagactgggatgaagtcagagcctgccacccatccaatctcagcaggggagaggccgggtaaggcccaaccgccccttcactcttcttagttcctccctggctcttggaggcacttgactttggaccccttccctagggcaccttccgcttctctgcaccatattctgcacgtggcctcttcaggtagaactttccgtggatacaaggtctttaagtcccagaatagcatgacatagccttggcaatgagtttacatttaacaataatgtttctgcccttttagggtggcagaagtagaaatagtaagctaccttacatttgatatttatttttatttttttgagatggagtctcactc

SEQ ID NO: 437779 - DNA, 2216 bp, Homo sapiens
aaaggcagggctgggcctgcgggagcgcggccttgcggttcccaggactcttctccgggcgcctcgtctccttacgccacccgcaacccaagccagggccccggtgacagcggcggggtgggccaggaccggggagggggtgcccagcagcgacccccggctccccctaaggccgggcgcagctcggagccaggagctggcccggcgcgtggcttcccggaaggcccggcgcagccggaaggtgggacggagggcggggccagcgccggggccgccaccaaggcctgcgcgaccctccgcggggctggggagctgggcggggagcccggggcctgccaggcccgggctgcagccgcgtctgatcgccgagcgcgccgcgtagacctccgctcccccagggggggctgtcggggggctgttaggtgcctggatgacaagtggacagtttaagccggttcctcagatcctaatggagctgccccctgccgagcaacagaggctctttaacgaagccgcagccatcatcaggcacctggagtggacggacgccgtgcagctgaccgcgctggtcatgggcagcgaggccctgcagcagcagctgctggccatgctggtgaactacgtcaccaaggagctgcgggccgagatccagtatgatgactaggccgcacctccggggaggtggggggcccctttaaatgactctgtgattctgaagaggtggcttgggagttgggagaagcccagcggatgccccctggggaatctccacatcatcagtgtattactagtaatgtcccgctggagaggccaccgctgtgcagtgtcatgttccagaaattactgatgaagcagcatgtgttggtggcatgtgcactggcctgccatgacagccctctgactggccccccagtgaagagtaaaggcctgcctgccgcaggcttcggaggcgtctgctgagtcctctcacccgcatgggtctggggaagtgatcacgctcagccgacggtctgaccacacttcatcctccccccggggccttctcatcttgggagatgactcctcttcagagcacctgctgcaggactggatcccacccccctgcaggtcctggggtctcagggccttggagcagcccatgctggaatcatgtttacctcctagtgcaaccgtcccctacccagggactgtcgaatggccccacggaggggacgggcggcctgctgagtgaagccacaaataccgagtggacttgaccccggcccccactaggctgcacacctagactcgccctgccagggcctcgctcttcccatctgaaaagtcctggtagttcttgaggtttacttctcaaatgaaatatttttagtaaaaagtacaggtatatctcggagatattgtgggttcagttccagaccacctcggtaaagccaacatcacaataaagcaaggaagcgcattgttttagtttcccagtgcatctaagtcatgtttactgcatattgcagtccactaaatgtgcaatagcattatgtctaacaaatatacaaaccttaatttaaaaatatttactgttcaaaatgctgacacagaaacgcaaagtgagcacatgctgttggaaaatggtgccaaatagacttgcctgatgccaggctgctacaaaccttcaatttaaaaaaaaaacacagtattcacaaagcatagtagaatgaggtatgcctgtattgctctttctgaagtggtgtgatataaaccatctctaagaaatgtttctaccctaaagatttccccagtacagtcagctctccgtaactgtggtctccacatttagatccaaccagccttggataggaaatatttgaaaaaagaaattgcattggtactgaacacgtacagacctttttttcttgccattattccctaaacaatatggtgtagcatatttacatagcatttatattgtatttggtattataagaaatctagagatgatttaaattatacaggaaggtgtgcgtaggttacgtgcaaacgctatgccattgcccatcagggacttgagcatcctcagatgtcggtgtctgagggttgaggttgcagtcctggaacccatcccccatggatactgaggcatagctgtactgtgtgttttcactttgctttcagaactacgacttgaatgtgatcgattacaataaatgtttttctaaaaagcc

SEQ ID NO: 437780 - DNA, 4607 bp, Homo sapiens
aaaggcagggctgggcctgcgggagcgcggccttgcggttcccaggactcttctccgggcgcctcgtctccttacgccacccgcaacccaagccagggccccggtgacagcggcggggtgggccaggaccggggagggggtgcccagcagcgacccccggctccccctaaggccgggcgcagctcggagccaggagctggcccggcgcgtggcttcccggaaggcccggcgcagccggaaggtgggacggagggcggggccagcgccggggccgccaccaaggcctgcgcgaccctccgcggggctggggagctgggcggggagcccggggcctgccaggcccgggctgcagccgcgtctgatcgccgagcgcgccgcgtagacctccgctcccccaggcccgccacgatgactatcatggtggaggacatcatgaagctgctgtgctccctttctggggagaggaagatgaaggcggctgtcaagcactctgggaagggtgccctggtcacaggggccatggccttcgtcgggggtttggtgggcggcccaccgggactcgccgttgggggggctgtcggggggctgttaggtgcctggatgacaagtggacagtttaagccggttcctcagatcctaatggagctgccccctgccgagcaacagaggctctttaacgaagccgcagccatcatcaggcacctggagtggacggacgccgtgcagctgaccgcgctggtcatgggcagcgaggccctgcagcagcagctgctggccatgctggtgaactacgtcaccaaggagctgcgggccgagatccagtatgatgactaggccgcacctccggggaggtggggggcccctttaaatgactctgtgattctgaagaggtggcttgggagttgggagaagcccagcggatgccccctggggaatctccacatcatcagtgtattactagtaatgtcccgctggagaggccaccgctgtgcagtgtcatgttccagaaattactgatgaagcagcatgtgttggtggcatgtgcactggcctgccatgacagccctctgactggccccccagtgaagagtaaaggcctgcctgccgcaggcttcggaggcgtctgctgagtcctctcacccgcatgggtctggggaagtgatcacgctcagccgacggtctgaccacacttcatcctccccccggggccttctcatcttgggagatgactcctcttcagagcacctgctgcaggactggatcccacccccctgcaggtcctggggtctcagggccttggagcagcccatgctggaatcatgtttacctcctagtgcaaccgtcccctacccagggactgtcgaatggccccacggaggggacgggcggcctgctgagtgaagccacaaataccgagtggacttgaccccggcccccactaggctgcacacctagactcgccctgccagggcctcgctcttcccatctgaaaagtcctggtagttcttgaggtttacttctcaaatgaaatatttttagtaaaaagtacaggtatatctcggagatattgtgggttcagttccagaccacctcggtaaagccaacatcacaataaagcaaggaagcgcattgttttagtttcccagtgcatctaagtcatgtttactgcatattgcagtccactaaatgtgcaatagcattatgtctaacaaatatacaaaccttaatttaaaaatatttactgttcaaaatgctgacacagaaacgcaaagtgagcacatgctgttggaaaatggtgccaaatagacttgcctgatgccaggctgctacaaaccttcaatttaaaaaaaaaacacagtattcacaaagcatagtagaatgaggtatgcctgtattgctctttctgaagtggtgtgatataaaccatctctaagaaatgtttctaccctaaagatttccccagtacagtcagctctccgtaactgtggtctccacatttagatccaaccagccttggataggaaatatttgaaaaaagaaattgcattggtactgaacacgtacagacctttttttcttgccattattccctaaacaatatggtgtagcatatttacatagcatttatattgtatttggtattataagaaatctagagatgatttaaattatacaggaaggtgtgcgtaggttacgtgcaaacgctatgccattgcccatcagggacttgagcatcctcagatgtcggtgtctgagggttgaggttgcagtcctggaacccatcccccatggatactgaggcatagctgtactgtgtgttttcactttgctttcagaactacgacttgaatgtgatcgattacaataaatgtttttctaaaaagccattttcccacatattatgtgtaaaatatctctaatattcaaagtcttacaaatggaacaagagggaaggtaccagatttgtggctttaaagaatgcaagagtaggtcaggtgaggtggctcatgcttgtaatgtcggcacttttggaggccaaagtgggaggatcgcttgaggccaagagtttgaaactagcctgggcaatatagtgagacctccatctctacaaaaaatgttattccttggtccccaggtcctggggcagggcagggacttggggctctcctctcaggccctggaggctcggagggaggcacttctgctgaggccctgcttataggaaagctcagtatcctggcacctccatgtgtgtaaggacgtcagggtgaattataacccatggtgattaaggaagggccgagcctttctcttgcagagcgattgctcttctgctggcctcgtctagcacaaatcaggtgccctagcacaggccacactcctggagttaatgaagccactttaatcatttatatgccacttaagttgatgggggacagggcaggggtgggaaggaggggttgtctgtctgtgaaaactgagtgtggcttttcttgttgaactgatcattcctgctcttcctgcaaataagtcctgcatacggaccctggaactaaaaatggaaaatcagagcatgccccctcccaattttgtatagctttagtgggctctaaagttgcccgtttttagtgtgaaggaaaaaacgttgatttgcagatatcgtgagaatgaaacctcaacaaagatgtttggttcagtgcttcaaagttgggggacactttttccatgttgaacaaatgccaacttctccggttgcttacagcaaatccttctggaacaatcggggctgaaattgagttgcctttgttaggcgattgggccccattcattcttactcgtgcatcaggtcctggtctgtgtcaggcccaggggacacaggtggtcccagctcagaggcccagtgtccactgcagcccctcccacagcctgcccacccctactgcagggaaaaatgcccagggaggagatggtccaactcctgatcagttttgtgtccgatggagcaggccttgctgagtgaagacactggaactagctgggtcctggggtgacttggaggctttgggcctaaaagggcagcctgaacctggagtcttatctcccccaggagccgaaagcactttttcttgatttcccccaggaaatcaagcgctgcttctcagctcctgtggttttagtatttatatatctgtatcttctttgtagaaatttatttatttttgaataagtaatacctgcctggtacaaaatttaaaaggtacgggagggcgcaagctgcaagggaaggcctgctcccatgccgaccccagaggcagccactgttaccaatttcatgtgtattcctttaactctgttttaaagtaagtctctgaaaactgttcatttccttttgtcagtatttgttgctgaaaacctagaaaaacccagaaaagtataatgaaataaaaactacaaatttcacaacccagaaaactgctggtaacagatttggtgtctttcctgcaattgttttaatgctatgtaggtacacatatatttttttctttttttcttttttttttgagatggagtctcgcactgtcgcccgggctggagtgcagtagcgcgatcttggttcactgcaagctctgcctcctgggttcaagccattctcctgcctcagcctcccgagtagctttgactacagtcgcccgccaccatgcccggctaatttttatttttttattttttttttatttttagtagagacggggtttcaccatgttggccaggatggtctcaatctccttacctcgtgatctgcccacctcagcctcccagagtgctgggattacaggcgtgagccactgcgcccggcctatgtatgtatatttctaacgtacttgccttcttatcctatatgcccctttgaacacctgtatcaatgaatgttaaataatatttttgatgtaatttaaaattccttgtaaatatttgtaatggctgcataatattccactgtgcctaaccatgtgcctggtgtgaattccatttgtggatttttactactgtaatgctgaagtattacagtaatactgtgttaatattctctttattgaattctggta

SEQ ID NO: 437781 - DNA, 4553 bp, Homo sapiens
aaaggcagggctgggcctgcgggagcgcggccttgcggttcccaggactcttctccgggcgcctcgtctccttacgccacccgcaacccaagccagggccccggtgacagcggcggggtgggccaggaccggggagggggtgcccagcagcgacccccggctccccctaaggccgggcgcagctcggagccaggagctggcccggcgcgtggcttcccggaaggcccggcgcagccggaaggtgggacggagggcggggccagcgccggggccgccaccaaggcctgcgcgaccctccgcggggctggggagctgggcggggagcccggggcctgccaggcccgggctgcagccgcgtctgatcgccgagcgcgccgcgtagacctccgctcccccaggcccgccacgatgactatcatggtggaggacatcatgaagctgctgtgctccctttctggggagaggaagatgaaggcggctgtcaagcactctgggaagggtgccctggtcacaggggccatggccttcgtcgggggtttggtgggcggcccaccgggactcgccgttgggggggctgtcggggggctgttaggtgcctggatgacaagtggacagtttaagccggttcctcagatcctaatggagctgccccctgccgagcaacagaggctctttaacgaagccgcagccatcatcaggcacctggagtggacggacgccgtgcagctgaccgcgctggtcatgggcagcgaggccctgcagcagcagctgctggccatgctggtgaactacgtcaccaaggagctgcgggccgagatccagtatgatgactaggccgcacctccggggaggtggggggcccctttaaatgactctgtgattctgaagaggtggcttgggagttgggagaagcccagcggatgccccctggggaatctccacatcatcagtgtattactagtaatgtcccgctggagaggccaccgctgtgcagtgtcatgttccagaaattactgatgaagcagcatgtgttggtggcatgtgcactggcctgccatgacagccctctgactggccccccagtgaagagtaaaggcctgcctgccgcaggcttcggaggcgtctgctgagtcctctcacccgcatgggtctggggaagtgatcacgctcagccgacggtctgaccacacttcatcctccccccggggccttctcatcttgggagatgactcctcttcagagcacctgctgcaggactggatcccacccccctgcaggtcctggggtctcagggccttggagcagcccatgctggaatcatgtttacctcctagtgcaaccgtcccctacccagggactgtcgaatggccccacggaggggacgggcggcctgctgagtgaagccacaaataccgagtggacttgaccccggcccccactaggctgcacacctagactcgccctgccagggcctcgctcttcccatctgaaaagtcctggtagttcttgaggtttacttctcaaatgaaatatttttagtaaaaagtacaggtatatctcggagatattgtgggttcagttccagaccacctcggtaaagccaacatcacaataaagcaaggaagcgcattgttttagtttcccagtgcatctaagtcatgtttactgcatattgcagtccactaaatgtgcaatagcattatgtctaacaaatatacaaaccttaatttaaaaatatttactgttcaaaatgctgacacagaaacgcaaagtgagcacatgctgttggaaaatggtgccaaatagacttgcctgatgccaggctgctacaaaccttcaatttaaaaaaaaaacacagtattcacaaagcatagtagaatgaggtatgcctgtattgctctttctgaagtggtgtgatataaaccatctctaagaaatgtttctaccctaaagatttccccagtacagtcagctctccgtaactgtggtctccacatttagatccaaccagccttggataggaaatatttgaaaaaagaaattgcattggtactgaacacgtacagacctttttttcttgccattattccctaaacaatatggtgtagcatatttacatagcatttatattgtatttggtattataagaaatctagagatgatttaaattatacaggaaggtgtgcgtaggttacgtgcaaacgctatgccattgcccatcagggacttgagcatcctcagatgtcggtgtctgagggttgaggttgcagtcctggaacccatcccccatggatactgaggcatagctgtactgtgtgttttcactttgctttcagaactacgacttgaatgtgatcgattacaataaatgtttttctaaaaagccattttcccacatattatgtgtaaaatatctctaatattcaaagtcttacaaatggaacaagagggaaggtaccagatttgtggctttaaagaatgcaagagtaggtcaggtgaggtggctcatgcttgtaatgtcggcacttttggaggccaaagtgggaggatcgcttgaggccaagagtttgaaactagcctgggcaatatagtgagacctccatctctacaaaaaatgttattccttggtccccaggtcctggggcagggcagggacttggggctctcctctcaggccctggaggctcggagggaggcacttctgctgaggccctgcttataggaaagctcagtatcctggcacctccatgtgtgtaaggacgtcagggtgaattataacccatggtgattaaggaagggccgagcctttctcttgcagagcgattgctcttctgctggcctcgtctagcacaaatcaggtgccctagcacaggccacactcctggagttaatgaagccactttaatcatttatatgccacttaagttgatgggggacagggcaggggtgggaaggaggggttgtctgtctgtgaaaactgagtgtggcttttcttgttgaactgatcattcctgctcttcctgcaaataagtcctgcatacggaccctggaactaaaaatggaaaatcagagcatgccccctcccaattttgtatagctttagtgggctctaaagttgcccgtttttagtgtgaaggaatcagtgcttcaaagttgggggacactttttccatgttgaacaaatgccaacttctccggttgcttacagcaaatccttctggaacaatcggggctgaaattgagttgcctttgttaggcgattgggccccattcattcttactcgtgcatcaggtcctggtctgtgtcaggcccaggggacacaggtggtcccagctcagaggcccagtgtccactgcagcccctcccacagcctgcccacccctactgcagggaaaaatgcccagggaggagatggtccaactcctgatcagttttgtgtccgatggagcaggccttgctgagtgaagacactggaactagctgggtcctggggtgacttggaggctttgggcctaaaagggcagcctgaacctggagtcttatctcccccaggagccgaaagcactttttcttgatttcccccaggaaatcaagcgctgcttctcagctcctgtggttttagtatttatatatctgtatcttctttgtagaaatttatttatttttgaataagtaatacctgcctggtacaaaatttaaaaggtacgggagggcgcaagctgcaagggaaggcctgctcccatgccgaccccagaggcagccactgttaccaatttcatgtgtattcctttaactctgttttaaagtaagtctctgaaaactgttcatttccttttgtcagtatttgttgctgaaaacctagaaaaacccagaaaagtataatgaaataaaaactacaaatttcacaacccagaaaactgctggtaacagatttggtgtctttcctgcaattgttttaatgctatgtaggtacacatatatttttttctttttttcttttttttttgagatggagtctcgcactgtcgcccgggctggagtgcagtagcgcgatcttggttcactgcaagctctgcctcctgggttcaagccattctcctgcctcagcctcccgagtagctttgactacagtcgcccgccaccatgcccggctaatttttatttttttattttttttttatttttagtagagacggggtttcaccatgttggccaggatggtctcaatctccttacctcgtgatctgcccacctcagcctcccagagtgctgggattacaggcgtgagccactgcgcccggcctatgtatgtatatttctaacgtacttgccttcttatcctatatgcccctttgaacacctgtatcaatgaatgttaaataatatttttgatgtaatttaaaattccttgtaaatatttgtaatggctgcataatattccactgtgcctaaccatgtgcctggtgtgaattccatttgtggatttttactactgtaatgctgaagtattacagtaatactgtgttaatattctctttattgaattctggta

SEQ ID NO: 437782 - DNA, 4728 bp, Homo sapiens
aaaggcagggctgggcctgcgggagcgcggccttgcggttcccaggactcttctccgggcgcctcgtctccttacgccacccgcaacccaagccagggccccggtgacagcggcggggtgggccaggaccggggagggggtgcccagcagcgacccccggctccccctaaggccgggcgcagctcggagccaggagctggcccggcgcgtggcttcccggaaggcccggcgcagccggaaggtgggacggagggcggggccagcgccggggccgccaccaaggcctgcgcgaccctccgcggggctggggagctgggcggggagcccggggcctgccaggcccgggctgcagccgcgtctgatcgccgagcgcgccgcgtagacctccgctcccccaggcccgccacgatgactatcatggtggaggacatcatgaagctgctgtgctccctttctggggagaggaagatgaaggcggctgtcaagcactctgggaagggtgccctggtcacaggggccatggccttcgtcgggggtttggtgggcggcccaccgggactcgccgttggatccagtctaagacaccgcattgcattgaatcgcctgctttcttagtctcctctggcctttaacactttctcagacttgccttgttcacagccttgatagttttgaggagtactgggcagggggggctgtcggggggctgttaggtgcctggatgacaagtggacagtttaagccggttcctcagatcctaatggagctgccccctgccgagcaacagaggctctttaacgaagccgcagccatcatcaggcacctggagtggacggacgccgtgcagctgaccgcgctggtcatgggcagcgaggccctgcagcagcagctgctggccatgctggtgaactacgtcaccaaggagctgcgggccgagatccagtatgatgactaggccgcacctccggggaggtggggggcccctttaaatgactctgtgattctgaagaggtggcttgggagttgggagaagcccagcggatgccccctggggaatctccacatcatcagtgtattactagtaatgtcccgctggagaggccaccgctgtgcagtgtcatgttccagaaattactgatgaagcagcatgtgttggtggcatgtgcactggcctgccatgacagccctctgactggccccccagtgaagagtaaaggcctgcctgccgcaggcttcggaggcgtctgctgagtcctctcacccgcatgggtctggggaagtgatcacgctcagccgacggtctgaccacacttcatcctccccccggggccttctcatcttgggagatgactcctcttcagagcacctgctgcaggactggatcccacccccctgcaggtcctggggtctcagggccttggagcagcccatgctggaatcatgtttacctcctagtgcaaccgtcccctacccagggactgtcgaatggccccacggaggggacgggcggcctgctgagtgaagccacaaataccgagtggacttgaccccggcccccactaggctgcacacctagactcgccctgccagggcctcgctcttcccatctgaaaagtcctggtagttcttgaggtttacttctcaaatgaaatatttttagtaaaaagtacaggtatatctcggagatattgtgggttcagttccagaccacctcggtaaagccaacatcacaataaagcaaggaagcgcattgttttagtttcccagtgcatctaagtcatgtttactgcatattgcagtccactaaatgtgcaatagcattatgtctaacaaatatacaaaccttaatttaaaaatatttactgttcaaaatgctgacacagaaacgcaaagtgagcacatgctgttggaaaatggtgccaaatagacttgcctgatgccaggctgctacaaaccttcaatttaaaaaaaaaacacagtattcacaaagcatagtagaatgaggtatgcctgtattgctctttctgaagtggtgtgatataaaccatctctaagaaatgtttctaccctaaagatttccccagtacagtcagctctccgtaactgtggtctccacatttagatccaaccagccttggataggaaatatttgaaaaaagaaattgcattggtactgaacacgtacagacctttttttcttgccattattccctaaacaatatggtgtagcatatttacatagcatttatattgtatttggtattataagaaatctagagatgatttaaattatacaggaaggtgtgcgtaggttacgtgcaaacgctatgccattgcccatcagggacttgagcatcctcagatgtcggtgtctgagggttgaggttgcagtcctggaacccatcccccatggatactgaggcatagctgtactgtgtgttttcactttgctttcagaactacgacttgaatgtgatcgattacaataaatgtttttctaaaaagccattttcccacatattatgtgtaaaatatctctaatattcaaagtcttacaaatggaacaagagggaaggtaccagatttgtggctttaaagaatgcaagagtaggtcaggtgaggtggctcatgcttgtaatgtcggcacttttggaggccaaagtgggaggatcgcttgaggccaagagtttgaaactagcctgggcaatatagtgagacctccatctctacaaaaaatgttattccttggtccccaggtcctggggcagggcagggacttggggctctcctctcaggccctggaggctcggagggaggcacttctgctgaggccctgcttataggaaagctcagtatcctggcacctccatgtgtgtaaggacgtcagggtgaattataacccatggtgattaaggaagggccgagcctttctcttgcagagcgattgctcttctgctggcctcgtctagcacaaatcaggtgccctagcacaggccacactcctggagttaatgaagccactttaatcatttatatgccacttaagttgatgggggacagggcaggggtgggaaggaggggttgtctgtctgtgaaaactgagtgtggcttttcttgttgaactgatcattcctgctcttcctgcaaataagtcctgcatacggaccctggaactaaaaatggaaaatcagagcatgccccctcccaattttgtatagctttagtgggctctaaagttgcccgtttttagtgtgaaggaaaaaacgttgatttgcagatatcgtgagaatgaaacctcaacaaagatgtttggttcagtgcttcaaagttgggggacactttttccatgttgaacaaatgccaacttctccggttgcttacagcaaatccttctggaacaatcggggctgaaattgagttgcctttgttaggcgattgggccccattcattcttactcgtgcatcaggtcctggtctgtgtcaggcccaggggacacaggtggtcccagctcagaggcccagtgtccactgcagcccctcccacagcctgcccacccctactgcagggaaaaatgcccagggaggagatggtccaactcctgatcagttttgtgtccgatggagcaggccttgctgagtgaagacactggaactagctgggtcctggggtgacttggaggctttgggcctaaaagggcagcctgaacctggagtcttatctcccccaggagccgaaagcactttttcttgatttcccccaggaaatcaagcgctgcttctcagctcctgtggttttagtatttatatatctgtatcttctttgtagaaatttatttatttttgaataagtaatacctgcctggtacaaaatttaaaaggtacgggagggcgcaagctgcaagggaaggcctgctcccatgccgaccccagaggcagccactgttaccaatttcatgtgtattcctttaactctgttttaaagtaagtctctgaaaactgttcatttccttttgtcagtatttgttgctgaaaacctagaaaaacccagaaaagtataatgaaataaaaactacaaatttcacaacccagaaaactgctggtaacagatttggtgtctttcctgcaattgttttaatgctatgtaggtacacatatatttttttctttttttcttttttttttgagatggagtctcgcactgtcgcccgggctggagtgcagtagcgcgatcttggttcactgcaagctctgcctcctgggttcaagccattctcctgcctcagcctcccgagtagctttgactacagtcgcccgccaccatgcccggctaatttttatttttttattttttttttatttttagtagagacggggtttcaccatgttggccaggatggtctcaatctccttacctcgtgatctgcccacctcagcctcccagagtgctgggattacaggcgtgagccactgcgcccggcctatgtatgtatatttctaacgtacttgccttcttatcctatatgcccctttgaacacctgtatcaatgaatgttaaataatatttttgatgtaatttaaaattccttgtaaatatttgtaatggctgcataatattccactgtgcctaaccatgtgcctggtgtgaattccatttgtggatttttactactgtaatgctgaagtattacagtaatactgtgttaatattctctttattgaattctggta

SEQ ID NO: 437783 - DNA, 4040 bp, Homo sapiens
aaaatctgttcgcttcattcattgccccctcccccgacaagtggacagtttaagccggttcctcagatcctaatggagctgccccctgccgagcaacagaggctctttaacgaagccgcagccatcatcaggcacctggagtggacggacgccgtgcagctgaccgcgctggtcatgggcagcgaggccctgcagcagcagctgctggccatgctggtgaactacgtcaccaaggagctgcgggccgagatccagtatgatgactaggccgcacctccggggaggtggggggcccctttaaatgactctgtgattctgaagaggtggcttgggagttgggagaagcccagcggatgccccctggggaatctccacatcatcagtgtattactagtaatgtcccgctggagaggccaccgctgtgcagtgtcatgttccagaaattactgatgaagcagcatgtgttggtggcatgtgcactggcctgccatgacagccctctgactggccccccagtgaagagtaaaggcctgcctgccgcaggcttcggaggcgtctgctgagtcctctcacccgcatgggtctggggaagtgatcacgctcagccgacggtctgaccacacttcatcctccccccggggccttctcatcttgggagatgactcctcttcagagcacctgctgcaggactggatcccacccccctgcaggtcctggggtctcagggccttggagcagcccatgctggaatcatgtttacctcctagtgcaaccgtcccctacccagggactgtcgaatggccccacggaggggacgggcggcctgctgagtgaagccacaaataccgagtggacttgaccccggcccccactaggctgcacacctagactcgccctgccagggcctcgctcttcccatctgaaaagtcctggtagttcttgaggtttacttctcaaatgaaatatttttagtaaaaagtacaggtatatctcggagatattgtgggttcagttccagaccacctcggtaaagccaacatcacaataaagcaaggaagcgcattgttttagtttcccagtgcatctaagtcatgtttactgcatattgcagtccactaaatgtgcaatagcattatgtctaacaaatatacaaaccttaatttaaaaatatttactgttcaaaatgctgacacagaaacgcaaagtgagcacatgctgttggaaaatggtgccaaatagacttgcctgatgccaggctgctacaaaccttcaatttaaaaaaaaaacacagtattcacaaagcatagtagaatgaggtatgcctgtattgctctttctgaagtggtgtgatataaaccatctctaagaaatgtttctaccctaaagatttccccagtacagtcagctctccgtaactgtggtctccacatttagatccaaccagccttggataggaaatatttgaaaaaagaaattgcattggtactgaacacgtacagacctttttttcttgccattattccctaaacaatatggtgtagcatatttacatagcatttatattgtatttggtattataagaaatctagagatgatttaaattatacaggaaggtgtgcgtaggttacgtgcaaacgctatgccattgcccatcagggacttgagcatcctcagatgtcggtgtctgagggttgaggttgcagtcctggaacccatcccccatggatactgaggcatagctgtactgtgtgttttcactttgctttcagaactacgacttgaatgtgatcgattacaataaatgtttttctaaaaagccattttcccacatattatgtgtaaaatatctctaatattcaaagtcttacaaatggaacaagagggaaggtaccagatttgtggctttaaagaatgcaagagtaggtcaggtgaggtggctcatgcttgtaatgtcggcacttttggaggccaaagtgggaggatcgcttgaggccaagagtttgaaactagcctgggcaatatagtgagacctccatctctacaaaaaatgttattccttggtccccaggtcctggggcagggcagggacttggggctctcctctcaggccctggaggctcggagggaggcacttctgctgaggccctgcttataggaaagctcagtatcctggcacctccatgtgtgtaaggacgtcagggtgaattataacccatggtgattaaggaagggccgagcctttctcttgcagagcgattgctcttctgctggcctcgtctagcacaaatcaggtgccctagcacaggccacactcctggagttaatgaagccactttaatcatttatatgccacttaagttgatgggggacagggcaggggtgggaaggaggggttgtctgtctgtgaaaactgagtgtggcttttcttgttgaactgatcattcctgctcttcctgcaaataagtcctgcatacggaccctggaactaaaaatggaaaatcagagcatgccccctcccaattttgtatagctttagtgggctctaaagttgcccgtttttagtgtgaaggaaaaaacgttgatttgcagatatcgtgagaatgaaacctcaacaaagatgtttggttcagtgcttcaaagttgggggacactttttccatgttgaacaaatgccaacttctccggttgcttacagcaaatccttctggaacaatcggggctgaaattgagttgcctttgttaggcgattgggccccattcattcttactcgtgcatcaggtcctggtctgtgtcaggcccaggggacacaggtggtcccagctcagaggcccagtgtccactgcagcccctcccacagcctgcccacccctactgcagggaaaaatgcccagggaggagatggtccaactcctgatcagttttgtgtccgatggagcaggccttgctgagtgaagacactggaactagctgggtcctggggtgacttggaggctttgggcctaaaagggcagcctgaacctggagtcttatctcccccaggagccgaaagcactttttcttgatttcccccaggaaatcaagcgctgcttctcagctcctgtggttttagtatttatatatctgtatcttctttgtagaaatttatttatttttgaataagtaatacctgcctggtacaaaatttaaaaggtacgggagggcgcaagctgcaagggaaggcctgctcccatgccgaccccagaggcagccactgttaccaatttcatgtgtattcctttaactctgttttaaagtaagtctctgaaaactgttcatttccttttgtcagtatttgttgctgaaaacctagaaaaacccagaaaagtataatgaaataaaaactacaaatttcacaacccagaaaactgctggtaacagatttggtgtctttcctgcaattgttttaatgctatgtaggtacacatatatttttttctttttttcttttttttttgagatggagtctcgcactgtcgcccgggctggagtgcagtagcgcgatcttggttcactgcaagctctgcctcctgggttcaagccattctcctgcctcagcctcccgagtagctttgactacagtcgcccgccaccatgcccggctaatttttatttttttattttttttttatttttagtagagacggggtttcaccatgttggccaggatggtctcaatctccttacctcgtgatctgcccacctcagcctcccagagtgctgggattacaggcgtgagccactgcgcccggcctatgtatgtatatttctaacgtacttgccttcttatcctatatgcccctttgaacacctgtatcaatgaatgttaaataatatttttgatgtaatttaaaattccttgtaaatatttgtaatggctgcataatattccactgtgcctaaccatgtgcctggtgtgaattccatttgtggatttttactactgtaatgctgaagtattacagtaatactgtgttaatattctctttattgaattctggta

SEQ ID NO: 437784 - DNA, 4623 bp, Homo sapiens
  misc_feature (1847)..(1851): n is a, c, g, or t
  misc_feature (1869)..(1869): n is a, c, g, or t
  misc_feature (1901)..(1901): n is a, c, g, or t
  misc_feature (1929)..(1929): n is a, c, g, or t
  misc_feature (1950)..(1950): n is a, c, g, or t
  misc_feature (1953)..(1953): n is a, c, g, or t
  misc_feature (1964)..(1964): n is a, c, g, or t
  misc_feature (1968)..(1968): n is a, c, g, or t
  misc_feature (2204)..(2204): n is a, c, g, or t
  misc_feature (2209)..(2209): n is a, c, g, or t
  misc_feature (2214)..(2214): n is a, c, g, or t
  misc_feature (2218)..(2218): n is a, c, g, or t
  misc_feature (2220)..(2220): n is a, c, g, or t
  misc_feature (2225)..(2225): n is a, c, g, or t
  misc_feature (2231)..(2232): n is a, c, g, or t
  misc_feature (2237)..(2237): n is a, c, g, or t
  misc_feature (2242)..(2242): n is a, c, g, or t
  misc_feature (2247)..(2247): n is a, c, g, or t
  misc_feature (2250)..(2250): n is a, c, g, or t
  misc_feature (2256)..(2256): n is a, c, g, or t
  misc_feature (2272)..(2273): n is a, c, g, or t
aaaggcagggctgggcctgcgggagcgcggccttgcggttcccaggactcttctccgggcgcctcgtctccttacgccacccgcaacccaagccagggccccggtgacagcggcggggtgggccaggaccggggagggggtgcccagcagcgacccccggctccccctaaggccgggcgcagctcggagccaggagctggcccggcgcgtggcttcccggaaggcccggcgcagccggaaggtgggacggagggcggggccagcgccggggccgccaccaaggcctgcgcgaccctccgcggggctggggagctgggcggggagcccggggcctgccaggcccgggctgcagccgcgtctgatcgccgagcgcgccgcgtagacctccgctcccccaggcccgccacgatgactatcatggtggaggacatcatgaagctgctgtgctccctttctggggagaggaagatgaaggcggctgtcaagcactctgggaagggtgccctggtcacaggggccatggccttcgtcgggggtttggtgggcggcccaccgggactcgccgttgggggggctgtcggggggctgttaggtgcctggatgacaagtggacagtttaagccggttcctcagatcctaatggagctgccccctgccgagcaacagaggctctttaacgaagccgcagccatcatcaggcacctggagtggacggacgccgtgcagctgaccgcgctggtcatgggcagcgaggccctgcagcagcagctgctggccatgctggtgaactacgtcaccaaggagctgcgggccgagatccagtatgatgactaggccgcacctccggggaggtggggggcccctttaaatgactctgtgattctgaagaggtggcttgggagttgggagaagcccagcggatgccccctggggaatctccacatcatcagtgtattactagtaatgtcccgctggagaggccaccgctgtgcagtgtcatgttccagaaattactgatgaagcagcatgtgttggtggcatgtgcactggcctgccatgacagccctctgactggccccccagtgaagagtaaaggcctgcctgccgcaggcttcggaggcgtctgctgagtcctctcacccgcatgggtctggggaagtgatcacgctcagccgacggtctgaccacacttcatcctccccccggggccttctcatcttgggagatgactcctcttcagagcacctgctgcaggactggatcccacccccctgcaggtcctggggtctcagggccttggagcagcccatgctggaatcatgtttacctcctagtgcaaccgtcccctacccagggactgtcgaatggccccacggaggggacgggcggcctgctgagtgaagccacaaataccgagtggacttgaccccggcccccactaggctgcacacctagactcgccctgccagggcctcgctcttcccatctgaaaagtcctggtagttcttgaggtttacttctcaaatgaaatatttttagtaaaaagtacaggtatatctcggagatattgtgggttcagttccagaccacctcggtaaagccaacatcacaataaagcaaggaagcgcattgttttagtttcccagtgcatctaagtcatgtttactgcatattgcagtccactaaatgtgcaatagcattatgtctaacaaatatacaaaccttaatttaaaaatatttactgttcaaaatgctgacacagaaacgcaaagtgagcacatgctgttggaaaatggtgccaaatagacttgcctgatgccaggctgctacaaacctttttttttaannnnnttcttctttattcacaanttattttttattttttttttcctttttttctnttttttatattttttttttatatttatnttattttttttaaatattttnttnttttatataantttncttctattttctatctcttctctccgtaactgtggtctccacatttagatccaaccagccttggataggaaatatttgaaaaaagaaattgcattggtactgaacacgtacagacctttttttcttgccattattccctaaacaatatggtgtagcatatttacatagcatttatattgtatttggtattataagaaatctagagatgatttaaattatacattaattttttcttnttttnctttnaaantntattntatttnntcttnatttnttttntcntcttcntatttcttttttttannttttatttttcattcctggaacccatcccccatggatactgaggcatagctgtactgtgtgttttcactttgctttcagaactacgacttgaatgtgatcgattacaataaatgtttttctaaaaagccattttcccacatattatgtgtaaaatatctctaatattcaaagtcttacaaatggaacaagagggaaggtaccagatttgtggctttaaagaatgcaagagtaggtcaggtgaggtggctcatgcttgtaatgtcggcacttttggaggccaaagtgggaggatcgcttgaggccaagagtttgaaactagcctgggcaatatagtgagacctccatctctacaaaaaatgttattccttggtccccaggtcctggggcagggcagggacttggggctctcctctcaggccctggaggctcggagggaggcacttctgctgaggccctgcttataggaaagctcagtatcctggcacctccatgtgtgtaaggacgtcagggtgaattataacccatggtgattaaggaagggccgagcctttctcttgcagagcgattgctcttctgctggcctcgtctagcacaaatcaggtgccctagcacaggccacactcctggagttaatgaagccactttaatcatttatatgccacttaagttgatgggggacagggcaggggtgggaaggaggggttgtctgtctgtgaaaactgagtgtggcttttcttgttgaactgatcattcctgctcttcctgcaaataagtcctgcatacggaccctggaactaaaaatggaaaatcagagcatgccccctcccaattttgtatagctttagtgggctctaaagttgcccgtttttagtgtgaaggaaaaaacgttgatttgcagatatcgtgagaatgaaacctcaacaaagatgtttggttcagtgcttcaaagttgggggacactttttccatgttgaacaaatgccaacttctccggttgcttacagcaaatccttctggaacaatcggggctgaaattgagttgcctttgttaggcgattgggccccattcattcttactcgtgcatcaggtcctggtctgtgtcaggcccaggggacacaggtggtcccagctcagaggcccagtgtccactgcagcccctcccacagcctgcccacccctactgcagggaaaaatgcccagggaggagatggtccaactcctgatcagttttgtgtccgatggagcaggccttgctgagtgaagacactggaactagctgggtcctggggtgacttggaggctttgggcctaaaagggcagcctgaacctggagtcttatctcccccaggagccgaaagcactttttcttgatttcccccaggaaatcaagcgctgcttctcagctcctgtggttttagtatttatatatctgtatcttctttgtagaaatttatttatttttgaataagtaatacctgcctggtacaaaatttaaaaggtacgggagggcgcaagctgcaagggaaggcctgctcccatgccgaccccagaggcagccactgttaccaatttcatgtgtattcctttaactctgttttaaagtaagtctctgaaaactgttcatttccttttgtcagtatttgttgctgaaaacctagaaaaacccagaaaagtataatgaaataaaaactacaaatttcacaacccagaaaactgctggtaacagatttggtgtctttcctgcaattgttttaatgctatgtaggtacacatatatttttttctttttttcttttttttttgagatggagtctcgcactgtcgcccgggctggagtgcagtagcgcgatcttggttcactgcaagctctgcctcctgggttcaagccattctcctgcctcagcctcccgagtagctttgactacagtcgcccgccaccatgcccggctaatttttatttttttattttttttttatttttagtagagacggggtttcaccatgttggccaggatggtctcaatctccttacctcgtgatctgcccacctcagcctcccagagtgctgggattacaggcgtgagccactgcgcccggcctatgtatgtatatttctaacgtacttgccttcttatcctatatgcccctttgaacacctgtatcaatgaatgttaaataatatttttgatgtaatttaaaattccttgtaaatatttgtaatggctgcataatattccactgtgcctaaccatgtgcctggtgtgaattccatttgtggatttttactactgtaatgctgaagtattacagtaatactgtgttaatattctctttattgaattctggta

SEQ ID NO: 437785 - DNA, 1830 bp, Homo sapiens
tgtttagaaggttagtgttggttcttttattcgattaaacaggaatacacatatgtctaccaaagaataggtaagggagaaataagaacactaaaaaaactcggaatcgttaagtgtgaagcatatttggagttaaaagaaccaaatattactaagtaagcagacgcgggcacgcgctgcataccgggatttgtagtcccttccggggcggggtacagcgcgcctgcgcagaggggccgtcgctcttccgggcgcatgcgtgcggcagcggcgccaggactgactgcgccgtggaggctgctgcagtgttgtgagttggaagctggggagctcggcatggcggtccccgctgcagccatggggccctcggcgttgggccagagcggccccggctcgatggccccgtggtgctcagtgagcagcggcccgtcgcgctacgtgcttgggatgcaggagctgttccggggccacagcaagacgcgcgagttcctggcgcacagcgccaaggtgcactcggtggcctggagttgcgacgggcgtcgcctagcctcggggtccttcgacaagacggccagcgtcttcttgctggagaaggaccggttggtcaaagaaaacaattatcggggacatggggatagtgtggaccagctttgttggcatccaagtaatcctgacctatttgttacggcgtccggagataaaaccattcgcatctgggatgtgaggactacaaaatgcattgccactgtgaacactaaaggggagaacattaatatctgctggagtcctgatgggcagaccattgctgtaggcaacaaggatgatgtggtgacctttattgatgccaagacacaccgttccaaagcagaagagcagttcaagttcgaggtcaacgaaatctcctggaacaatgacaataatatgttcttcctgacaaatggcaatggttgtatcaacatcctcagctacccagaactgaagcctgtgcagtccatcaacgcccatccttccaactgcatctgtatcaagtttgaccccatggggaagtactttgccacaggaagtgcagatgctttggtcagcctctgggatgtggatgagttagtgtgtgttcggtgcttttccaggctggattggcctgtaagaaccctcagtttcagccatgatgggaaaatgctggcgtcagcatcggaagatcattttattgacattgctgaagtggagacaggggacaaactatgggaggtacagtgtgagtctccgaccttcacagtggcgtggcaccccaaaaggcctctgctggcatttgcctgtgatgacaaagacggcaaatatgacagcagccgggaagccggaactgtgaagctgtttgggcttcctaatgattcttgagaggaggttgtagggagaggaggccccggcagaggtcttccttcatgtggttagtttggtctgttctctcggagttggtgggcaccctaaatatttgtaagttggtataaattgtaaacgtctctggtcaggctgcgcatttcgttcttttgctttgtctgtgtattagctctttccattctttgcccccagcatgagttaactcgcgtggactctgcagtgcgagtagtgaccccagcataccttgtcctctggacctcctgtcttctctgcttctgggtgcatggtagactttgtggcatttgatacaacttggacaatacctagtttggagggaggggaatggaagggcatggaagtttttttaaataattaaaaatatatacatataattttgagaattgagcatttaataaactgacttttgttattatggaa

SEQ ID NO: 437786 - DNA, 1951 bp, Homo sapiens
tgtttagaaggttagtgttggttcttttattcgattaaacaggaatacacatatgtctaccaaagaataggtaagggagaaataagaacactaaaaaaactcggaatcgttaagtgtgaagcatatttggagttaaaagaaccaaatattactaagtaagcagacgcgggcacgcgctgcataccgggatttgtagtcccttccggggcggggtacagcgcgcctgcgcagaggggccgtcgctcttccgggcgcatgcgtgcggcagcggcgccaggactgactgcgccgtggaggctgctgcagtgttgtgagttggaagctggggagctcggcatggcggtccccgctgcagccatggggccctcggcgttgggccagagcggccccggctcgatggccccgtggtgctcagtgagcagcggcccgtcgcgctacgtgcttgggatgcaggagctgttccggggccacagcaagacgcgcgagttcctggcgcacagcgccaaggtgcactcggtggcctggagttgcgacgggcgtcgcctagcctcggggtccttcgacaagacggccagcgtcttcttgctggagaaggaccggttggtcaaagaaaacaattatcggggacatggggatagtgtggaccagctttgttggcatccaagtaatcctgacctatttgttacggcgtccggagataaaaccattcgcatctgggatgtgaggactacaaaatgcattgccactgtgaacactaaaggggagaacattaatatctgctggagtcctgatgggcagaccattgctgtaggcaacaaggatgatgtggtgacctttattgatgccaagacacaccgttccaaagcagaagagcagttcaagttcgaggtcaacgaaatctcctggaacaatgacaataatatgttcttcctgacaaatggcaatggttgtatcaacatcctcagctacccagaactgaagcctgtgcagtccatcaacgcccatccttccaactgcatctgtatcaagtttgaccccatggggaagtactttgccacaggaagtgcagatgctttggtcagcctctgggatgtggatgagttagtgtgtgttcggtgcttttccaggctggattggcctgtaagaaccctcagtttcagccatgatgggaaaatgctggcgtcagcatcggaagatcattttattgacattgctgaagtggagacaggtaacttcatgagaatctaccgtctttcacctttggcagtcaggacttctcttgtgatctcatctctgcatgtgactacttcaccagcatgatcatgaatgaatttgtctcctttagacaagggacaaactatgggaggtacagtgtgagtctccgaccttcacagtggcgtggcaccccaaaaggcctctgctggcatttgcctgtgatgacaaagacggcaaatatgacagcagccgggaagccggaactgtgaagctgtttgggcttcctaatgattcttgagaggaggttgtagggagaggaggccccggcagaggtcttccttcatgtggttagtttggtctgttctctcggagttggtgggcaccctaaatatttgtaagttggtataaattgtaaacgtctctggtcaggctgcgcatttcgttcttttgctttgtctgtgtattagctctttccattctttgcccccagcatgagttaactcgcgtggactctgcagtgcgagtagtgaccccagcataccttgtcctctggacctcctgtcttctctgcttctgggtgcatggtagactttgtggcatttgatacaacttggacaatacctagtttggagggaggggaatggaagggcatggaagtttttttaaataattaaaaatatatacatataattttgagaattgagcatttaataaactgacttttgttattatggaa

SEQ ID NO: 437787 - DNA, 2252 bp, Homo sapiens
tgtttagaaggttagtgttggttcttttattcgattaaacaggaatacacatatgtctaccaaagaataggtaagggagaaataagaacactaaaaaaactcggaatcgttaagtgtgaagcatatttggagttaaaagaaccaaatattactaagtaagcagacgcgggcacgcgctgcataccgggatttgtagtcccttccggggcggggtacagcgcgcctgcgcagaggggccgtcgctcttccgggcgcatgcgtgcggcagcggcgccaggactgactgcgccgtggaggctgctgcagtgttgtgagttggaagctggggagctcggcatggcggtccccgctgcagccatggggccctcggcgttgggccagagcggccccggctcgatggccccgtggtgctcagtgagcagcggcccgtcgcgctacgtgcttgggatgcaggagctgttccggggccacagcaagacgcgcgagttcctggcgcacagcgccaaggtgcactcggtggcctggagttgcgacgggcgtcgcctagcctcggggtccttcgacaagacggccagcgtcttcttgctggagaaggaccggttggtcaaagaaaacaattatcggggacatggggatagtgtggaccagctttgttggcatccaagtaatcctgacctatttgttacggcgtccggagataaaaccattcgcatctgggatgtgaggactacaaaatgcattgccactgtgaacactaaaggggagaacattaatatctgctggagtcctgatgggcagaccattgctgtaggcaacaaggatgatgtggtgacctttattgatgccaagacacaccgttccaaagcagaagagcagttcaagttcgaggtcaacgaaatctcctggaacaatgacaataatatgttcttcctgacaaatggcaatggttgtatcaacatcctcagctacccagaactgaagcctgtgcagtccatcaacgcccatccttccaactgcatctgtatcaagtttgaccccatggggaagtactttgccacaggaagtgcagatgctttggtcagcctctgggatgtggatgagttagtgtgtgttcggtgcttttccaggctggattggcctgtaagaaccctcagtttcagccatgatgggaaaatgctggcgtcagcatcggaagatcattttattgacattgctgaagtggagacaggggacaaactatgggaggtacagtgtgagtctccgaccttcacagtggcgtggcaccccaaaaggcctctgctggcatttgcctgtgatgacaaagacggcaaatatgacagcagccgggaagccggaactgtgaagctgtttgggcttcctaatgattcttgagaggaggttgtagggagaggaggccccggcagaggtcttccttcatgtggttagtttggtctgttctctcggagttggtgggcaccctaaatatttgtaagttggtataaattgtaaacgtctctggtcaggctgcgcatttcgttcttttgctttgtctgtgtattagctctttccattctttgcccccagcatgagttaactcgcgtggactctgcagtgcgagtagtgaccccagcataccttgtcctctggacctcctgtcttctctgcttctgggtgcatggtagactttgtggcatttgatacaacttggacaatacctagtttggagggaggggaatggaagggcatggaagtttttttaaataattaaaaatatatacatataattttgagaattgagcatttaataaactgacttttgttattatggaaaaaaaaaaaaaaacaaaaaaaaaaaaaaaaaaaaaaaaaaaaaaaaaggggggggggaaaaaaacccacggagagggggaccccgaacataggcaaccaccacttttgtgaacggggggcccccgaaggagactgtctattaaacggccgcgacgggcgctataaacaggcagcgggcggcaacaggccagctggtaacgagggagacacccttcgcgggggagccatgggagacccaccacccatctaggccgggaaacaaaatcagctatgggaagcccccatcggtcggaaatgctcggttatttgataccgacgaaagacaaccggacgacgcagcacctgacccacgagacaccgatccagcaaatgaaacaccccacgcacgacacttcgacttagtaggacgaggctgggcgtgg

SEQ ID NO: 437788 - DNA, 1783 bp, Homo sapiens
tgtttagaaggttagtgttggttcttttattcgattaaacaggaatacacatatgtctaccaaagaataggtaagggagaaataagaacactaaaaaaactcggaatcgttaagtgtgaagcatatttggagttaaaagaaccaaatattactaagtaagcagacgcgggcacgcgctgcataccgggatttgtagtcccttccggggcggggtacagcgcgcctgcgcagaggggccgtcgctcttccgggcgcatgcgtgcggcagcggcgccaggactgactgcgccgtggaggctgctgcagtgttgtgagttggaagctggggagctcggcatggcggtccccgctgcagccatggggccctcggcgttgggccagagcggccccggctcgatggccccgtggtgctcagtgagcagcggcccgtcgcgctacgtgcttgggatgcaggagctgttccggggccacagcaagacgcgcgagttcctggcgcacagcgccaaggtgcactcggtggcctggagttgcgacgggcgtcgcctagcctcggggtccttcgacaagacggccagcgtcttcttgctggagaaggaccggttggtcaaagaaaacaattatcggggacatggggatagtgtggaccagctttgttggcatccaagtaatcctgacctatttgttacggcgtccggagataaaaccattcgcatctgggatgtgaggactacaaaatgcattgccactgtgaacactaaaggggagaacattaatatctgctggagtcctgatgggcagaccattgctgtaggcaacaaggatgatgtggtgacctttattgatgccaagacacaccgttccaaagcagaagagcagttcaagttcgaggtcaacgaaatctcctggaacaatgacaataatatgttcttcctgacaaatggcaatggttgtatcaacatcctcagctacccagaactgaagcctgtgcagtccatcaacgcccatccttccaactgcatctgtatcaagtttgaccccatggggaagtactttgccacaggaagtgcagatgctttggtcagcctctgggatgtggatgagttagtgtgtgttcggtgcttttccaggctggattggcctgtaagaaccctcagtttcagccatgatgggaaaatgctggcgtcagcatcggaagatcattttattgacattgctgaagtggagacaggggacaaactatgggaggtacagtgtgagtctccgaccttcacagtggcgtggcaccccaaaaggcctctgctggcatttgcctgtgatgacaaagacggcaaatatgacagcagccgggaagccggaactgtgaagctgtttgggcttcctaatgattcttgagaggaggttgtagggagaggaggccccggcagaggtcttccttcatgtggttagtttggtctgttctctcggagttggtgggcaccctaaatatttgtaagttggtataaattgtaaacgtctctggtcaggctgcgcatttcgttcttttgctttgtctgtgtattagctctttccattctttgcccccagcatgagttaactcgcgtggactctgcagtgcgagtagtgaccccagcataccttgtcctctggacctcctgtcttctctgcttctgggtgcatggtagactttgtggcatttgatacaacttggacaatacctagtttggagggaggggaatggaagggcatggaagtttttttaaataattaaaaatatatacatata

SEQ ID NO: 437789 - DNA, 1713 bp, Homo sapiens
tgtttagaaggttagtgttggttcttttattcgattaaacaggaatacacatatgtctaccaaagaataggtaagggagaaataagaacactaaaaaaactcggaatcgttaagtgtgaagcatatttggagttaaaagaaccaaatattactaagtaagcagacgcgggcacgcgctgcataccgggatttgtagtcccttccggggcggggtacagcgcgcctgcgcagaggggccgtcgctcttccgggcgcatgcgtgcggcagcggcgccaggactgactgcgccgtggaggctgctgcagtgttgtgagttggaagctggggagctcggcatggcggtccccgctgcagccatggggccctcggcgttgggccagagcggccccggctcgatggccccgtggtgctcagtgagcagcggcccgtcgcgctacgtgcttgggatgcaggagctgttccggggccacagcaagacgcgcgagttcctggcgcacagcgccaaggtgcactcggtggcctggagttgcgacgggcgtcgcctagcctcggggtccttcgacaagacggccagcgtcttcttgctggagaaggaccggttggtcaaagaaaacaattatcggggacatggggatagtgtggaccagctttgttggcatccaagtaatcctgacctatttgttacggcgtccggagataaaaccattcgcatctgggatgtgaggactacaaaatgcattgccactgtgaacactaaaggggagaacattaatatctgctggagtcctgatgggcagaccattgctgtaggcaacaaggatgatgtggtgacctttattgatgccaagacacaccgttccaaagcagaagagcagttcaagttcgaggtcaacgaaatctcctggaacaatgacaataatatgttcttcctgacaaatggcaatggttgtatcaacatcctcagctacccagaactgaagcctgtgcagtccatcaacgcccatccttccaactgcatctgtatcaagtttgaccccatggggaagtactttgccacaggaagtgcagatgctttggtcagcctctgggatgtggatgagttagtgtgtgttcggtgcttttccaggctggattggcctgtaagaaccctcagtttcagccatgatgggaaaatgctggcgtcagcatcggaagatcattttattgacattgctgaagtggagacaggggacaaactatgggaggtacagtgtgagtctccgaccttcacagtggcgtggcaccccaaaaggcctctgctggcatttgcctgtgatgacaaagacggcaaatatgacagcagccgggaagccggaactgtgaagctgtttgggcttcctaatgattcttgagaggaggttgtagggagaggaggccccggcagaggtcttccttcatgtggttagtttggtctgttctctcggagttggtgggcaccctaaatatttgtaagttggtataaattgtaaacgtctctggtcaggctgcgcatttcgttcttttgctttgtctgggtgcatggtagactttgtggcatttgatacaacttggacaatacctagtttggagggaggggaatggaagggcatggaagtttttttaaataattaaaaatatatacatataattttgagaattgagcatttaataaactgacttttgttattatggaa

SEQ ID NO: 437790 - DNA, 2095 bp, Homo sapiens
tgtttagaaggttagtgttggttcttttattcgattaaacaggaatacacatatgtctaccaaagaataggtaagggagaaataagaacactaaaaaaactcggaatcgttaagtgtgaagcatatttggagttaaaagaaccaaatattactaagtaagcagacgcgggcacgcgctgcataccgggatttgtagtcccttccggggcggggtacagcgcgcctgcgcagaggggccgtcgctcttccgggcgcatgcgtgcggcagcggcgccaggactgactgcgccgtggaggctgctgcagtgttgtgagttggaagctggggagctcggcatggcggtccccgctgcagccatggggccctcggcgttgggccagagcggccccggctcgatggccccgtggtgctcagtgagcagcggcccgtcgcgctacgtgcttgggatgcaggagctgttccggggccacagcaagacgcgcgagttcctggcgcacagcgccaaggtgcactcggtggcctggagttgcgacgggcgtcgcctagcctcggggtccttcgacaagacggccagcgtcttcttgctggagaaggaccggttggtcaaagaaaacaattatcggggacatggggatagtgtggaccagctttgttggcatccaagtaatcctgacctatttgttacggcgtccggagataaaaccattcgcatctgggatgtgaggactacaaaatgcattgccactgtgaacactaaaggggagaacattaatatctgctggagtcctgatgggcagaccattgctgtaggcaacaaggatgatgtggtgacctttattgatgccaagacacaccgttccaaagcagaagagcagttcaagttcgaggtcaacgaaatctcctggaacaatgacaataatatgttcttcctgacaaatggcaatggttgtatcaacatcctcagctacccagaactgaagcctgtgcagtccatcaacgcccatccttccaactgcatctgtatcaagtttgaccccatggggaagtactttgccacaggaagtgcagatgctttggtcagcctctgggatgtggatgagttagtgtgtgttcggtgcttttccaggctggattggcctgtaagaaccctcagtttcagccatgatgggaaaatgctggcgtcagcatcggaagatcattttattgacattgctgaagtggagacaggtaacttcatgagaatctaccgtctttcacctttggcagtcaggacttctcttgtgatctcatctctgcatgtgactacttcaccagcatgatcatgaatgaatttgtctcctttagacaagtatgtttctgttttgactgtcactgccaggtggtgaggaagcaaagagttaagaaataaacaggcaggtctgaggaaagtgatttagaaaaatattttgatttatttaaactttaaactacagagtagaaggaagaaaaaagcaccacttggggtcccactctctaaataccacctgttttaaatgttgtgatatatttctctttatcttttgcctgtatatgaacttgaaaaaatattatttaaaatttgaggaattataaagtttttgctttaaaaacaacagaagctggaaatagaaaaatgggaggagagtattcattttgcaaaagaatttcctcagatttgttttttaatgttgctttattgtttttggaaatctgtgacactcttcgtaaaaagattaaaactgtatagaaaacttcgaagaggaaagtaaagaacttgaaattccactatgtaaagaatgcatgcccctgttagtcacgttgtggtgaacattgtccagcatccagccatgcagatccttcatgtaactgcatgtccctgtgacgcggagacactttcctgctcagtgacctgctcttgagttaacccacctgtgctcagaaccggctctgtcctccgctggcttgtgggctctctgtgcctgggggttctctgtaaaatgaggtaatagttgtatctatctcatgggattagtaggtggattaaaccagttaatacaggtaagtacttaatgaatg

SEQ ID NO: 437791 - DNA, 1535 bp, Homo sapiens
tgtttagaaggttagtgttggttcttttattcgattaaacaggaatacacatatgtctaccaaagaataggtaagggagaaataagaacactaaaaaaactcggaatcgttaagtgtgaagcatatttggagttaaaagaaccaaatattactaagtaagcagacgcgggcacgcgctgcataccgggatttgtagtcccttccggggcggggtacagcgcgcctgcgcagaggggccgtcgctcttccgggcgcatgcgtgcggcagcggcgccaggactgactgcgccgtggaggctgctgcagtgttgtgagttggaagctggggagctcggcatggcggtccccgctgcagccatggggccctcggcgttgggccagagcggccccggctcgatggccccgtggtgctcagtgagcagcggcccgtcgcgctacgtgcttgggatgcaggagctgttccggggccacagcaagacgcgcgagttcctggcgcacagcgccaaggtgcactcggtggcctggagttgcgacgggcgtcgcctagcctcggggtccttcgacaagacggccagcgtcttcttgctggagaaggaccggttggtcaaagaaaacaattatcggggacatggggatagtgtggaccagctttgttggcatccaagtaatcctgacctatttgttacggcgtccggagataaaaccattcgcatctgggatgtgaggactacaaaatgcattgccactgtgaacactaaaggggagaacattaatatctgctggagtcctgatgggcagaccattgctgtaggcaacaaggatgatgtggtgacctttattgatgccaagacacaccgttccaaagcagaagagcagttcaagttcgaggtcaacgaaatctcctggaacaatgacaataatatgttcttcctgacaaatggcaatggttgtatcaacatcctcagctacccagaactgaagcctgtgcagtccatcaacgcccatccttccaactgcatctgtatcaagtttgaccccatggggaagtactttgccacaggaagtgcagatgctttggtcagcctctgggatgtggatgagttagtgtgtgttcggtgcttttccaggctggattggcctgtaagaaccctcagtttcagccatgatgggaaaatgctggcgtcagcatcggaagatcattttattgacattgctgaagtggagacagatcttggctcactgcaacctctgccacctgggttcaagctattctcctgcctcagcctcccgagtagctgggattacaggctcctgccaccactcctggctaatttttgtatttttagtggagatggggttttgccatgttgggcaggctggtctcgaactcctgacctcacatgatccactcgccttggcctcccaaagtgattacaggcgtgagccaccacgcccagcggaatttcttattctttttgatctatcaaaacacctcaattgttctcaatgactgaccaaagcttgggaacctctga

SEQ ID NO: 437792 - DNA, 1518 bp, Homo sapiens
tgtttagaaggttagtgttggttcttttattcgattaaacaggaatacacatatgtctaccaaagaataggtaagggagaaataagaacactaaaaaaactcggaatcgttaagtgtgaagcatatttggagttaaaagaaccaaatattactaagtaagcagacgcgggcacgcgctgcataccgggatttgtagtcccttccggggcggggtacagcgcgcctgcgcagaggggccgtcgctcttccgggcgcatgcgtgcggcagcggcgccaggactgactgcgccgtggaggctgctgcagtgttgtgagttggaagctggggagctcggcatggcggtccccgctgcagccatggggccctcggcgttgggccagagcggccccggctcgatggccccgtggtgctcagtgagcagcggcccgtcgcgctacgtgcttgggatgcaggagctgttccggggccacagcaagacgcgcgagttcctggcgcacagcgccaaggtgcactcggtggcctttattgatgccaagacacaccgttccaaagcagaagagcagttcaagttcgaggtcaacgaaatctcctggaacaatgacaataatatgttcttcctgacaaatggcaatggttgtatcaacatcctcagctacccagaactgaagcctgtgcagtccatcaacgcccatccttccaactgcatctgtatcaagtttgaccccatggggaagtactttgccacaggaagtgcagatgctttggtcagcctctgggatgtggatgagttagtgtgtgttcggtgcttttccaggctggattggcctgtaagaaccctcagtttcagccatgatgggaaaatgctggcgtcagcatcggaagatcattttattgacattgctgaagtggagacaggggacaaactatgggaggtacagtgtgagtctccgaccttcacagtggcgtggcaccccaaaaggcctctgctggcatttgcctgtgatgacaaagacggcaaatatgacagcagccgggaagccggaactgtgaagctgtttgggcttcctaatgattcttgagaggaggttgtagggagaggaggccccggcagaggtcttccttcatgtggttagtttggtctgttctctcggagttggtgggcaccctaaatatttgtaagttggtataaattgtaaacgtctctggtcaggctgcgcatttcgttcttttgctttgtctgtgtattagctctttccattctttgcccccagcatgagttaactcgcgtggactctgcagtgcgagtagtgaccccagcataccttgtcctctggacctcctgtcttctctgcttctgggtgcatggtagactttgtggcatttgatacaacttggacaatacctagtttggagggaggggaatggaagggcatggaagtttttttaaataattaaaaatatatacatataattttgagaattgagcatttaataaactgacttttgttattatggaa

SEQ ID NO: 437793 - DNA, 1096 bp, Homo sapiens
tctaccacaacaaaccaaatttataagacaacccctcacaatcatttaggaatgccacagtaagggaatggaaatacactaaaataatttttgttcccttctctctctaatttagtcagtcataataacaaagcagcttcatgttaaggacttaattctgattccattgcttggtctgtcaattttatttatcatatcaatctacctcccattaccaccatccgagtccaagttaccatcacctcagacctggacaaccacagaagcctcctcactggtctctctgtttccatcttggccctccttcagtcaattttctatatggtagccagagcaatttggaaaaagcactgtgtctttcactctaaaataaccgatgtcctgtgtatagttgctggattggcctgtaagaaccctcagtttcagccatgatgggaaaatgctggcgtcagcatcggaagatcattttattgacattgctgaagtggagacaggggacaaactatgggaggtacagtgtgagtctccgaccttcacagtggcgtggcaccccaaaaggcctctgctggcatttgcctgtgatgacaaagacggcaaatatgacagcagccgggaagccggaactgtgaagctgtttgggcttcctaatgattcttgagaggaggttgtagggagaggaggccccggcagaggtcttccttcatgtggttagtttggtctgttctctcggagttggtgggcaccctaaatatttgtaagttggtataaattgtaaacgtctctggtcaggctgcgcatttcgttcttttgctttgtctgtgtattagctctttccattctttgcccccagcatgagttaactcgcgtggactctgcagtgcgagtagtgaccccagcataccttgtcctctggacctcctgtcttctctgcttctgggtgcatggtagactttgtggcatttgatacaacttggacaatacctagtttggagggaggggaatggaagggcatggaagtttttttaaataattaaaaatatatacatataattttgagaattgagcatttaataaactgacttttgttattatggaa

SEQ ID NO: 437794 - DNA, 360 bp, Homo sapiens
cagttcaagttcgaggtcaacgaaatctcctggaacaatgacaataatatgttcttcctgacaaatggcaatggttgtatcaacatcctcaggtgagggggtctagcttaggggactgtcatgtctttgtgctgggtgctgtgtcagatatggagatgaattagatgtgagcctatcctgaaggagcttaaaacacaaatagtaagagagaatcctaacctgtcttaagtacatttgagctgtatattttatatactttatattttactgagtccttacagaaattctaggggttgatgatttgcttctcatttgacagatgaggatctgagggtgagaggttacatcagtagtcagcta

SEQ ID NO: 437795 - DNA, 1856 bp, Homo sapiens
tgtttagaaggttagtgttggttcttttattcgattaaacaggaatacacatatgtctaccaaagaataggtaagggagaaataagaacactaaaaaaactcggaatcgttaagtgtgaagcatatttggagttaaaagaaccaaatattactaagtaagcagacgcgggcacgcgctgcataccgggatttgtagtcccttccggggcggggtacagcgcgcctgcgcagaggggccgtcgctcttccgggcgcatgcgtgcggcagcggcgccaggactgactgcgccgtggaggctgctgcagtgttgtgagttggaagctggggagctcggcatggcggtccccgctgcagccatggggccctcggcgttgggccagagcggccccggctcgatggccccgtggtgctcagtgagcagcggcccgtcgcgctacgtgcttgggatgcaggagctgttccggggccacagcaagacgcgcgagttcctggcgcacagcgccaaggtgcactcggtggcctggagttgcgacgggcgtcgcctagcctcggggtccttcgacaagacggccagcgtcttcttgctggagaaggaccggttggtcaaagaaaacaattatcggggacatggggatagtgtggaccagctttgttggcatccaagtaatcctgacctatttgttacggcgtccggagataaaaccattcgcatctgggatgtgaggactacaaaatgcattgccactgtgaacactaaaggggagaacattaatatctgctggagtcctgatgggcagaccattgctgtaggcaacaaggatgatgtggtgacctttattgatgccaagacacaccgttccaaagcagaagagcagttcaagttcgaggtcaacgaaatctcctggaacaatgacaataatatgttcttcctgacaaatggcaatggttgtatcaacatcctcagctacccagaactgaagcctgtgcagtccatcaacgcccatccttccaactgcatctgtatcaagtttgaccccatggggaagtactttgccacaggaagtgcagatgctttggtcagcctctgggatgtggatgagttagtgtgtgttcggtgcttttccaggctggattggcctgtaagaaccctcagtttcagccatgatgggaaaatgctggcgtcagcatcggaagatcattttattgacattgctgaagtggagacaggggacaaactatgggaggtacagtgtgagtctccgaccttcacagtggcgtggcaccccaaaaggcctctgctggcatttgcctgtgatgacaaagacggcaaatatgacagcagccgggaagccggaactgtgaagctgtttgggcttcctaatgattcttgagaggaggttgtagggagaggaggccccggcagaggtcttccttcatgtggttagtttggtctgttctctcggagttggtgggcaccctaaatatttgtaagttggtataaattgtaaacgtctctggtcaggctgcgcatttcgttcttttgctttgtctgtgtattagctctttccattctttgcccccagcatgagttaactcgcgtggactctgcagtgcgagtagtgaccccagcataccttgtcctctggacctcctgtcttctctgcttctgggtgcatggtagactttgtggcatttgatacaacttggacaatacctagtttggagggaggggaatggaagggcatggaagtttttttaaataattaaaaatatatacatataattttgagaattgagcatttaataaactgacttttgttattatggaaaaaaaaacatggttactcagtcaggg

SEQ ID NO: 437796 - DNA, 1871 bp, Homo sapiens
tgtttagaaggttagtgttggttcttttattcgattaaacaggaatacacatatgtctaccaaagaataggtaagggagaaataagaacactaaaaaaactcggaatcgttaagtgtgaagcatatttggagttaaaagaaccaaatattactaagtaagcagacgcgggcacgcgctgcataccgggatttgtagtcccttccggggcggggtacagcgcgcctgcgcagaggggccgtcgctcttccgggcgcatgcgtgcggcagcggcgccaggactgactgcgccgtggaggctgctgcagtgttgtgagttggaagctggggagctcggcatggcggtccccgctgcagccatggggccctcggcgttgggccagagcggccccggctcgatggccccgtggtgctcagtgagcagcggcccgtcgcgctacgtgcttgggatgcaggagctgttccggggccacagcaagacgcgcgagttcctggcgcacagcgccaaggtgcactcggtggcctggagttgcgacgggcgtcgcctagcctcggggtccttcgacaagacggccagcgtcttcttgctggagaaggaccggttggtcaaagaaaacaattatcggggacatggggatagtgtggaccagctttgttggcatccaagtaatcctgacctatttgttacggcgtccggagataaaaccattcgcatctgggatgtgaggactacaaaatgcattgccactgtgaacactaaaggggagaacattaatatctgctggagtcctgatgggcagaccattgctgtaggcaacaaggatgatgtggtgacctttattgatgccaagacacaccgttccaaagcagaagagcagttcaagttcgaggtcaacgaaatctcctggaacaatgacaataatatgttcttcctgacaaatggcaatggttgtatcaacatcctcagctacccagaactgaagcctgtgcagtccatcaacgcccatccttccaactgcatctgtatcaagtttgaccccatggggaagtactttgccacaggaagtgcagatgctttggtcagcctctgggatgtggatgagttagtgtgtgttcggtgcttttccaggctggattggcctgtaagaaccctcagtttcagccatgatgggaaaatgctggcgtcagcatcggaagatcattttattgacattgctgaagtggagacaggggacaaactatgggaggtacagtgtgagtctccgaccttcacagtggcgtggcaccccaaaaggcctctgctggcatttgcctgtgatgacaaagacggcaaatatgacagcagccgggaagccggaactgtgaagctgtttgggcttcctaatgattcttgagaggaggttgtagggagaggaggccccggcagaggtcttccttcatgtggttagtttggtctgttctctcggagttggtgggcaccctaaatatttgtaagttggtataaattgtaaacgtctctggtcaggctgcgcatttcgttcttttgctttgtctgtgtattagctctttccattctttgcccccagcatgagttaactcgcgtggactctgcagtgcgagtagtgaccccagcataccttgtcctctggacctcctgtcttctctgcttctgggtgcatggtagactttgtggcatttgatacaacttggacaatacctagtttggagggaggggaatggaagggcatggaagtttttttaaataattaaaaatatatacatataattttgagaattgagcatttaataaactgacttttgttattatggaaataactacttataatttttcttcttttcttgcttctcctct

SEQ ID NO: 437797 - DNA, 1893 bp, Homo sapiens
tgtttagaaggttagtgttggttcttttattcgattaaacaggaatacacatatgtctaccaaagaataggtaagggagaaataagaacactaaaaaaactcggaatcgttaagtgtgaagcatatttggagttaaaagaaccaaatattactaagtaagcagacgcgggcacgcgctgcataccgggatttgtagtcccttccggggcggggtacagcgcgcctgcgcagaggggccgtcgctcttccgggcgcatgcgtgcggcagcggcgccaggactgactgcgccgtggaggctgctgcagtgttgtgagttggaagctggggagctcggcatggcggtccccgctgcagccatggggccctcggcgttgggccagagcggccccggctcgatggccccgtggtgctcagtgagcagcggcccgtcgcgctacgtgcttgggatgcaggagctgttccggggccacagcaagacgcgcgagttcctggcgcacagcgccaaggtgcactcggtggcctggagttgcgacgggcgtcgcctagcctcggggtccttcgacaagacggccagcgtcttcttgctggagaaggaccggttggtcaaagaaaacaattatcggggacatggggatagtgtggaccagctttgttggcatccaagtaatcctgacctatttgttacggcgtccggagataaaaccattcgcatctgggatgtgaggactacaaaatgcattgccactgtgaacactaaaggggagaacattaatatctgctggagtcctgatgggcagaccattgctgtaggcaacaaggatgatgtggtgacctttattgatgccaagacacaccgttccaaagcagaagagcagttcaagttcgaggtcaacgaaatctcctggaacaatgacaataatatgttcttcctgacaaatggcaatggttgtatcaacatcctcagctacccagaactgaagcctgtgcagtccatcaacgcccatccttccaactgcatctgtatcaagtttgaccccatggggaagtactttgccacaggaagtgcagatgctttggtcagcctctgggatgtggatgagttagtgtgtgttcggtgcttttccaggctggattggcctgtaagaaccctcagtttcagccatgatgggaaaatgctggcgtcagcatcggaagatcattttattgacattgctgaagtggagacaggggacaaactatgggaggtacagtgtgagtctccgaccttcacagtggcgtggcaccccaaaaggcctctgctggcatttgcctgtgatgacaaagacggcaaatatgacagcagccgggaagccggaactgtgaagctgtttgggcttcctaatgattcttgagaggaggttgtagggagaggaggccccggcagaggtcttccttcatgtggttagtttggtctgttctctcggagttggtgggcaccctaaatatttgtaagttggtataaattgtaaacgtctctggtcaggctgcgcatttcgttcttttgctttgtctgtgtattagctctttccattctttgcccccagcatgagttaactcgcgtggactctgcagtgcgagtagtgaccccagcataccttgtcctctggacctcctgtcttctctgcttctgggtgcatggtagactttgtggcatttgatacaacttggacaatacctagtttggagggaggggaatggaagggcatggaagtttttttaaataattaaaaatatatacatataattttgagaattgagcatttaataaactgacttttgttattatggaactcgttaattactggcaaaacaaacaagaagcacaacaaaaagaaaacaaaagtggggcacgc

SEQ ID NO: 437798 - DNA, 1542 bp, Homo sapiens
tgtttagaaggttagtgttggttcttttattcgattaaacaggaatacacatatgtctaccaaagaataggtaagggagaaataagaacactaaaaaaactcggaatcgttaagtgtgaagcatatttggagttaaaagaaccaaatattactaagtaagcagacgcgggcacgcgctgcataccgggatttgtagtcccttccggggcggggtacagcgcgcctgcgcagaggggccgtcgctcttccgggcgcatgcgtgcggcagcggcgccaggactgactgcgccgtggaggctgctgcagtgttgtgagttggaagctggggagctcggcatggcggtccccgctgcagccatggggccctcggcgttgggccagagcggccccggctcgatggccccgtggtgctcagtgagcagcggcccgtcgcgctacgtgcttgggatgcaggagctgttccggggccacagcaagacgcgcgagttcctggcgcacagcgccaaggtgcactcggtggcctggagttgcgacgggcgtcgcctagcctcggggtccttcgacaagacggccagcgtcttcttgctggagaaggaccggttggtcaaagaaaacaattatcggggacatggggatagtgtggaccagctttgttggcatccaagtaatcctgacctatttgttacggcgtccggagataaaaccattcgcatctgggatgtgaggactacaaaatgcattgccactgtgaacactaaaggggagaacattaatatctgctggagtcctgatgggcagaccattgctgtaggcaacaaggatgatgtggtgacctttattgatgccaagacacaccgttccaaagcagaagagcagttcaagttcgaggtcaacgaaatctcctggaacaatgacaataatatgttcttcctgacaaatggcaatggttgtatcaacatcctcagctacccagaactgaagcctgtgcagtccatcaacgcccatccttccaactgcatctgtatcaagtttgaccccatggggaagtactttgccacaggaagtgcagatgctttggtcagcctctgggatgtggatgagttagtgtgtgttcggtgcttttccaggctggattggcctgtaagaaccctcagtttcagccatgatgggaaaatgctggcgtcagcatcggaagatcattttattgacattgctgaagtggagacaggggacaaactatgggaggtacagtgtgagtctccgaccttcacagtggcgtggcaccccaaaaggcctctgctggcatttgcctgtgatgacaaagacggcaaatatgacagcagccgggaagccggaactgtgaagctgtttgggcttcctaatgattcttgagaggaggttgtagggagaggaggccccggcagaggtcttccttcatgtggttagtttggtctgttctctcggagttggtgggcaccctaaatatttgtaagttggtataaattgtaaacgtctctgaccaagctaaggatcctgtgacca

SEQ ID NO: 437799 - DNA, 1411 bp, Homo sapiens
tgtttagaaggttagtgttggttcttttattcgattaaacaggaatacacatatgtctaccaaagaataggtaagggagaaataagaacactaaaaaaactcggaatcgttaagtgtgaagcatatttggagttaaaagaaccaaatattactaagtaagcagacgcgggcacgcgctgcataccgggatttgtagtcccttccggggcggggtacagcgcgcctgcgcagaggggccgtcgctcttccgggcgcatgcgtgcggcagcggcgccaggactgactgcgccgtggaggctgctgcagtgttgtgagttggaagctggggagctcggcatggcggtccccgctgcagccatggggccctcggcgttgggccagagcggccccggctcgatggccccgtggtgctcagtgagcagcggcccgtcgcgctacgtgcttgggatgcaggagctgttccggggccacagcaagacgcgcgagttcctggcgcacagcgccaaggtgcactcggtggcctggagttgcgacgggcgtcgcctagcctcggggtccttcgacaagacggccagcgtcttcttgctggagaaggaccggttggtcaaagaaaacaattatcggggacatggggatagtgtggaccagctttgttggcatccaagtaatcctgacctatttgttacggcgtccggagataaaaccattcgcatctgggatgtgaggactacaaaatgcattgccactgtgaacactaaaggggagaacattaatatctgctggagtcctgatgggcagaccattgctgtaggcaacaaggatgatgtggtgacctttattgatgccaagacacaccgttccaaagcagaagagcagttcaagttcgaggtcaacgaaatctcctggaacaatgacaataatatgttcttcctgacaaatggcaatggttgtatcaacatcctcagctacccagaactgaagcctgtgcagtccatcaacgcccatccttccaactgcatctgtatcaagtttgaccccatggggaagtactttgccacaggaagtgcagatgctttggtcagcctctgggatgtggatgagttagtgtgtgttcggtgcttttccaggctggattggcctgtaagaaccctcagtttcagccatgatgggaaaatgctggcgtcagcatcggaagatcattttattgacattgctgaagtggagacagtccaacagacacactcagcctcccagaaagcagctggccccctggccaagaggccagtttgcagcatcgtgatcattccaccatctttgctgccatttgaatcttgaatcagctttgtgtacctgtaataaattccacttagccatggcatgtagttttttaaaaatacattgttgaatttga

SEQ ID NO: 437800 - DNA, 1166 bp, Homo sapiens
tgtttagaaggttagtgttggttcttttattcgattaaacaggaatacacatatgtctaccaaagaataggtaagggagaaataagaacactaaaaaaactcggaatcgttaagtgtgaagcatatttggagttaaaagaaccaaatattactaagtaagcagacgcgggcacgcgctgcataccgggatttgtagtcccttccggggcggggtacagcgcgcctgcgcagaggggccgtcgctcttccgggcgcatgcgtgcggcagcggcgccaggactgactgcgccgtggaggctgctgcagtgttgtgagttggaagctggggagctcggcatggcggtccccgctgcagccatggggccctcggcgttgggccagagcggccccggctcgatggccccgtggtgctcagtgagcagcggcccgtcgcgctacgtgcttgggatgcaggagctgttccggggccacagcaagacgcgcgagttcctggcgcacagcgccaaggtgcactcggtggcctggagttgcgacgggcgtcgcctagcctcggggtccttcgacaagacggccagcgtcttcttgctggagaaggaccggttggtcaaagaaaacaattatcggggacatggggatagtgtggaccagctttgttggcatccaagtaatcctgacctatttgttacggcgtccggagataaaaccattcgcatctgggatgtgaggactacaaaatgcattgccactgtgaacactaaaggggagaacattaatatctgctggagtcctgatgggcagaccattgctgtaggcaacaaggatgatgtggtgacctttattgatgccaagacacaccgttccaaagcagaagagcagttcaagttcgaggtcaacgaaatctcctggaacaatgacaataatatgttcttcctgacaaatggcaatggttgtatcaacatcctcagctacccagaactgaagcctgtgcagtccatcaacgcccatccttccaactgcatctgtatcaagtttgaccccatggggaagtactttgccacaggaagtgcagatgctttggtcagcctctgggatgtggatgagttagtgtgtgttcggtgcttttccagctggatggccttccgtacctctcaactcagcccatgatg

SEQ ID NO: 437801 - DNA, 694 bp, Homo sapiens
aggggatggtgccttaaaattcactagactcccaggtagttgaacttcgtgaagaaagtggtaacctgagatgaggattgatgcctcctttactgggatgtacttctgagagccagacttaccttcgcacagccatagctccccaagaatagcattccctctcccaccaaaaaaacatccggatctcaattttcataccaggatgcttactgcagactgtaatcagtttcctggttgcaagatttctctctgctcgttggcaagtcagcctctcagaagatatgataactacatctgtagatgatttgtacaatgttgggggtgggcagtggaccccagtggtttatgctcatgcttgccattctgtccctgaagacacagttccttgagtccagaagatttttgttttttgtgacattccttttaaaaatggctgtattcctgggagggggtcacccagggagcagttaccaaccaacttctaagcaaatctctccacggccagaggttatcttttttaaggcgtctagtggaatggatgagtgtgcctgagaaggatgggaaaagagatgtcagaaataagaccaggggctgagagggaagaagatatgtgagggagcagccagaacttgagccagtctcttcctcttgtccctttcctccgatcaccccaggaactggcctcccacctccc

SEQ ID NO: 437802 - DNA, 545 bp, Homo sapiens
ggccacgaggggaaattgacgaacacgtgacgcggtcgggcggaccactgcagactgagcggtggaccgaattgggaccgctggcttataagcgatcatgtttctccagtattacctcaacgagcagggagatcgagtctatacgctgaagaaatttgacccgatgggacaacagacctgctcagcccatcctgctcggttctccccagatgacaaatactctcgacaccgaatcaccatcaagaaacgcttcaaggtgctcatgacccagcaaccgcgccctgtcctctgagggtcccttaaactgatgtcttttctgccacctgttacccctcggagactccgtaaccaaactcttcggactgtgagccctgatgcctttttgccagccatactctttggcatccagtctctcgtggcgattgattatgcttgtgtgaggcaatcatggtggcatcacccataaagggaacacatttgacttttttttctcatattttaaattactacaagattattaaagataaaatgatttgaaaaactct

SEQ ID NO: 437803 - DNA, 569 bp, Homo sapiens
agacgacgaaggacggcgcgagaagacgacagaaggttacggtgcgagaagacgacagaagggagggaccactgcagactgagcggtggaccgaattgggaccgctggcttataagcgatcatgtttctccagtattacctcaacgagcagggagatcgagtctatacgctgaagaaatttgacccgatgggacaacagacctgctcagcccatcctgctcggttctccccagatgacaaatactctcgacaccgaatcaccatcaagaaacgcttcaaggtgctcatgacccagcaaccgcgccctgtcctctgagggtcccttaaactgatgtcttttctgccacctgttacccctcggagactccgtaaccaaactcttcggactgtgagccctgatgcctttttgccagccatactctttggcatccagtctctcgtggcgattgattatgcttgtgtgaggcaatcatggtggcatcacccataaagggaacacatttgacttttttttctcatattttaaattactacaagattattaaagataaaatgatttgaaaaactct

SEQ ID NO: 437804 - DNA, 557 bp, Homo sapiens
tgattcgatttatcgcccatatagggattggcctgaggcaagatcggcacgagggaccactgcagactgagcggtggaccgaattgggaccgctggcttataagcgatcatgtttctccagtattacctcaacgagcagggagatcgagtctatacgctgaagaaatttgacccgatgggacaacagacctgctcagcccatcctgctcggttctccccagatgacaaatactctcgacaccgaatcaccatcaagaaacgcttcaaggtgctcatgacccagcaaccgcgccctgtcctctgagggtcccttaaactgatgtcttttctgccacctgttacccctcggagactccgtaaccaaactcttcggactgtgagccctgatgcctttttgccagccatactctttggcatccagtctctcgtggcgattgattatgcttgtgtgaggcaatcatggtggcatcacccataaagggaacacatttgacttttttttctcatattttaaattactacaagattattaaagataaaatgatttgaaaaactct

SEQ ID NO: 437805 - DNA, 547 bp, Homo sapiens
  misc_feature (26)..(26): n is a, c, g, or t
  misc_feature (38)..(38): n is a, c, g, or t
aattcgccgccggtcgacacggcgcnagaagacgacanaggggggaccactgcagactgagcggtggaccgaattgggaccgctggcttataagcgatcatgtttctccagtattacctcaacgagcagggagatcgagtctatacgctgaagaaatttgacccgatgggacaacagacctgctcagcccatcctgctcggttctccccagatgacaaatactctcgacaccgaatcaccatcaagaaacgcttcaaggtgctcatgacccagcaaccgcgccctgtcctctgagggtcccttaaactgatgtcttttctgccacctgttacccctcggagactccgtaaccaaactcttcggactgtgagccctgatgcctttttgccagccatactctttggcatccagtctctcgtggcgattgattatgcttgtgtgaggcaatcatggtggcatcacccataaagggaacacatttgacttttttttctcatattttaaattactacaagattattaaagataaaatgatttgaaaaactct

SEQ ID NO: 437806 - DNA, 786 bp, Homo sapiens
  misc_feature (594)..(594): n is a, c, g, or t
  misc_feature (598)..(598): n is a, c, g, or t
  misc_feature (600)..(600): n is a, c, g, or t
  misc_feature (609)..(609): n is a, c, g, or t
  misc_feature (624)..(625): n is a, c, g, or t
  misc_feature (627)..(627): n is a, c, g, or t
tgattcgatttatcgcccatatagggattggcctgaggcaagatcggcacgagggaccactgcagactgagcggtggaccgaattgggaccgctggcttataagcgatcatgtttctccagtattacctcaacgagcagggagatcgagtctatacgctgaagaaatttgacccgatgggacaacagacctgctcagcccatcctgctcggttctccccagatgacaaatactctcgacaccgaatcaccatcaagaaacgcttcaaggtgctcatgacccagcaaccgcgccctgtcctctgagggtcccttaaactgatgtcttttctgccacctgttacccctcggagactccgtaaccaaactcttcggactgtgagccctgatgcctttttgccagccatactctttggcatccagtctctcgtggcgattgattatgcttgtgtgaggcaatcatggtggcatcacccataaagggaacacatttgacttttttttctcatattttaaattactacaagattattaaagataaaatgatttgaaaaactctaaaaaaaaaaaaaaaaaaaaaaaaaactgtgtggggnggcntngggccctgnaaaaaggtttttaanncncttctgttggggcgggccccatagtgaaggtagacttgccacgctgttccaagagacctggctacgcagtggtggttccccaataaaacgcgggggaccggcgtttggacatcaaggggtcgggctcggtctcaagtcacgtctagcccgcgggtgtgc

SEQ ID NO: 437807 - DNA, 763 bp, Homo sapiens
ggccacgaggggaaattgacgaacacgtgacgcggtcgggcggaccactgcagactgagcggtggaccgaattgggaccgctggcttataagcgatcatgtttctccagtattacctcaacgagcagggagatcgagtctatacgctgaagaaatttgacccgatgggacaacagacctgctcagcccatcctgctcggttctccccagatgacaaatactctcgacaccgaatcaccatcaagaaacgcttcaaggtgctcatgacccagcaaccgcgccctgtcctctgagggtcccttaaactgatgtcttttctgccacctgttacccctcggagactccgtaaccaaactcttcggactgtgagccctgatgcctttttgccagccatactctttggcatccagtctctcgtggcgattgattatgcttgtgtgaggcaatcatggtggcatcacccataaagggaacacatttgacttttttttctcatattttaaattactacaagattattaaagataaaatgatttgaaaaactctaaatataataaatattctcgtctctctgactctataccaccatggtcgcaattattatcttctatacccactacgttaaaagaacattgtcgcccgcttggcccagcacgatttaccttgggcaggtttatgattgcggcccattttgagctcattgggcttccgcctaatggggggcgtttaacatataactggccggtgtttccgtcgtggctggg

SEQ ID NO: 437808 - DNA, 610 bp, Homo sapiens
ggccacgaggggaaattgacgaacacgtgacgcggtcgggcggaccactgcagactgagcggtggaccgaattgggaccgctggcttataagcgatcatgtttctccagtattacctcaacgagcagggagatcgagtctatacgctgaagaaatttgacccgatgggacaacagacctgctcagcccatcctgctcggttctccccagatgacaaatactctcgacaccgaatcaccatcaagaaacgcttcaaggtgctcatgacccagcaaccgcgccctgtcctctgagggtcccttaaactgatgtcttttctgccacctgttacccctcggagactccgtaaccaaactcttcggactgtgagccctgatgcctttttgccagccatactctttggcatccagtctctcgtggcgattgattatgcttgtgtgaggcaatcatggtggcatcacccataaagggaacacatttgacttttttttctcatattttaaattactacaagattattaaagataaaatgatttgaaaaactctaaacaaacaatataatcaatttatttcaacaatcactggccgtctttttacaacgtcttgactgg

SEQ ID NO: 437809 - DNA, 491 bp, Homo sapiens
tgattcgatttatcgcccatatagggattggcctgaggcaagatcggcacgagggaccactgcagactgagcggtggaccgaattgggaccgctggcttataagcgatcatgtttctccagtattactcagcccatcctgctcggttctccccagatgacaaatactctcgacaccgaatcaccatcaagaaacgcttcaaggtgctcatgacccagcaaccgcgccctgtcctctgagggtcccttaaactgatgtcttttctgccacctgttacccctcggagactccgtaaccaaactcttcggactgtgagccctgatgcctttttgccagccatactctttggcatccagtctctcgtggcgattgattatgcttgtgtgaggcaatcatggtggcatcacccataaagggaacacatttgacttttttttctcatattttaaattactacaagattattaaagataaaatgatttgaaaaactct

SEQ ID NO: 437810 - DNA, 491 bp, Homo sapiens
ggccacgaggggaaattgacgaacacgtgacgcggtcgggcggaccactgcagactgagcggtggaccgaattgggaccgctggcttataagcgatcatgtttctccagtattacctcaacgagcagggagatcgagtctatacgctgaagaaatttgacccgatgggacaacagacctgctcagcccatcctgctcggttctccccagatgacaaatactctcgacaccgaatcaccatcaagaaacgcttcaaggtgctcatgacccagcaaccgcgccctgtcctctgaggctcgttaatcttttacgctgctcatgcctcggctattatcagcaaccaaacgcgtcaatctgtaagcttgaagcttcccatgctgtttggaatcctatctcatcaccacgtgaatgagtctatactgatgggctcgcggttatatgaacaatattttcttcttttttcatgccagttattaaagatatagtgactga

SEQ ID NO: 437811 - DNA, 319 bp, Homo sapiens
tttttcaaatcattttatctttaataatcttgtagtaatttaaaatatgagaaaaaaaagtcaaatgtgtcccttaaactgatgtcttttctgccacctgttacccctcggagactccgtaaccaaactcttcggactgtgagccctgatgcctttttgccagccatactctttggcatccagtctctcgtggcgattgattatgcttgtgtgaggcaatcatggtggcatcacccataaagggaacacatttgacttttttttctcatattttaaattactacaagattattaaagataaaatgatttgaaaaactct

SEQ ID NO: 437812 - DNA, 1380 bp, Homo sapiens
agacgacgaaggacggcgcgagaagacgacagaaggttacggtgcgagaagacgacagaagggagggaccactgcagactgagcggtggaccgaattgggaccgctggcttataagcgatcatgtttctccagtattacctcaacgagcagggagatcgagtctatacgctgaagaaatttgacccgatgggacaacagacctgctcagcccatcctgctcggttctccccagatgacaaatactctcgacaccgaatcaccatcaagaaacgcttcaaggtgctcatgacccagcaaccgcgccctgtcctctgagggtcccttaaactgatgtcttttctgccacctgttacccctcggagactccgtaaccaaactcttcggactgtgagccctgatgcctttttgccagccatactctttggcatccagtctctcgtggcgattgattatgcttgtgtgaggcaatcatggtggcatcacccataaagggaacacatttgacttttttttctcatattttaaattactacaagattattaaagataaaatgatttgaaaaactctaaaaaaaaaacaaccaaacaaaacaacaaaaaacaaaaaaaacaaaaaaaaaaaaaaaaaaaaaaaaaaaaaaaaaacaaaaaaacacaacacacaaaaaaaaaagcggcggcgcgcggccccccaactctcccccgcgggccccccaccacccccccccttcttaccaccgcgccccccacagtagtgggtgggatgtattattattatatatccgccgccaggggttgctgttcttattaaacacacacgcttcgtgcggggaagaatccatactcgacttacgtcgcagtgttctatgggagagaagaccacacctctattcctgggggagggcgcaatacaaacatgtcgagaggaaataacgtcactcgatcagtaatatcttattgcactacactagggataacataaagcagacttgagtcgcggtggtttactttcgtgctggtgtcacacaccacgacccaggattgatggctggcggcttagcgactcagacgacatttttgcacgagcgacaggaggttcttaatacttacgactaacacctatctattcgcgcgcgaggagcgggttctatcaatagaagaataccaactcacaactcgcgcaacaccccatatcacagacagcaagaggtgcagatatcatacgccagacctaggatctggacaccaccccctaacttcctccaacaccagcagcacgtctgctaccgcgatatcaacgtaacaggttcgtccaacgcgacggccacgcaccactgcagcagtaagaacgtcaaccaccgcatctgcaaccacactcc

SEQ ID NO: 437813 - DNA, 244 bp, Homo sapiens
ggaccactgcagactgagcggtggaccgaattgggaccgctggcttataagcgatcatgtttctccagtattacctcaacgagcagggagatcgagtctatacgctgaaggtgaggagagaaaacagggtgtaaataggcatggcgagaaatgtagatgggaggagtgggtgaggtcatacgtggagttacctagctgggtgcggggaaccagaaagtccagaaccgaggtggggaagaaccgg

SEQ ID NO: 437814 - DNA, 1356 bp, Homo sapiens
ggccacgaggggaaattgacgaacacgtgacgcggtcgggcggaccactgcagactgagcggtggaccgaattgggaccgctggcttataagcgatcatgtttctccagtattacctcaacgagcagggagatcgagtctatacgctgaagaaatttgacccgatgggacaacagacctgctcagcccatcctgctcggttctccccagatgacaaatactctcgacaccgaatcaccatcaagaaacgcttcaaggtgctcatgacccagcaaccgcgccctgtcctctgagggtcccttaaactgatgtcttttctgccacctgttacccctcggagactccgtaaccaaactcttcggactgtgagccctgatgcctttttgccagccatactctttggcatccagtctctcgtggcgattgattatgcttgtgtgaggcaatcatggtggcatcacccataaagggaacacatttgacttttttttctcatattttaaattactacaagattattaaagataaaatgatttgaaaaactctaaaaaaaaaacaaccaaacaaaacaacaaaaaacaaaaaaaacaaaaaaaaaaaaaaaaaaaaaaaaaaaaaaaaaacaaaaaaacacaacacacaaaaaaaaaagcggcggcgcgcggccccccaactctcccccgcgggccccccaccacccccccccttcttaccaccgcgccccccacagtagtgggtgggatgtattattattatatatccgccgccaggggttgctgttcttattaaacacacacgcttcgtgcggggaagaatccatactcgacttacgtcgcagtgttctatgggagagaagaccacacctctattcctgggggagggcgcaatacaaacatgtcgagaggaaataacgtcactcgatcagtaatatcttattgcactacactagggataacataaagcagacttgagtcgcggtggtttactttcgtgctggtgtcacacaccacgacccaggattgatggctggcggcttagcgactcagacgacatttttgcacgagcgacaggaggttcttaatacttacgactaacacctatctattcgcgcgcgaggagcgggttctatcaatagaagaataccaactcacaactcgcgcaacaccccatatcacagacagcaagaggtgcagatatcatacgccagacctaggatctggacaccaccccctaacttcctccaacaccagcagcacgtctgctaccgcgatatcaacgtaacaggttcgtccaacgcgacggccacgcaccactgcagcagtaagaacgtcaaccaccgcatctgcaaccacactcc

SEQ ID NO: 437815 - DNA, 774 bp, Homo sapiens
  misc_feature (582)..(582): n is a, c, g, or t
  misc_feature (586)..(586): n is a, c, g, or t
  misc_feature (588)..(588): n is a, c, g, or t
  misc_feature (597)..(597): n is a, c, g, or t
  misc_feature (612)..(613): n is a, c, g, or t
  misc_feature (615)..(615): n is a, c, g, or t
ggccacgaggggaaattgacgaacacgtgacgcggtcgggcggaccactgcagactgagcggtggaccgaattgggaccgctggcttataagcgatcatgtttctccagtattacctcaacgagcagggagatcgagtctatacgctgaagaaatttgacccgatgggacaacagacctgctcagcccatcctgctcggttctccccagatgacaaatactctcgacaccgaatcaccatcaagaaacgcttcaaggtgctcatgacccagcaaccgcgccctgtcctctgagggtcccttaaactgatgtcttttctgccacctgttacccctcggagactccgtaaccaaactcttcggactgtgagccctgatgcctttttgccagccatactctttggcatccagtctctcgtggcgattgattatgcttgtgtgaggcaatcatggtggcatcacccataaagggaacacatttgacttttttttctcatattttaaattactacaagattattaaagataaaatgatttgaaaaactctaaaaaaaaaaaaaaaaaaaaaaaaaactgtgtggggnggcntngggccctgnaaaaaggtttttaanncncttctgttggggcgggccccatagtgaaggtagacttgccacgctgttccaagagacctggctacgcagtggtggttccccaataaaacgcgggggaccggcgtttggacatcaaggggtcgggctcggtctcaagtcacgtctagcccgcgggtgtgc

SEQ ID NO: 437816 - DNA, 1458 bp, Homo sapiens
cgcgatgctttccctgccgaggtgaggggagcgactacaactcccagagggtatggcggccgcagcagtgggcagttgagtttccggggcgacccaggtcctccggcggaagcgggagcctctgtcggccgcggaagcctggagtgggcggtacgcagacgcgcgcggtgagacccgctgtctgctcagcggactctgcccgcccccacctccccctgcgtcgggccgacatgaaggactcgctggtgctgctgggccgtgtcccggcgcacccggactcccgctgctggttcctggcctggaaccccgcggggaccctgctggcctcgtgcggcggcgaccggagaatccgcatctggggcacggagggtgacagctggatctgcaagtctgtcctttctgaaggccaccagcgcaccgtgcggaaggtagcctggtccccctgcggtaattacctggcctctgccagctttgatgctaccacttgcatttggaagaagaaccaggatgactttgagtgtgtaaccactctcgagggccatgaaaatgaggtcaagtcagtggcttgggccccatctggcaacctcctggccacttgcagccgagataagagcgtttgggtctgggaagttgatgaagaggatgagtatgaatgtgtcagtgttctcaactcccacacacaggatgtcaagcatgtggtttggcacccaagtcaggagctcttagcttctgccagctatgatgacacagtgaagctgtaccgggaggaagaggatgactgggtatgctgtgccacccttgagggccatgaatccactgtgtggagcttggcctttgacccgagtggccagcgcctggcgtcttgtagtgatgaccgtactgtgcgtatctggcgtcagtatctaccaggcaatgaacaaggggtggcatgcagcggctctgaccccagttggaaatgtatctgtactttgtccggcttccactcaaggaccatttatgacattgcttggtgtcagctgacaggggctctggccacagcttgtggggatgacgcgatccgcgtgtttcaggaggatcccaactcggatccacagcagcccaccttctccctgacagcccacttgcatcaggcccattcccaggatgtcaactgtgtggcctggaaccccaaggagccagggctactggcctcctgcagtgatgatggggaggtggccttctggaagtatcagcggcctgaaggcctctgagctacctcgactttggacagagtaatgactccccagaaaacgtcatataagactttaccagcccctgagaggaccaggaggagcatccttgaccttcatttaacttggctcacttctcttcagacttgggtagaagtgcagagccacagaattgctttccttccccgcctttgacatgaggccttcagtaaagagctacagaacatga

SEQ ID NO: 437817 - DNA, 3370 bp, Homo sapiens
  misc_feature (2788)..(2788): n is a, c, g, or t
  misc_feature (2827)..(2827): n is a, c, g, or t
  misc_feature (2840)..(2840): n is a, c, g, or t
  misc_feature (2856)..(2856): n is a, c, g, or t
cgcgatgctttccctgccgaggtgaggggagcgactacaactcccagagggtatggcggccgcagcagtgggcagttgagtttccggggcgacccaggtcctccggcggaagcgggagcctctgtcggccgcggaagcctggagtgggcggtacgcagacgcgcgcggtgagacccgctgtctgctcagcggactctgcccgcccccacctccccctgcgtcgggccgacatgaaggactcgctggtgctgctgggccgtgtcccggcgcacccggactcccgctgctggttcctggcctggaaccccgcggggaccctgctggcctcgtgcggcggcgaccggagaatccgcatctggggcacggagggtgacagctggatctgcaagtctgtcctttctgaaggccaccagcgcaccgtgcggaaggtagcctggtccccctgcggtaattacctggcctctgccagctttgatgctaccacttgcatttggaagaagaaccaggatgactttgagtgtgtaaccactctcgagggccatgaaaatgaggtcaagtcagtggcttgggccccatctggcaacctcctggccacttgcagccgagataagagcgtttgggtctgggaagttgatgaagaggatgagtatgaatgtgtcagtgttctcaactcccacacacaggatgtcaagcatgtggtttggcacccaagtcaggagctcttagcttctgccagctatgatgacacagtgaagctgtaccgggaggaagaggatgactgggtatgctgtgccacccttgagggccatgaatccactgtgtggagcttggcctttgacccgagtggccagcgcctggcgtcttgtagtgatgaccgtactgtgcgtatctggcgtcagtatctaccaggcaatgaacaaggggtggcatgcagcggctctgaccccagttggaaatgtatctgtactttgtccggcttccactcaaggaccatttatgacattgcttggtgtcagctgacaggggctctggccacagcttgtggggatgacgcgatccgcgtgtttcaggaggatcccaactcggatccacagcagcccaccttctccctgacagcccacttgcatcaggcccattcccaggatgtcaactgtgtggcctggaaccccaaggagccagggctactggcctcctgcagtgatgatggggaggtggccttctggaagtatcagcggcctgaaggcctctgagctacctcgactttggacagagtaatgactccccagaaaacgtcatataagactttaccagcccctgagaggaccaggaggagcatccttgaccttcatttaacttggctcacttctcttcagacttgggtagaagtgcagagccacagaattgctttccttccccgcctttgacatgaggccttcagtaaagagctacagaacatgagtacattgttataccacagatttttcttgcattagggcacagtgttaaattttttggaggtaaatatactatttataatcactatatatagtaggagggggtatgtgtctcaggcttttctgaagttgcaagacttaaagaaataatccatctgcatcccaagtcctattttataaggatattcataaaaattccatggtgaatccttgtctgaaataggtcctcccttcccagtttctgtgtaagtctttgcatttaagacatccaatcaataatgaaggaaatttttttctgaatgtaggtttgagtgaggggcacctctgctttcccttagcaaccctcatatacctccctgcaccgttacgctgtgatggcaactggggatagaaaaaaaatggggaaagacaggaatcctaaaagggagagttattactggccacaagccctgtattctcaacagggatgcaaattggttcttcagtaaggataaaaaaaatcacaagcagttgtttgtggccctcctaaggcccacagcacatatagtgtgtctgtgatattccattttcatggcaggagtgatcaggaagaaggcttcctaggggactggcgatttaaaccagttgagaaacactgccatcagcaggcagtttcagactcactcaagttgtctcttgacagtcacttctaaatgggttctatgtccttgatagaacaaatagcaatggttaactattaaatgttgacctagccagcgcagtggctcatgcctgtaatcccagcactttgggaggctgaggcgggcggatcacctgaggtcgggagttcgaggccagcctgaccaacatggagaaaccccgtctcttctaaaaatacaaaattagctgggcatggtggtgcatgcctgtaattccagctactcgggaggctgaggcaagagaatcgcttgaatccggtaggtggaggttgcagtgagccgagatcataccattgcactccagcccaggcaacaagagtgaaaccctgtctcaaaaagaaaaaaaaagttgaccttgagaatttataatattctgagaaaactggaagcatgcataaagcccctctgctgtgcactgaagtatgggtgccttgaggaaaagcagttacacagttgagttgcaagctgaattggctgtgttcaaggcatgccctttagaattgaaagaactagcagattacggtatttagacttgaatatttggctgatattttctggaaattaatggaatgagcctctcacctcaagggaaacaactgatagtgttgccagtgataaagctttcaagcaaaaatnggaatttccgaaaatctgtactccaccatgagctttatngtggggatattancaaatgtgattgtatnatgaaatgcatttcattggagaattcaatgaaccattttccagtgaccagtacgtgatgttacaaaatcatgcatggctcaaagattgattcaaaagtgtaagacaggccagtggatcttaatgtattaacaatataagagtgcattaagtcctcggagtctacattgcctttaagaaactatgacttgtagtaagccgggcgcggtggctcacgcctgtaatcccaacacttcgggaggccaaggtgggtggatcacaaggtcaggagtacaagaccagcctggccaatatggctgaaagtccgatctctactaccaattacaacacaattagccgggccgtggtcggcagatccctatgtagtcccagctactcggcgaggctgcaggcaggacgaatagccttgaacccggagacgtgcacggtcgccgggagacgcacatcgtgcccactggactccaggcatgggaagacagcaccgcagacaccaacccaaaaaaacaacaaacacac

SEQ ID NO: 437818 - DNA, 1336 bp, Homo sapiens
gaaaccattagctagtacgaggcctggtgtgcgcagacgcgcgcggtgagacccgctgtctgctcagcggactctgcccgcccccacctccccctgcgtcgggccgacatgaaggactcgctggtgctgctgggccgtgtcccggcgcacccggactcccgctgctggttcctggcctggaaccccgcggggaccctgctggcctcgtgcggcggcgaccggagaatccgcatctggggcacggagggtgacagctggatctgcaagtctgtcctttctgaaggccaccagcgcaccgtgcggaaggtagcctggtccccctgcggtaattacctggcctctgccagctttgatgctaccacttgcatttggaagaagaaccaggatgactttgagtgtgtaaccactctcgagggccatgaaaatgaggtcaagtcagtggcttgggccccatctggcaacctcctggccacttgcagccgagataagagcgtttgggtctgggaagttgatgaagaggatgagtatgaatgtgtcagtgttctcaactcccacacacaggatgtcaagcatgtggtttggcacccaagtcaggagctcttagcttctgccagctatgatgacacagtgaagctgtaccgggaggaagaggatgactgggtatgctgtgccacccttgagggccatgaatccactgtgtggagcttggcctttgacccgagtggccagcgcctggcgtcttgtagtgatgaccgtactgtgcgtatctggcgtcagtatctaccaggcaatgaacaaggggtggcatgcagcggctctgaccccagttggaaatgtatctgtactttgtccggcttccactcaaggaccatttatgacattgcttggtgtcagctgacaggggctctggccacagcttgtggggatgacgcgatccgcgtgtttcaggaggatcccaactcggatccacagcagcccaccttctccctgacagcccacttgcatcaggcccattcccaggatgtcaactgtgtggcctggaaccccaaggagccagggctactggcctcctgcagtgatgatggggaggtggccttctggaagtatcagcggcctgaaggcctctgagctacctcgactttggacagagtaatgactccccagaaaacgtcatataagactttaccagcccctgagaggaccaggaggagcatccttgaccttcatttaacttggctcacttctcttcagacttgggtagaagtgcagagccacagaattgctttccttccccgcctttgacatgaggccttcagtaaagagctacagaacatga

SEQ ID NO: 437819 - DNA, 2067 bp, Homo sapiens
cgcgatgctttccctgccgaggtgaggggagcgactacaactcccagagggtatggcggccgcagcagtgggcagttgagtttccggggcgacccaggtcctccggcggaagcgggagcctctgtcggccgcggaagcctggagtgggcggtacgcagacgcgcgcggtgagacccgctgtctgctcagcggactctgcccgcccccacctccccctgcgtcgggccgacatgaaggactcgctggtgctgctgggccgtgtcccggcgcacccggactcccgctgctggttcctggcctggaaccccgcggggaccctgctggcctcgtgcggcggcgaccggagaatccgcatctggggcacggagggtgacagctggatctgcaagtctgtcctttctgaaggccaccagcgcaccgtgcggaaggtagcctggtccccctgcggtaattacctggcctctgccagctttgatgctaccacttgcatttggaagaagaaccaggatgactttgagtgtgtaaccactctcgagggccatgaaaatgaggtcaagtcagtggcttgggccccatctggcaacctcctggccacttgcagccgagataagagcgtttgggtctgggaagttgatgaagaggatgagtatgaatgtgtcagtgttctcaactcccacacacaggatgtcaagcatgtggtttggcacccaagtcaggagctcttagcttctgccagctatgatgacacagtgaagctgtaccgggaggaagaggatgactgggtatgctgtgccacccttgagggccatgaatccactgtgtggagcttggcctttgacccgagtggccagcgcctggcgtcttgtagtgatgaccgtactgtgcgtatctggcgtcagtatctaccaggcaatgaacaaggtgaggtccattagtagagctaaagaagacccatctctcaaggggttcacagtctgctaagacacgtacatgagtcagagcaaatgggggtaaaaggtaagatgtgctacaagagggctctggatagagtgctggaagaatcaggaaagttttgtagaatgggttgtttcatctgaatttaaaagggtatgtaggattttaacatgagaatttcacgtgagaattcaagtgaaaactcaacagtgtgagtaaagataacaatggcgggaatgcttagactgaggggtggtaatgcatttaaatggggcataggacgtctggggtttggagaggaataaagtgggttgggtcggctggtgggtggccttcacaggcacgcaaagtagttacatacagtctgcaacagaacagggatgtttcctcggaattctgcttgagaaacgccagtctggctatagtgtgtaaggcagataagcagggatggggacacgaacggagacacagactcataatcagttgaagatgagggtgagggaaggtaagttaggttctcctttgaggtgcccaggacataggaacgtttaagggcaagagaagtctgtcttgcaggggtggcatgcagcggctctgaccccagttggaaatgtatctgtactttgtccggcttccactcaaggaccatttatgacattgcttggtgtcagctgacaggggctctggccacagcttgtggggatgacgcgatccgcgtgtttcaggaggatcccaactcggatccacagcagcccaccttctccctgacagcccacttgcatcaggcccattcccaggatgtcaactgtgtggcctggaaccccaaggagccagggctactggcctcctgcagtgatgatggggaggtggccttctggaagtatcagcggcctgaaggcctctgagctacctcgactttggacagagtaatgactccccagaaaacgtcatataagactttaccagcccctgagaggaccaggaggagcatccttgaccttcatttaacttggctcacttctcttcagacttgggtagaagtgcagagccacagaattgctttccttccccgcctttgacatgaggccttcagtaaagagctacagaacatga

SEQ ID NO: 437820 - DNA, 3565 bp, Homo sapiens
  misc_feature (2983)..(2983): n is a, c, g, or t
  misc_feature (3022)..(3022): n is a, c, g, or t
  misc_feature (3035)..(3035): n is a, c, g, or t
  misc_feature (3051)..(3051): n is a, c, g, or t
cgcgatgctttccctgccgaggtgaggggagcgactacaactcccagagggtatggcggccgcagcagtgggcagttgagtttccggggcgacccaggtcctccggcggaagcgggagcctctgtcggccgcggaagcctggagtgggcggtacgcagacgcgcgcggtgagacccgctgtctgctcagcggactctgcccgcccccacctccccctgcgtcgggccgacatgaaggactcgctggtgctgctgggccgctggttcctggcctggaaccccgcggggaccctgctggcctcgtgcggcggcgaccggagaatccgcatctggggcacggagggtgacagctggatctgcaagtctgtcctttctgaaggccaccagcgcaccgtgcggaaggtagcctggtccccctgcggtaattacctggcctctgccagctttgatgctaccacttgcatttggaagaagaaccaggatgactttgagtgtgtaaccactctcgagggccatgaaaatgaggtcaagtcagtggcttgggccccatctggcaacctcctggccacttgcagccgagataagagcgtttgggtctgggaagttgatgaagaggatgagtatgaatgtgtcagtgttctcaactcccacacacaggatgtcaagcatgtggtttggcacccaagtcaggagctcttagcttctgccagctatgatgacacagtgaagctgtaccgggaggaagaggatgactgggtatgctgtgccacccttgagggccatgaatccactgtgtggagcttggcctttgacccgagtggccagcgcctggcgtcttgtagtgatgaccgtactgtgcgtatctggcgtcagtatctaccaggcaatgaacaaggggtggcatgcagcggctctgaccccagttggaaatgtatctgtactttgtccggcttccactcaaggaccatttatgacattgcttggtgtcagctgacaggggctctggccacagcttgtggggatgacgcgatccgcgtgtttcaggaggatcccaactcggatccacagcagcccaccttctccctgacagcccacttgcatcaggcccattcccaggatgtcaactgtgtggcctggaaccccaaggagccagggctactggcctcctgcagtgatgatggggaggtggccttctggaagtatcagcggcctgaaggcctctgagctacctcgactttggacagagtaatgactccccagaaaacgtcatataagactttaccagcccctgagaggaccaggaggagcatccttgaccttcatttaacttggctcacttctcttcagacttgggtagaagtgcagagccacagaattgctttccttccccgcctttgacatgaggccttcagtaaagagctacagaacatgagtacattgttataccacagatttttcttgcattagggcacagtgttaaattttttggaggtaaatatactatttataatcactatatatagtaggagggggtatgtgtctcaggcttttctgaagttgcaagacttaaagaaataatccatctgcatcccaagtcctattttataaggatattcataaaaattccatggtgaatccttgtctgaaataggtcctcccttcccagtttctgtgtaagtctttgcatttaagacatccaatcaataatgaaggaaatttttttctgaatgtaggtttgagtgaggggcacctctgctttcccttagcaaccctcatatacctccctgcaccgttacgctgtgatggcaactggggatagaaaaaaaatggggaaagacaggaatcctaaaagggagagttattactggccacaagccctgtattctcaacagggatgcaaattggttcttcagtaaggataaaaaaaatcacaagcagttgtttgtggccctcctaaggcccacagcacatatagtgtgtctgtgatattccattttcatggcaggagtgatcaggaagaaggcttcctaggggactggcgatttaaaccagttgagaaacactgccatcagcaggcagtttcagactcactcaagttgtctcttgacagtcacttctaaatgggttctaatgtgacaatggcctccaaaactacagccttccctgaagtttaagctgtgaccttagattttagaaggacagtggggctgtacctagaatagtggttctcgaagaatgcggcctgcagatcctgggagtcccaagaccctttcagggaggatctgtgaggtcaactgttggcactgtggcatgaatcaaggtggtggcagcaaacttctagtagttttgatatgtccttgatagaacaaatagcaatggttaactattaaatgttgacctagccagcgcagtggctcatgcctgtaatcccagcactttgggaggctgaggcgggcggatcacctgaggtcgggagttcgaggccagcctgaccaacatggagaaaccccgtctcttctaaaaatacaaaattagctgggcatggtggtgcatgcctgtaattccagctactcgggaggctgaggcaagagaatcgcttgaatccggtaggtggaggttgcagtgagccgagatcataccattgcactccagcccaggcaacaagagtgaaaccctgtctcaaaaagaaaaaaaaagttgaccttgagaatttataatattctgagaaaactggaagcatgcataaagcccctctgctgtgcactgaagtatgggtgccttgaggaaaagcagttacacagttgagttgcaagctgaattggctgtgttcaaggcatgccctttagaattgaaagaactagcagattacggtatttagacttgaatatttggctgatattttctggaaattaatggaatgagcctctcacctcaagggaaacaactgatagtgttgccagtgataaagctttcaagcaaaaatnggaatttccgaaaatctgtactccaccatgagctttatngtggggatattancaaatgtgattgtatnatgaaatgcatttcattggagaattcaatgaaccattttccagtgaccagtacgtgatgttacaaaatcatgcatggctcaaagattgattcaaaagtgtaagacaggccagtggatcttaatgtattaacaatataagagtgcattaagtcctcggagtctacattgcctttaagaaactatgacttgtagtaagccgggcgcggtggctcacgcctgtaatcccaacacttcgggaggccaaggtgggtggatcacaaggtcaggagtacaagaccagcctggccaatatggctgaaagtccgatctctactaccaattacaacacaattagccgggccgtggtcggcagatccctatgtagtcccagctactcggcgaggctgcaggcaggacgaatagccttgaacccggagacgtgcacggtcgccgggagacgcacatcgtgcccactggactccaggcatgggaagacagcaccgcagacaccaacccaaaaaaacaacaaacacac

SEQ ID NO: 437821 - DNA, 1110 bp, Homo sapiens
cgcgatgctttccctgccgaggtgaggggagcgactacaactcccagagggtatggcggccgcagcagtgggcagttgagtttccggggcgacccaggtcctccggcggaagcgggagcctctgtcggccgcggaagcctggagtgggcggtacgcagacgcgcgcggtgagacccgctgtctgctcagcggactctgcccgcccccacctccccctgcgtcgggccgacatgaaggactcgctggtgctgctgggccgtgtcccggcgcacccggactcccgctgctggttcctggcctggaaccccgcggggaccctgctggcctcgtgcggcggcgaccggagaatccgcatctggggcacggagggtgacagctggatctgcaagtctgtcctttctgaaggccaccagcgcaccgtgcggaaggtagcctggtccccctgcggtaattacctggcctctgccagctttgatgctaccacttgcatttggaagaagaaccaggatgactttgagtgtgtaaccactctcgagggccatgaaaatgaggtcaagtcagtggcttgggccccatctggcaacctcctggccacttgcagccgagataagagcgtttgggtctgggaagttgatgaagaggatgagtatgaatgtgtcagtgttctcaactcccacacacaggatgtcaagcatgtggtttggcacccaagtcaggagctcttagcttctgccagctatgatgacacagtgaagctgtaccgggaggaagaggatgactgggtatgctgtgccacccttgagggccatgaatccactgtgtggagcttggcctttgacccgagtggccagcgcctggcgtcttgtagtgatgaccgtactgtgcgtatctggcgtcagtatctaccaggcaatgaacaaggggtggcatgcagcggctctgaccccagttggaaatgtatctgtactttgtccggcttccactcaaggaccatttatgacattgcttggtgtcagctgacaggggctctggccacagcttgtggggatggcttcttttgctgggcctccttgagtttttcctctgccgccacctaagttcagagccagg

SEQ ID NO: 437822 - DNA, 1373 bp, Homo sapiens
cgcgatgctttccctgccgaggtgaggggagcgactacaactcccagagggtatggcggccgcagcagtgggcagttgagtttccggggcgacccaggtcctccggcggaagcgggagcctctgtcggccgcggaagcctggagtgggcggtacgcagacgcgcgcggtgagacccgctgtctgctcagcggactctgcccgcccccacctccccctgcgtcgggccgacatgaaggactcgctggtgctgctgggccgtgtcccggcgcacccggactcccgctgctggttcctggcctggaaccccgcggggaccctgctggcctcgtgcggcggcgaccggagaatccgcatctggggcacggagggtgacagctggatctgcaagtctgtcctttctgaaggccaccagcgcaccgtgcggaaggtagcctggtccccctgcggtaattacctggcctctgccagctttgatgctaccacttgcatttggaagaagaaccaggatgactttgagtgtgtaaccactctcgagggccatgaaaatgaggtcaagtcagtggcttgggccccatctggcaacctcctggccacttgcagccgagataagagcgtttgggtctgggaagttgatgaagaggatgagtatgaatgtgtcagtgttctcaactcccacacacaggatgtcaagcatgtggtttggcacccaagtcaggagctcttagcttctgccagctatgatgacacagtgaagctgtaccgggaggaagaggatgactgggtatgctgtgccacccttgagggccatgaatccactgtgtggagcttggcctttgacccgagtggccagcgcctggcgtcttgtagtgatgaccgtactgtgcgtatctggcgtcagtatctaccaggcaatgaacaaggggtggcatgcagcggctctgaccccagttggaaatgtatctgtactttgtccggcttccactcaaggaccatttatgacattgcttggtaagactccatccccccaccccatcccatccccataaatcagggattttagagaaggcataccctatgcagtcctctgcaaccctgggggagtgcttgggaattgagggcagccacccccattccttatcaggcctgactctaccatgctggtttacagctggctgggctggcattcacaggagcagagaacagtcccaggctgtgagggtagcaccagcgctagaggttcgcacagctcgtgctgtccagaagttattattgaatctgcattcgtggctgagggtttttttttgtttttttgttttttgagacagagtctcactctgcagcccaggctggagtgcggtggcgtgatctcatc

SEQ ID NO: 437823 - DNA, 1389 bp, Homo sapiens
cgcgatgctttccctgccgaggtgaggggagcgactacaactcccagagggtatggcggccgcagcagtgggcagttgagtttccggggcgacccaggtcctccggcggaagcgggagcctctgtcggccgcggaagcctggagtgggcggtacgcagacgcgcgcggtgagacccgctgtctgctcagcggactctgcccgcccccacctccccctgcgtcgggccgacatgaaggactcgctggtgctgctgggccgtgtcccggcgcacccggactcccgctgctggttcctggcctggaaccccgcggggaccctgctggcctcgtgcggcggcgaccggagaatccgcatctggggcacggagggtgacagctggatctgcaagtctgtcctttctgaaggccaccagcgcaccgtgcggaaggtagcctggtccccctgcggtaattacctggcctctgccagctttgatgctaccacttgcatttggaagaagaaccaggatgactttgagtgtgtaaccactctcgagggccatgaaaatgaggtcaagtcagtggcttgggccccatctggcaacctcctggccacttgcagccgagataagagcgtttgggtctgggaagttgatgaagaggatgagtatgaatgtgtcagtgttctcaactcccacacacaggatgtcaagcatgtggtttggcacccaagtcaggagctcttagcttctgccagctatgatgacacagtgaagctgtaccgggaggaagaggatgactgggtatgctgtgccacccttgagggccatgaatccactgtgtggagcttggcctttgacccgagtggccagcgcctggcgtcttgtagtgatgaccgtactgtgcgtatctggcgtcagtatctaccaggcaatgaacaaggtgaggtccattagtagagctaaagaagacccatctctcaaggggttcacagtctgctaagacacgtacatgagtcagagcaaatgggggtaaaaggtaagatgtgctacaagagggctctggatagagtgctggaagaatcaggaaagttttgtagaatgggttgtttcatctgaatttaaaagggtatgtaggattttaacatgagaatttcacgtgagaattcaagtgaaaactcaacagaggagccattttgagcaatggggaacgctcacggactgtgtggtaatgagagatccaaacaccaagcgctccaggggctttgggtttgtcacatatgccactgtggaggaggtggatgcagctatgaatgcaggccacacaaggtggatggaagagttgtggaaccaaagagagctgtctccgagaagattcacaaagaccagtcccactaacttgaaaaaatgg

SEQ ID NO: 437824 - DNA, 2903 bp, Homo sapiens
  misc_feature (2321)..(2321): n is a, c, g, or t
  misc_feature (2360)..(2360): n is a, c, g, or t
  misc_feature (2373)..(2373): n is a, c, g, or t
  misc_feature (2389)..(2389): n is a, c, g, or t
cacagcaagactccatctcaaaaaaaaaaaaaaaaaaacaactttatgacatgggaaactgcttatgccaagtgaggaaagtgcagttcataattgcatgtcgttttttaggataatcatagtaggggaaagaactagattgcagcatctgaagatataagtgggtgatatttgtgactccttattagttaaggaaacattttaataagaggtttttagctgaggcctgaagttagggaagagaacaggccaggaactatggaacaggtctctctggcctaattagtcaggtatacccactgatgtcactttccttccaggtgtcagctgacaggggctctggccacagcttgtggggatgacgcgatccgcgtgtttcaggaggatcccaactcggatccacagcagcccaccttctccctgacagcccacttgcatcaggcccattcccaggatgtcaactgtgtggcctggaaccccaaggagccagggctactggcctcctgcagtgatgatggggaggtggccttctggaagtatcagcggcctgaaggcctctgagctacctcgactttggacagagtaatgactccccagaaaacgtcatataagactttaccagcccctgagaggaccaggaggagcatccttgaccttcatttaacttggctcacttctcttcagacttgggtagaagtgcagagccacagaattgctttccttccccgcctttgacatgaggccttcagtaaagagctacagaacatgagtacattgttataccacagatttttcttgcattagggcacagtgttaaattttttggaggtaaatatactatttataatcactatatatagtaggagggggtatgtgtctcaggcttttctgaagttgcaagacttaaagaaataatccatctgcatcccaagtcctattttataaggatattcataaaaattccatggtgaatccttgtctgaaataggtcctcccttcccagtttctgtgtaagtctttgcatttaagacatccaatcaataatgaaggaaatttttttctgaatgtaggtttgagtgaggggcacctctgctttcccttagcaaccctcatatacctccctgcaccgttacgctgtgatggcaactggggatagaaaaaaaatggggaaagacaggaatcctaaaagggagagttattactggccacaagccctgtattctcaacagggatgcaaattggttcttcagtaaggataaaaaaaatcacaagcagttgtttgtggccctcctaaggcccacagcacatatagtgtgtctgtgatattccattttcatggcaggagtgatcaggaagaaggcttcctaggggactggcgatttaaaccagttgagaaacactgccatcagcaggcagtttcagactcactcaagttgtctcttgacagtcacttctaaatgggttctaatgtgacaatggcctccaaaactacagccttccctgaagtttaagctgtgaccttagattttagaaggacagtggggctgtacctagaatagtggttctcgaagaatgcggcctgcagatcctgggagtcccaagaccctttcagggaggatctgtgaggtcaactgttggcactgtggcatgaatcaaggtggtggcagcaaacttctagtagttttgatatgtccttgatagaacaaatagcaatggttaactattaaatgttgacctagccagcgcagtggctcatgcctgtaatcccagcactttgggaggctgaggcgggcggatcacctgaggtcgggagttcgaggccagcctgaccaacatggagaaaccccgtctcttctaaaaatacaaaattagctgggcatggtggtgcatgcctgtaattccagctactcgggaggctgaggcaagagaatcgcttgaatccggtaggtggaggttgcagtgagccgagatcataccattgcactccagcccaggcaacaagagtgaaaccctgtctcaaaaagaaaaaaaaagttgaccttgagaatttataatattctgagaaaactggaagcatgcataaagcccctctgctgtgcactgaagtatgggtgccttgaggaaaagcagttacacagttgagttgcaagctgaattggctgtgttcaaggcatgccctttagaattgaaagaactagcagattacggtatttagacttgaatatttggctgatattttctggaaattaatggaatgagcctctcacctcaagggaaacaactgatagtgttgccagtgataaagctttcaagcaaaaatnggaatttccgaaaatctgtactccaccatgagctttatngtggggatattancaaatgtgattgtatnatgaaatgcatttcattggagaattcaatgaaccattttccagtgaccagtacgtgatgttacaaaatcatgcatggctcaaagattgattcaaaagtgtaagacaggccagtggatcttaatgtattaacaatataagagtgcattaagtcctcggagtctacattgcctttaagaaactatgacttgtagtaagccgggcgcggtggctcacgcctgtaatcccaacacttcgggaggccaaggtgggtggatcacaaggtcaggagtacaagaccagcctggccaatatggctgaaagtccgatctctactaccaattacaacacaattagccgggccgtggtcggcagatccctatgtagtcccagctactcggcgaggctgcaggcaggacgaatagccttgaacccggagacgtgcacggtcgccgggagacgcacatcgtgcccactggactccaggcatgggaagacagcaccgcagacaccaacccaaaaaaacaacaaacacac

SEQ ID NO: 437825 - DNA, 2712 bp, Homo sapiens
  misc_feature (2130)..(2130): n is a, c, g, or t
  misc_feature (2169)..(2169): n is a, c, g, or t
  misc_feature (2182)..(2182): n is a, c, g, or t
  misc_feature (2198)..(2198): n is a, c, g, or t
cgcgatgctttccctgccgaggtgaggggagcgactacaactcccagagggtatggcggccgcagcagtgggcagttgagtttccggggcgacccaggtcctccggcggaagcgggagcctctgtcggccgcggaagcctggagtgggcggtacgcagacgcgcgcggtgagacccgctgtctgctcagcggactctgcccgcccccacctccccctgcgtcgggccgacatgaaggactcgctggtgctgctgggccgtgtcccggcgcacccggactcccgctgctggttcctggcctggaaccccgcggggaccctgctggcctcgtgcggcggcgaccggagaatccgcatctggggcacggagggtgacagctggatctgcaagtctgtcctttctgaaggccaccagcgcaccgtgcggaaggtagcctggtccccctgcggtaattacctggcctctgccagctttgatgctaccattctcttcagacttgggtagaagtgcagagccacagaattgctttccttccccgcctttgacatgaggccttcagtaaagagctacagaacatgagtacattgttataccacagatttttcttgcattagggcacagtgttaaattttttggaggtaaatatactatttataatcactatatatagtaggagggggtatgtgtctcaggcttttctgaagttgcaagacttaaagaaataatccatctgcatcccaagtcctattttataaggatattcataaaaattccatggtgaatccttgtctgaaataggtcctcccttcccagtttctgtgtaagtctttgcatttaagacatccaatcaataatgaaggaaatttttttctgaatgtaggtttgagtgaggggcacctctgctttcccttagcaaccctcatatacctccctgcaccgttacgctgtgatggcaactggggatagaaaaaaaatggggaaagacaggaatcctaaaagggagagttattactggccacaagccctgtattctcaacagggatgcaaattggttcttcagtaaggataaaaaaaatcacaagcagttgtttgtggccctcctaaggcccacagcacatatagtgtgtctgtgatattccattttcatggcaggagtgatcaggaagaaggcttcctaggggactggcgatttaaaccagttgagaaacactgccatcagcaggcagtttcagactcactcaagttgtctcttgacagtcacttctaaatgggttctaatgtgacaatggcctccaaaactacagccttccctgaagtttaagctgtgaccttagattttagaaggacagtggggctgtacctagaatagtggttctcgaagaatgcggcctgcagatcctgggagtcccaagaccctttcagggaggatctgtgaggtcaactgttggcactgtggcatgaatcaaggtggtggcagcaaacttctagtagttttgatatgtccttgatagaacaaatagcaatggttaactattaaatgttgacctagccagcgcagtggctcatgcctgtaatcccagcactttgggaggctgaggcgggcggatcacctgaggtcgggagttcgaggccagcctgaccaacatggagaaaccccgtctcttctaaaaatacaaaattagctgggcatggtggtgcatgcctgtaattccagctactcgggaggctgaggcaagagaatcgcttgaatccggtaggtggaggttgcagtgagccgagatcataccattgcactccagcccaggcaacaagagtgaaaccctgtctcaaaaagaaaaaaaaagttgaccttgagaatttataatattctgagaaaactggaagcatgcataaagcccctctgctgtgcactgaagtatgggtgccttgaggaaaagcagttacacagttgagttgcaagctgaattggctgtgttcaaggcatgccctttagaattgaaagaactagcagattacggtatttagacttgaatatttggctgatattttctggaaattaatggaatgagcctctcacctcaagggaaacaactgatagtgttgccagtgataaagctttcaagcaaaaatnggaatttccgaaaatctgtactccaccatgagctttatngtggggatattancaaatgtgattgtatnatgaaatgcatttcattggagaattcaatgaaccattttccagtgaccagtacgtgatgttacaaaatcatgcatggctcaaagattgattcaaaagtgtaagacaggccagtggatcttaatgtattaacaatataagagtgcattaagtcctcggagtctacattgcctttaagaaactatgacttgtagtaagccgggcgcggtggctcacgcctgtaatcccaacacttcgggaggccaaggtgggtggatcacaaggtcaggagtacaagaccagcctggccaatatggctgaaagtccgatctctactaccaattacaacacaattagccgggccgtggtcggcagatccctatgtagtcccagctactcggcgaggctgcaggcaggacgaatagccttgaacccggagacgtgcacggtcgccgggagacgcacatcgtgcccactggactccaggcatgggaagacagcaccgcagacaccaacccaaaaaaacaacaaacacac

SEQ ID NO: 437826 - DNA, 2469 bp, Homo sapiens
  misc_feature (1887)..(1887): n is a, c, g, or t
  misc_feature (1926)..(1926): n is a, c, g, or t
  misc_feature (1939)..(1939): n is a, c, g, or t
  misc_feature (1955)..(1955): n is a, c, g, or t
cgcgatgctttccctgccgaggtgaggggagcgactacaactcccagagggtatggcggccgcagcagtgggcagttgagtttccggggcgacccaggtcctccggcggaagcgggagcctctgtcggccgcggaagcctggagtgggcggtacgcagacgcgcgcggtgagacccgctgtctgctcagcggactctgcccgcccccacctccccctgcgtcgggccgacatgaaggactcgctggtgctgctgggccgtgtcccggcgcacccggactcccgctgctggttcctggcctggaaccccgcggggaccctgctggcctcgtgcggcggcgaccggagaatccgcatctggggcacggagggtgacagctggatctgcaagtctgtcctttctgaaggccaccagcgcaccgtgcggaaggtagcctggtccccctgcggtaattacctggcctctgccagctttgatgctaccacttgcatttggaagaagaaccaggatgactttgagtgtgtaaccactctcgagggccatgaaaatgaggtcaagtcagtggcttgggccccatctggcaacctcctggccacttgcagccgagataagagcgtttgggtctgggaaggtgaggccaggtccctccaggtggattgggaaccacctgacagccccctctgtctccctgcaccgttacgctgtgatggcaactggggatagaaaaaaaatggggaaagacaggaatcctaaaagggagagttattactggccacaagccctgtattctcaacagggatgcaaattggttcttcagtaaggataaaaaaaatcacaagcagttgtttgtggccctcctaaggcccacagcacatatagtgtgtctgtgatattccattttcatggcaggagtgatcaggaagaaggcttcctaggggactggcgatttaaaccagttgagaaacactgccatcagcaggcagtttcagactcactcaagttgtctcttgacagtcacttctaaatgggttctaatgtgacaatggcctccaaaactacagccttccctgaagtttaagctgtgaccttagattttagaaggacagtggggctgtacctagaatagtggttctcgaagaatgcggcctgcagatcctgggagtcccaagaccctttcagggaggatctgtgaggtcaactgttggcactgtggcatgaatcaaggtggtggcagcaaacttctagtagttttgatatgtccttgatagaacaaatagcaatggttaactattaaatgttgacctagccagcgcagtggctcatgcctgtaatcccagcactttgggaggctgaggcgggcggatcacctgaggtcgggagttcgaggccagcctgaccaacatggagaaaccccgtctcttctaaaaatacaaaattagctgggcatggtggtgcatgcctgtaattccagctactcgggaggctgaggcaagagaatcgcttgaatccggtaggtggaggttgcagtgagccgagatcataccattgcactccagcccaggcaacaagagtgaaaccctgtctcaaaaagaaaaaaaaagttgaccttgagaatttataatattctgagaaaactggaagcatgcataaagcccctctgctgtgcactgaagtatgggtgccttgaggaaaagcagttacacagttgagttgcaagctgaattggctgtgttcaaggcatgccctttagaattgaaagaactagcagattacggtatttagacttgaatatttggctgatattttctggaaattaatggaatgagcctctcacctcaagggaaacaactgatagtgttgccagtgataaagctttcaagcaaaaatnggaatttccgaaaatctgtactccaccatgagctttatngtggggatattancaaatgtgattgtatnatgaaatgcatttcattggagaattcaatgaaccattttccagtgaccagtacgtgatgttacaaaatcatgcatggctcaaagattgattcaaaagtgtaagacaggccagtggatcttaatgtattaacaatataagagtgcattaagtcctcggagtctacattgcctttaagaaactatgacttgtagtaagccgggcgcggtggctcacgcctgtaatcccaacacttcgggaggccaaggtgggtggatcacaaggtcaggagtacaagaccagcctggccaatatggctgaaagtccgatctctactaccaattacaacacaattagccgggccgtggtcggcagatccctatgtagtcccagctactcggcgaggctgcaggcaggacgaatagccttgaacccggagacgtgcacggtcgccgggagacgcacatcgtgcccactggactccaggcatgggaagacagcaccgcagacaccaacccaaaaaaacaacaaacacac

SEQ ID NO: 437827 - DNA, 1346 bp, Homo sapiens
  misc_feature (764)..(764): n is a, c, g, or t
  misc_feature (803)..(803): n is a, c, g, or t
  misc_feature (816)..(816): n is a, c, g, or t
  misc_feature (832)..(832): n is a, c, g, or t
aaaacttttccaactgcgtatctgtgtgaagtcaacttacttcaacaaaaaagtttggatgtagaagcagctgtaagaattcaactgtttattataacaagatactaaagagactgtaaaatgccacccttctccttggattgttttggaagttattcttcataaaaaatgttaacgtgggctgggcatggtggctcatgcctgtaatcccagcactttgggaggctgaggcgggcggatcacctgaggtcgggagttcgaggccagcctgaccaacatggagaaaccccgtctcttctaaaaatacaaaattagctgggcatggtggtgcatgcctgtaattccagctactcgggaggctgaggcaagagaatcgcttgaatccggtaggtggaggttgcagtgagccgagatcataccattgcactccagcccaggcaacaagagtgaaaccctgtctcaaaaagaaaaaaaaagttgaccttgagaatttataatattctgagaaaactggaagcatgcataaagcccctctgctgtgcactgaagtatgggtgccttgaggaaaagcagttacacagttgagttgcaagctgaattggctgtgttcaaggcatgccctttagaattgaaagaactagcagattacggtatttagacttgaatatttggctgatattttctggaaattaatggaatgagcctctcacctcaagggaaacaactgatagtgttgccagtgataaagctttcaagcaaaaatnggaatttccgaaaatctgtactccaccatgagctttatngtggggatattancaaatgtgattgtatnatgaaatgcatttcattggagaattcaatgaaccattttccagtgaccagtacgtgatgttacaaaatcatgcatggctcaaagattgattcaaaagtgtaagacaggccagtggatcttaatgtattaacaatataagagtgcattaagtcctcggagtctacattgcctttaagaaactatgacttgtagtaagccgggcgcggtggctcacgcctgtaatcccaacacttcgggaggccaaggtgggtggatcacaaggtcaggagtacaagaccagcctggccaatatggctgaaagtccgatctctactaccaattacaacacaattagccgggccgtggtcggcagatccctatgtagtcccagctactcggcgaggctgcaggcaggacgaatagccttgaacccggagacgtgcacggtcgccgggagacgcacatcgtgcccactggactccaggcatgggaagacagcaccgcagacaccaacccaaaaaaacaacaaacacac

SEQ ID NO: 437828 - DNA, 335 bp, Homo sapiens
aatgaggtcaagtcagtggcttgggccccatctggcaacctcctggccacttgcagccgagataagagcgtttgggtctgggaaggtgaggccaggtccctccaggtggattgggaaccacctgacagccccctctgtgtccctgacagggtcggctcttgggtcccctttttctctcccacagttgatgaagaggatgagtatgaatgtgtcagtgttctcaactcccacacacaggatgtcaagcatgtggtttggcacccaagtcaggaggtaagagtcaagcagggactcttgtgggaagggctctggtgtgcaggcttgtgcccagcctt

SEQ ID NO: 437829 - DNA, 3592 bp, Homo sapiens
  misc_feature (3010)..(3010): n is a, c, g, or t
  misc_feature (3049)..(3049): n is a, c, g, or t
  misc_feature (3062)..(3062): n is a, c, g, or t
  misc_feature (3078)..(3078): n is a, c, g, or t
cgcgatgctttccctgccgaggtgaggggagcgactacaactcccagagggtatggcggccgcagcagtgggcagttgagtttccggggcgacccaggtcctccggcggaagcgggagcctctgtcggccgcggaagcctggagtgggcggtacgcagacgcgcgcggtgagacccgctgtctgctcagcggactctgcccgcccccacctccccctgcgtcgggccgacatgaaggactcgctggtgctgctgggccgtgtcccggcgcacccggactcccgctgctggttcctggcctggaaccccgcggggaccctgctggcctcgtgcggcggcgaccggagaatccgcatctggggcacggagggtgacagctggatctgcaagtctgtcctttctgaaggccaccagcgcaccgtgcggaaggtagcctggtccccctgcggtaattacctggcctctgccagctttgatgctaccacttgcatttggaagaagaaccaggatgactttgagtgtgtaaccactctcgagggccatgaaaatgaggtcaagtcagtggcttgggccccatctggcaacctcctggccacttgcagccgagataagagcgtttgggtctgggaagttgatgaagaggatgagtatgaatgtgtcagtgttctcaactcccacacacaggatgtcaagcatgtggtttggcacccaagtcaggagctcttagcttctgccagctatgatgacacagtgaagctgtaccgggaggaagaggatgactgggtatgctgtgccacccttgagggccatgaatccactgtgtggagcttggcctttgacccgagtggccagcgcctggcgtcttgtagtgatgaccgtactgtgcgtatctggcgtcagtatctaccaggcaatgaacaaggggtggcatgcagcggctctgaccccagttggaaatgtatctgtactttgtccggcttccactcaaggaccatttatgacattgcttggtgtcagctgacaggggctctggccacagcttgtggggatgacgcgatccgcgtgtttcaggaggatcccaactcggatccacagcagcccaccttctccctgacagcccacttgcatcaggcccattcccaggatgtcaactgtgtggcctggaaccccaaggagccagggctactggcctcctgcagtgatgatggggaggtggccttctggaagtatcagcggcctgaaggcctctgagctacctcgactttggacagagtaatgactccccagaaaacgtcatataagactttaccagcccctgagaggaccaggaggagcatccttgaccttcatttaacttggctcacttctcttcagacttgggtagaagtgcagagccacagaattgctttccttccccgcctttgacatgaggccttcagtaaagagctacagaacatgagtacattgttataccacagatttttcttgcattagggcacagtgttaaattttttggaggtaaatatactatttataatcactatatatagtaggagggggtatgtgtctcaggcttttctgaagttgcaagacttaaagaaataatccatctgcatcccaagtcctattttataaggatattcataaaaattccatggtgaatccttgtctgaaataggtcctcccttcccagtttctgtgtaagtctttgcatttaagacatccaatcaataatgaaggaaatttttttctgaatgtaggtttgagtgaggggcacctctgctttcccttagcaaccctcatatacctccctgcaccgttacgctgtgatggcaactggggatagaaaaaaaatggggaaagacaggaatcctaaaagggagagttattactggccacaagccctgtattctcaacagggatgcaaattggttcttcagtaaggataaaaaaaatcacaagcagttgtttgtggccctcctaaggcccacagcacatatagtgtgtctgtgatattccattttcatggcaggagtgatcaggaagaaggcttcctaggggactggcgatttaaaccagttgagaaacactgccatcagcaggcagtttcagactcactcaagttgtctcttgacagtcacttctaaatgggttctaatgtgacaatggcctccaaaactacagccttccctgaagtttaagctgtgaccttagattttagaaggacagtggggctgtacctagaatagtggttctcgaagaatgcggcctgcagatcctgggagtcccaagaccctttcagggaggatctgtgaggtcaactgttggcactgtggcatgaatcaaggtggtggcagcaaacttctagtagttttgatatgtccttgatagaacaaatagcaatggttaactattaaatgttgacctagccagcgcagtggctcatgcctgtaatcccagcactttgggaggctgaggcgggcggatcacctgaggtcgggagttcgaggccagcctgaccaacatggagaaaccccgtctcttctaaaaatacaaaattagctgggcatggtggtgcatgcctgtaattccagctactcgggaggctgaggcaagagaatcgcttgaatccggtaggtggaggttgcagtgagccgagatcataccattgcactccagcccaggcaacaagagtgaaaccctgtctcaaaaagaaaaaaaaagttgaccttgagaatttataatattctgagaaaactggaagcatgcataaagcccctctgctgtgcactgaagtatgggtgccttgaggaaaagcagttacacagttgagttgcaagctgaattggctgtgttcaaggcatgccctttagaattgaaagaactagcagattacggtatttagacttgaatatttggctgatattttctggaaattaatggaatgagcctctcacctcaagggaaacaactgatagtgttgccagtgataaagctttcaagcaaaaatnggaatttccgaaaatctgtactccaccatgagctttatngtggggatattancaaatgtgattgtatnatgaaatgcatttcattggagaattcaatgaaccattttccagtgaccagtacgtgatgttacaaaatcatgcatggctcaaagattgattcaaaagtgtaagacaggccagtggatcttaatgtattaacaatataagagtgcattaagtcctcggagtctacattgcctttaagaaactatgacttgtagtaagccgggcgcggtggctcacgcctgtaatcccaacacttcgggaggccaaggtgggtggatcacaaggtcaggagtacaagaccagcctggccaatatggctgaaagtccgatctctactaccaattacaacacaattagccgggccgtggtcggcagatccctatgtagtcccagctactcggcgaggctgcaggcaggacgaatagccttgaacccggagacgtgcacggtcgccgggagacgcacatcgtgcccactggactccaggcatgggaagacagcaccgcagacaccaacccaaaaaaacaacaaacacac

SEQ ID NO: 437830 - DNA, 4201 bp, Homo sapiens
  misc_feature (3619)..(3619): n is a, c, g, or t
  misc_feature (3658)..(3658): n is a, c, g, or t
  misc_feature (3671)..(3671): n is a, c, g, or t
  misc_feature (3687)..(3687): n is a, c, g, or t
cgcgatgctttccctgccgaggtgaggggagcgactacaactcccagagggtatggcggccgcagcagtgggcagttgagtttccggggcgacccaggtcctccggcggaagcgggagcctctgtcggccgcggaagcctggagtgggcggtacgcagacgcgcgcggtgagacccgctgtctgctcagcggactctgcccgcccccacctccccctgcgtcgggccgacatgaaggactcgctggtgctgctgggccgtgtcccggcgcacccggactcccgctgctggttcctggcctggaaccccgcggggaccctgctggcctcgtgcggcggcgaccggagaatccgcatctggggcacggagggtgacagctggatctgcaagtctgtcctttctgaaggccaccagcgcaccgtgcggaaggtagcctggtccccctgcggtaattacctggcctctgccagctttgatgctaccacttgcatttggaagaagaaccaggatgactttgagtgtgtaaccactctcgagggccatgaaaatgaggtcaagtcagtggcttgggccccatctggcaacctcctggccacttgcagccgagataagagcgtttgggtctgggaagttgatgaagaggatgagtatgaatgtgtcagtgttctcaactcccacacacaggatgtcaagcatgtggtttggcacccaagtcaggagctcttagcttctgccagctatgatgacacagtgaagctgtaccgggaggaagaggatgactgggtatgctgtgccacccttgagggccatgaatccactgtgtggagcttggcctttgacccgagtggccagcgcctggcgtcttgtagtgatgaccgtactgtgcgtatctggcgtcagtatctaccaggcaatgaacaaggtgaggtccattagtagagctaaagaagacccatctctcaaggggttcacagtctgctaagacacgtacatgagtcagagcaaatgggggtaaaaggtaagatgtgctacaagagggctctggatagagtgctggaagaatcaggaaagttttgtagaatgggttgtttcatctgaatttaaaagggtatgtaggattttaacatgagaatttcacgtgagaattcaagtgaaaactcaacagtgtgagtaaagataacaatggcgggaatgcttagactgaggggtggtaatgcatttaaatggggcataggacgtctggggtttggagaggaataaagtgggttgggtcggctggtgggtggccttcacaggcacgcaaagtagttacatacagtctgcaacagaacagggatgtttcctcggaattctgcttgagaaacgccagtctggctatagtgtgtaaggcagataagcagggatggggacacgaacggagacacagactcataatcagttgaagatgagggtgagggaaggtaagttaggttctcctttgaggtgcccaggacataggaacgtttaagggcaagagaagtctgtcttgcaggggtggcatgcagcggctctgaccccagttggaaatgtatctgtactttgtccggcttccactcaaggaccatttatgacattgcttggtgtcagctgacaggggctctggccacagcttgtggggatgacgcgatccgcgtgtttcaggaggatcccaactcggatccacagcagcccaccttctccctgacagcccacttgcatcaggcccattcccaggatgtcaactgtgtggcctggaaccccaaggagccagggctactggcctcctgcagtgatgatggggaggtggccttctggaagtatcagcggcctgaaggcctctgagctacctcgactttggacagagtaatgactccccagaaaacgtcatataagactttaccagcccctgagaggaccaggaggagcatccttgaccttcatttaacttggctcacttctcttcagacttgggtagaagtgcagagccacagaattgctttccttccccgcctttgacatgaggccttcagtaaagagctacagaacatgagtacattgttataccacagatttttcttgcattagggcacagtgttaaattttttggaggtaaatatactatttataatcactatatatagtaggagggggtatgtgtctcaggcttttctgaagttgcaagacttaaagaaataatccatctgcatcccaagtcctattttataaggatattcataaaaattccatggtgaatccttgtctgaaataggtcctcccttcccagtttctgtgtaagtctttgcatttaagacatccaatcaataatgaaggaaatttttttctgaatgtaggtttgagtgaggggcacctctgctttcccttagcaaccctcatatacctccctgcaccgttacgctgtgatggcaactggggatagaaaaaaaatggggaaagacaggaatcctaaaagggagagttattactggccacaagccctgtattctcaacagggatgcaaattggttcttcagtaaggataaaaaaaatcacaagcagttgtttgtggccctcctaaggcccacagcacatatagtgtgtctgtgatattccattttcatggcaggagtgatcaggaagaaggcttcctaggggactggcgatttaaaccagttgagaaacactgccatcagcaggcagtttcagactcactcaagttgtctcttgacagtcacttctaaatgggttctaatgtgacaatggcctccaaaactacagccttccctgaagtttaagctgtgaccttagattttagaaggacagtggggctgtacctagaatagtggttctcgaagaatgcggcctgcagatcctgggagtcccaagaccctttcagggaggatctgtgaggtcaactgttggcactgtggcatgaatcaaggtggtggcagcaaacttctagtagttttgatatgtccttgatagaacaaatagcaatggttaactattaaatgttgacctagccagcgcagtggctcatgcctgtaatcccagcactttgggaggctgaggcgggcggatcacctgaggtcgggagttcgaggccagcctgaccaacatggagaaaccccgtctcttctaaaaatacaaaattagctgggcatggtggtgcatgcctgtaattccagctactcgggaggctgaggcaagagaatcgcttgaatccggtaggtggaggttgcagtgagccgagatcataccattgcactccagcccaggcaacaagagtgaaaccctgtctcaaaaagaaaaaaaaagttgaccttgagaatttataatattctgagaaaactggaagcatgcataaagcccctctgctgtgcactgaagtatgggtgccttgaggaaaagcagttacacagttgagttgcaagctgaattggctgtgttcaaggcatgccctttagaattgaaagaactagcagattacggtatttagacttgaatatttggctgatattttctggaaattaatggaatgagcctctcacctcaagggaaacaactgatagtgttgccagtgataaagctttcaagcaaaaatnggaatttccgaaaatctgtactccaccatgagctttatngtggggatattancaaatgtgattgtatnatgaaatgcatttcattggagaattcaatgaaccattttccagtgaccagtacgtgatgttacaaaatcatgcatggctcaaagattgattcaaaagtgtaagacaggccagtggatcttaatgtattaacaatataagagtgcattaagtcctcggagtctacattgcctttaagaaactatgacttgtagtaagccgggcgcggtggctcacgcctgtaatcccaacacttcgggaggccaaggtgggtggatcacaaggtcaggagtacaagaccagcctggccaatatggctgaaagtccgatctctactaccaattacaacacaattagccgggccgtggtcggcagatccctatgtagtcccagctactcggcgaggctgcaggcaggacgaatagccttgaacccggagacgtgcacggtcgccgggagacgcacatcgtgcccactggactccaggcatgggaagacagcaccgcagacaccaacccaaaaaaacaacaaacacac

SEQ ID NO: 437831 - DNA, 3514 bp, Homo sapiens
  misc_feature (2932)..(2932): n is a, c, g, or t
  misc_feature (2971)..(2971): n is a, c, g, or t
  misc_feature (2984)..(2984): n is a, c, g, or t
  misc_feature (3000)..(3000): n is a, c, g, or t
cgcgatgctttccctgccgaggtgaggggagcgactacaactcccagagggtatggcggccgcagcagtgggcagttgagtttccggggcgacccaggtcctccggcggaagcgggagcctctgtcggccgcggaagcctggagtgggcggtacgcagacgcgcgcggtgagacccgctgtctgctcagcggactctgcccgcccccacctccccctgcgtcgggccgacatgaaggacctgctggcctcgtgcggcggcgaccggagaatccgcatctggggcacggagggtgacagctggatctgcaagtctgtcctttctgaaggccaccagcgcaccgtgcggaaggtagcctggtccccctgcggtaattacctggcctctgccagctttgatgctaccacttgcatttggaagaagaaccaggatgactttgagtgtgtaaccactctcgagggccatgaaaatgaggtcaagtcagtggcttgggccccatctggcaacctcctggccacttgcagccgagataagagcgtttgggtctgggaagttgatgaagaggatgagtatgaatgtgtcagtgttctcaactcccacacacaggatgtcaagcatgtggtttggcacccaagtcaggagctcttagcttctgccagctatgatgacacagtgaagctgtaccgggaggaagaggatgactgggtatgctgtgccacccttgagggccatgaatccactgtgtggagcttggcctttgacccgagtggccagcgcctggcgtcttgtagtgatgaccgtactgtgcgtatctggcgtcagtatctaccaggcaatgaacaaggggtggcatgcagcggctctgaccccagttggaaatgtatctgtactttgtccggcttccactcaaggaccatttatgacattgcttggtgtcagctgacaggggctctggccacagcttgtggggatgacgcgatccgcgtgtttcaggaggatcccaactcggatccacagcagcccaccttctccctgacagcccacttgcatcaggcccattcccaggatgtcaactgtgtggcctggaaccccaaggagccagggctactggcctcctgcagtgatgatggggaggtggccttctggaagtatcagcggcctgaaggcctctgagctacctcgactttggacagagtaatgactccccagaaaacgtcatataagactttaccagcccctgagaggaccaggaggagcatccttgaccttcatttaacttggctcacttctcttcagacttgggtagaagtgcagagccacagaattgctttccttccccgcctttgacatgaggccttcagtaaagagctacagaacatgagtacattgttataccacagatttttcttgcattagggcacagtgttaaattttttggaggtaaatatactatttataatcactatatatagtaggagggggtatgtgtctcaggcttttctgaagttgcaagacttaaagaaataatccatctgcatcccaagtcctattttataaggatattcataaaaattccatggtgaatccttgtctgaaataggtcctcccttcccagtttctgtgtaagtctttgcatttaagacatccaatcaataatgaaggaaatttttttctgaatgtaggtttgagtgaggggcacctctgctttcccttagcaaccctcatatacctccctgcaccgttacgctgtgatggcaactggggatagaaaaaaaatggggaaagacaggaatcctaaaagggagagttattactggccacaagccctgtattctcaacagggatgcaaattggttcttcagtaaggataaaaaaaatcacaagcagttgtttgtggccctcctaaggcccacagcacatatagtgtgtctgtgatattccattttcatggcaggagtgatcaggaagaaggcttcctaggggactggcgatttaaaccagttgagaaacactgccatcagcaggcagtttcagactcactcaagttgtctcttgacagtcacttctaaatgggttctaatgtgacaatggcctccaaaactacagccttccctgaagtttaagctgtgaccttagattttagaaggacagtggggctgtacctagaatagtggttctcgaagaatgcggcctgcagatcctgggagtcccaagaccctttcagggaggatctgtgaggtcaactgttggcactgtggcatgaatcaaggtggtggcagcaaacttctagtagttttgatatgtccttgatagaacaaatagcaatggttaactattaaatgttgacctagccagcgcagtggctcatgcctgtaatcccagcactttgggaggctgaggcgggcggatcacctgaggtcgggagttcgaggccagcctgaccaacatggagaaaccccgtctcttctaaaaatacaaaattagctgggcatggtggtgcatgcctgtaattccagctactcgggaggctgaggcaagagaatcgcttgaatccggtaggtggaggttgcagtgagccgagatcataccattgcactccagcccaggcaacaagagtgaaaccctgtctcaaaaagaaaaaaaaagttgaccttgagaatttataatattctgagaaaactggaagcatgcataaagcccctctgctgtgcactgaagtatgggtgccttgaggaaaagcagttacacagttgagttgcaagctgaattggctgtgttcaaggcatgccctttagaattgaaagaactagcagattacggtatttagacttgaatatttggctgatattttctggaaattaatggaatgagcctctcacctcaagggaaacaactgatagtgttgccagtgataaagctttcaagcaaaaatnggaatttccgaaaatctgtactccaccatgagctttatngtggggatattancaaatgtgattgtatnatgaaatgcatttcattggagaattcaatgaaccattttccagtgaccagtacgtgatgttacaaaatcatgcatggctcaaagattgattcaaaagtgtaagacaggccagtggatcttaatgtattaacaatataagagtgcattaagtcctcggagtctacattgcctttaagaaactatgacttgtagtaagccgggcgcggtggctcacgcctgtaatcccaacacttcgggaggccaaggtgggtggatcacaaggtcaggagtacaagaccagcctggccaatatggctgaaagtccgatctctactaccaattacaacacaattagccgggccgtggtcggcagatccctatgtagtcccagctactcggcgaggctgcaggcaggacgaatagccttgaacccggagacgtgcacggtcgccgggagacgcacatcgtgcccactggactccaggcatgggaagacagcaccgcagacaccaacccaaaaaaacaacaaacacac

SEQ ID NO: 437832 - DNA, 3373 bp, Homo sapiens
  misc_feature (2791)..(2791): n is a, c, g, or t
  misc_feature (2830)..(2830): n is a, c, g, or t
  misc_feature (2843)..(2843): n is a, c, g, or t
  misc_feature (2859)..(2859): n is a, c, g, or t
gaagtagattcatttgcatctttgtaaaagctgtgaaatacactccctgagctttcccccactagcttgattccagtgctagcccctgatattgaatggcttcatggtgctgcacccagctccagagcctggcctgcgctccgcctttaggtgacagctggatctgcaagtctgtcctttctgaaggccaccagcgcaccgtgcggaaggtagcctggtccccctgcggtaattacctggcctctgccagctttgatgctaccacttgcatttggaagaagaaccaggatgactttgagtgtgtaaccactctcgagggccatgaaaatgaggtcaagtcagtggcttgggccccatctggcaacctcctggccacttgcagccgagataagagcgtttgggtctgggaagttgatgaagaggatgagtatgaatgtgtcagtgttctcaactcccacacacaggatgtcaagcatgtggtttggcacccaagtcaggagctcttagcttctgccagctatgatgacacagtgaagctgtaccgggaggaagaggatgactgggtatgctgtgccacccttgagggccatgaatccactgtgtggagcttggcctttgacccgagtggccagcgcctggcgtcttgtagtgatgaccgtactgtgcgtatctggcgtcagtatctaccaggcaatgaacaaggggtggcatgcagcggctctgaccccagttggaaatgtatctgtactttgtccggcttccactcaaggaccatttatgacattgcttggtgtcagctgacaggggctctggccacagcttgtggggatgacgcgatccgcgtgtttcaggaggatcccaactcggatccacagcagcccaccttctccctgacagcccacttgcatcaggcccattcccaggatgtcaactgtgtggcctggaaccccaaggagccagggctactggcctcctgcagtgatgatggggaggtggccttctggaagtatcagcggcctgaaggcctctgagctacctcgactttggacagagtaatgactccccagaaaacgtcatataagactttaccagcccctgagaggaccaggaggagcatccttgaccttcatttaacttggctcacttctcttcagacttgggtagaagtgcagagccacagaattgctttccttccccgcctttgacatgaggccttcagtaaagagctacagaacatgagtacattgttataccacagatttttcttgcattagggcacagtgttaaattttttggaggtaaatatactatttataatcactatatatagtaggagggggtatgtgtctcaggcttttctgaagttgcaagacttaaagaaataatccatctgcatcccaagtcctattttataaggatattcataaaaattccatggtgaatccttgtctgaaataggtcctcccttcccagtttctgtgtaagtctttgcatttaagacatccaatcaataatgaaggaaatttttttctgaatgtaggtttgagtgaggggcacctctgctttcccttagcaaccctcatatacctccctgcaccgttacgctgtgatggcaactggggatagaaaaaaaatggggaaagacaggaatcctaaaagggagagttattactggccacaagccctgtattctcaacagggatgcaaattggttcttcagtaaggataaaaaaaatcacaagcagttgtttgtggccctcctaaggcccacagcacatatagtgtgtctgtgatattccattttcatggcaggagtgatcaggaagaaggcttcctaggggactggcgatttaaaccagttgagaaacactgccatcagcaggcagtttcagactcactcaagttgtctcttgacagtcacttctaaatgggttctaatgtgacaatggcctccaaaactacagccttccctgaagtttaagctgtgaccttagattttagaaggacagtggggctgtacctagaatagtggttctcgaagaatgcggcctgcagatcctgggagtcccaagaccctttcagggaggatctgtgaggtcaactgttggcactgtggcatgaatcaaggtggtggcagcaaacttctagtagttttgatatgtccttgatagaacaaatagcaatggttaactattaaatgttgacctagccagcgcagtggctcatgcctgtaatcccagcactttgggaggctgaggcgggcggatcacctgaggtcgggagttcgaggccagcctgaccaacatggagaaaccccgtctcttctaaaaatacaaaattagctgggcatggtggtgcatgcctgtaattccagctactcgggaggctgaggcaagagaatcgcttgaatccggtaggtggaggttgcagtgagccgagatcataccattgcactccagcccaggcaacaagagtgaaaccctgtctcaaaaagaaaaaaaaagttgaccttgagaatttataatattctgagaaaactggaagcatgcataaagcccctctgctgtgcactgaagtatgggtgccttgaggaaaagcagttacacagttgagttgcaagctgaattggctgtgttcaaggcatgccctttagaattgaaagaactagcagattacggtatttagacttgaatatttggctgatattttctggaaattaatggaatgagcctctcacctcaagggaaacaactgatagtgttgccagtgataaagctttcaagcaaaaatnggaatttccgaaaatctgtactccaccatgagctttatngtggggatattancaaatgtgattgtatnatgaaatgcatttcattggagaattcaatgaaccattttccagtgaccagtacgtgatgttacaaaatcatgcatggctcaaagattgattcaaaagtgtaagacaggccagtggatcttaatgtattaacaatataagagtgcattaagtcctcggagtctacattgcctttaagaaactatgacttgtagtaagccgggcgcggtggctcacgcctgtaatcccaacacttcgggaggccaaggtgggtggatcacaaggtcaggagtacaagaccagcctggccaatatggctgaaagtccgatctctactaccaattacaacacaattagccgggccgtggtcggcagatccctatgtagtcccagctactcggcgaggctgcaggcaggacgaatagccttgaacccggagacgtgcacggtcgccgggagacgcacatcgtgcccactggactccaggcatgggaagacagcaccgcagacaccaacccaaaaaaacaacaaacacac

SEQ ID NO: 437833 - DNA, 1386 bp, Homo sapiens
cgcgatgctttccctgccgaggtgaggggagcgactacaactcccagagggtatggcggccgcagcagtgggcagttgagtttccggggcgacccaggtcctccggcggaagcgggagcctctgtcggccgcggaagcctggagtgggcggtacgcagacgcgcgcggtgagacccgctgtctgctcagcggactctgcccgcccccacctccccctgcgtcgggccgacatgaaggactcgctggtgctgctgggccgtgtcccggcgcacccggactcccgctgctggttcctggcctggaaccccgcggggaccctgctggcctcgtgcggcggcgaccggagaatccgcatctggggcacggagggtgacagctggatctgcaagtctgtcctttctgaaggccaccagcgcaccgtgcggaaggtagcctggtccccctgcggtaattacctggcctctgccagctttgatgctaccacttgcatttggaagaagaaccaggatgactttgagtgtgtaaccactctcgagggccatgaaaatgaggtcaagtcagtggcttgggccccatctggcaacctcctggccacttgcagccgagataagagcgtttgggtctgggaagttgatgaagaggatgagtatgaatgtgtcagtgttctcaactcccacacacaggatgtcaagcatgtggtttggcacccaagtcaggagctcttagcttctgccagctatgatgacacagtgaagctgtaccgggaggaagaggatgactgggtatgctgtgccacccttgagggccatgaatccactgtgtggagcttggcctttgacccgagtggccagcgcctggcgtcttgtagtgatgaccgtactgtgcgtatctggcgtcagtatctaccaggcaatgaacaaggggtggcatgcagcggctctgaccccagttggaaatgtatctgtactttgtccggcttccactcaaggaccatttatgacattgcttggtaagactccatccccccaccccatcccatccccataaatcagggattttagagaaggcataccctatgcagtcctctgcaaccctgggggagtgcttgggaattgagggcagccacccccattccttatcaggcctgactctaccatgctggtttacagctggctgggctggcattcacaggagcagagaacagtcccaggctgtgagggtagcaccagcgctagaggttcgcacagctcgtgctgtccagaagttattattgaatctgcattcgtggctgaggcaggagaatcgcttgaacccgggaggcggaggttgcagtgagccgagattgcgccactgcactccagcctggtgatggagcaagactccatc

SEQ ID NO: 437834 - DNA, 2898 bp, Homo sapiens
  misc_feature (2316)..(2316): n is a, c, g, or t
  misc_feature (2355)..(2355): n is a, c, g, or t
  misc_feature (2368)..(2368): n is a, c, g, or t
  misc_feature (2384)..(2384): n is a, c, g, or t
ggtatgctgtgccacccagtcatcctcttcctcccggtacagcttcactgtgtcatcatagctgtaccgggaggaagaggatgactgggtatgctgtgccacccttgagggccatgaatccactgtgtggagcttggcctttgacccgagtggccagcgcctggcgtcttgtagtgatgaccgtactgtgcgtatctggcgtcagtatctaccaggcaatgaacaaggggtggcatgcagcggctctgaccccagttggaaatgtatctgtactttgtccggcttccactcaaggaccatttatgacattgcttggtgtcagctgacaggggctctggccacagcttgtggggatgacgcgatccgcgtgtttcaggaggatcccaactcggatccacagcagcccaccttctccctgacagcccacttgcatcaggcccattcccaggatgtcaactgtgtggcctggaaccccaaggagccagggctactggcctcctgcagtgatgatggggaggtggccttctggaagtatcagcggcctgaaggcctctgagctacctcgactttggacagagtaatgactccccagaaaacgtcatataagactttaccagcccctgagaggaccaggaggagcatccttgaccttcatttaacttggctcacttctcttcagacttgggtagaagtgcagagccacagaattgctttccttccccgcctttgacatgaggccttcagtaaagagctacagaacatgagtacattgttataccacagatttttcttgcattagggcacagtgttaaattttttggaggtaaatatactatttataatcactatatatagtaggagggggtatgtgtctcaggcttttctgaagttgcaagacttaaagaaataatccatctgcatcccaagtcctattttataaggatattcataaaaattccatggtgaatccttgtctgaaataggtcctcccttcccagtttctgtgtaagtctttgcatttaagacatccaatcaataatgaaggaaatttttttctgaatgtaggtttgagtgaggggcacctctgctttcccttagcaaccctcatatacctccctgcaccgttacgctgtgatggcaactggggatagaaaaaaaatggggaaagacaggaatcctaaaagggagagttattactggccacaagccctgtattctcaacagggatgcaaattggttcttcagtaaggataaaaaaaatcacaagcagttgtttgtggccctcctaaggcccacagcacatatagtgtgtctgtgatattccattttcatggcaggagtgatcaggaagaaggcttcctaggggactggcgatttaaaccagttgagaaacactgccatcagcaggcagtttcagactcactcaagttgtctcttgacagtcacttctaaatgggttctaatgtgacaatggcctccaaaactacagccttccctgaagtttaagctgtgaccttagattttagaaggacagtggggctgtacctagaatagtggttctcgaagaatgcggcctgcagatcctgggagtcccaagaccctttcagggaggatctgtgaggtcaactgttggcactgtggcatgaatcaaggtggtggcagcaaacttctagtagttttgatatgtccttgatagaacaaatagcaatggttaactattaaatgttgacctagccagcgcagtggctcatgcctgtaatcccagcactttgggaggctgaggcgggcggatcacctgaggtcgggagttcgaggccagcctgaccaacatggagaaaccccgtctcttctaaaaatacaaaattagctgggcatggtggtgcatgcctgtaattccagctactcgggaggctgaggcaagagaatcgcttgaatccggtaggtggaggttgcagtgagccgagatcataccattgcactccagcccaggcaacaagagtgaaaccctgtctcaaaaagaaaaaaaaagttgaccttgagaatttataatattctgagaaaactggaagcatgcataaagcccctctgctgtgcactgaagtatgggtgccttgaggaaaagcagttacacagttgagttgcaagctgaattggctgtgttcaaggcatgccctttagaattgaaagaactagcagattacggtatttagacttgaatatttggctgatattttctggaaattaatggaatgagcctctcacctcaagggaaacaactgatagtgttgccagtgataaagctttcaagcaaaaatnggaatttccgaaaatctgtactccaccatgagctttatngtggggatattancaaatgtgattgtatnatgaaatgcatttcattggagaattcaatgaaccattttccagtgaccagtacgtgatgttacaaaatcatgcatggctcaaagattgattcaaaagtgtaagacaggccagtggatcttaatgtattaacaatataagagtgcattaagtcctcggagtctacattgcctttaagaaactatgacttgtagtaagccgggcgcggtggctcacgcctgtaatcccaacacttcgggaggccaaggtgggtggatcacaaggtcaggagtacaagaccagcctggccaatatggctgaaagtccgatctctactaccaattacaacacaattagccgggccgtggtcggcagatccctatgtagtcccagctactcggcgaggctgcaggcaggacgaatagccttgaacccggagacgtgcacggtcgccgggagacgcacatcgtgcccactggactccaggcatgggaagacagcaccgcagacaccaacccaaaaaaacaacaaacacac

SEQ ID NO: 437835 - DNA, 2646 bp, Homo sapiens
  misc_feature (2064)..(2064): n is a, c, g, or t
  misc_feature (2103)..(2103): n is a, c, g, or t
  misc_feature (2116)..(2116): n is a, c, g, or t
  misc_feature (2132)..(2132): n is a, c, g, or t
cgcgatgctttccctgccgaggtgaggggagcgactacaactcccagagggtatggcggccgcagcagtgggcagttgagtttccggggcgacccaggtcctccggcggaagcgggagcctctgtcggccgcggaagcctggagtgggcggtacgcagacgcgcgcggtgagacccgctgtctgctcagcggactctgcccgcccccacctccccctgcgctggttcctggcctggaaccccgcggggaccctgctggcctcgtgcggcggcgaccggagaatccgcatctggggcacggagggtgacagctggatctgcaagtctgtcctttctgaaggccaccagcgcaccgtgcggaaggtagcctggtccccctgcggtaattacctggcctctgccagctttgatgctaccattctcttcagacttgggtagaagtgcagagccacagaattgctttccttccccgcctttgacatgaggccttcagtaaagagctacagaacatgagtacattgttataccacagatttttcttgcattagggcacagtgttaaattttttggaggtaaatatactatttataatcactatatatagtaggagggggtatgtgtctcaggcttttctgaagttgcaagacttaaagaaataatccatctgcatcccaagtcctattttataaggatattcataaaaattccatggtgaatccttgtctgaaataggtcctcccttcccagtttctgtgtaagtctttgcatttaagacatccaatcaataatgaaggaaatttttttctgaatgtaggtttgagtgaggggcacctctgctttcccttagcaaccctcatatacctccctgcaccgttacgctgtgatggcaactggggatagaaaaaaaatggggaaagacaggaatcctaaaagggagagttattactggccacaagccctgtattctcaacagggatgcaaattggttcttcagtaaggataaaaaaaatcacaagcagttgtttgtggccctcctaaggcccacagcacatatagtgtgtctgtgatattccattttcatggcaggagtgatcaggaagaaggcttcctaggggactggcgatttaaaccagttgagaaacactgccatcagcaggcagtttcagactcactcaagttgtctcttgacagtcacttctaaatgggttctaatgtgacaatggcctccaaaactacagccttccctgaagtttaagctgtgaccttagattttagaaggacagtggggctgtacctagaatagtggttctcgaagaatgcggcctgcagatcctgggagtcccaagaccctttcagggaggatctgtgaggtcaactgttggcactgtggcatgaatcaaggtggtggcagcaaacttctagtagttttgatatgtccttgatagaacaaatagcaatggttaactattaaatgttgacctagccagcgcagtggctcatgcctgtaatcccagcactttgggaggctgaggcgggcggatcacctgaggtcgggagttcgaggccagcctgaccaacatggagaaaccccgtctcttctaaaaatacaaaattagctgggcatggtggtgcatgcctgtaattccagctactcgggaggctgaggcaagagaatcgcttgaatccggtaggtggaggttgcagtgagccgagatcataccattgcactccagcccaggcaacaagagtgaaaccctgtctcaaaaagaaaaaaaaagttgaccttgagaatttataatattctgagaaaactggaagcatgcataaagcccctctgctgtgcactgaagtatgggtgccttgaggaaaagcagttacacagttgagttgcaagctgaattggctgtgttcaaggcatgccctttagaattgaaagaactagcagattacggtatttagacttgaatatttggctgatattttctggaaattaatggaatgagcctctcacctcaagggaaacaactgatagtgttgccagtgataaagctttcaagcaaaaatnggaatttccgaaaatctgtactccaccatgagctttatngtggggatattancaaatgtgattgtatnatgaaatgcatttcattggagaattcaatgaaccattttccagtgaccagtacgtgatgttacaaaatcatgcatggctcaaagattgattcaaaagtgtaagacaggccagtggatcttaatgtattaacaatataagagtgcattaagtcctcggagtctacattgcctttaagaaactatgacttgtagtaagccgggcgcggtggctcacgcctgtaatcccaacacttcgggaggccaaggtgggtggatcacaaggtcaggagtacaagaccagcctggccaatatggctgaaagtccgatctctactaccaattacaacacaattagccgggccgtggtcggcagatccctatgtagtcccagctactcggcgaggctgcaggcaggacgaatagccttgaacccggagacgtgcacggtcgccgggagacgcacatcgtgcccactggactccaggcatgggaagacagcaccgcagacaccaacccaaaaaaacaacaaacacac

SEQ ID NO: 437836 - DNA, 1110 bp, Homo sapiens
ggggcgggtgttgggcgctgaggcgcgagaggaggggatgggcggggcgcgcggccgttagcgcgcggccgttagcggtcggtttctactaacggtaggcgtcgccgcgattcccgaaggtcatagtccgcgtgacccacccccgtttgcgcgctcgcagtcttcgccggcgcagtcaccgcgcagggcggccgcccggaggtagctaccacggcctgtgtcaacgactaaagctccagtacagcggcgccctcagacagctgggagggtggctctggccgggagcggcggccggtgagctaccgcgaggaggagcggcggaggcgacctcggcccggccctgcactggccgcccggcaggcgcgacatgagcctggtctggcatccgcgggatgctccttaagccccttctccggctgttaacctccggggaacggttgtgaccacaccgacacgtattttacagataaatcattcttgcggcggcgggtcgaacacgtttatttattttttattttctcaacaagcttttacccagcacctgtccagtgaaacaacttgataatcgtttcgaggggcgtccgccgggttaggaagccactgcctggcagcttgtggaagcctcatttgcaaagccacccctcagatgttttgaagatcgtgacgtcttgtaactagcagtgtgtgcacagaatcctactcaaggaacgtcttggcccagcgatgcaaagaactgaagtttcaagctggaagagcctgtattgtcctcacaatagtatagaagaattcaagagaggagagagagacagcaccgaatgaagactgtaaaagaaaagaaggaatgccagagattgagaaaatctgccaagactaggagggtaacccagaggaaaccgtcttcagggcctgtttgctggctatgccttcgagaacctggggatcccgaaaaattaggggaatttcttcagaaagacaatatcagcgtgcattatttctgtcttgctgggtgcagtggctcacgcctgtaatcccagcactctgggaggccgaggcaggaggatctcttgaacccaggagttcaagaccagcctgggcaaccttgtctctaca

SEQ ID NO: 437837 - DNA, 598 bp, Homo sapiens
ggggcgggtgttgggcgctgaggcgcgagaggaggggatgggcggggcgcgcggccgttagcgcgcggccgttagcggtcggtttctactaacggtaggcgtcgccgcgattcccgaaggtcatagtccgcgtgacccacccccgtttgcgcgctcgcagtcttcgccggcgcagtcaccgcgcagggcggccgcccggaggtagctaccacggcctgtgtcaacgactaaagctccagtacagcggcgccctcagacagctgggagggtggctctggccgggagcggcggccggtgagctaccgcgaggaggagcggcggaggcgacctcggcccggccctgcactggccgcccggcaggcgcgacatgagcctggtctggcatccgcgggatgctccttaagccccttctccggctgttaacctccggggaacggttgtgaccacaccgacacgtattttacagataaatcattcttgcggcggcgggtcgaacacgtttatttattttttattttctcaacaagcttttactctgggaggccgaggcaggaggatctcttgaacaaaattcactaattttaagggtccagtttga

SEQ ID NO: 437838 - DNA, 820 bp, Homo sapiens
ggggcgggtgttgggcgctgaggcgcgagaggaggggatgggcggggcgcgcggccgttagcgcgcggccgttagcggtcggtttctactaacggtaggcgtcgccgcgattcccgaaggtcatagtccgcgtgacccacccccgtttgcgcgctcgcagtcttcgccggcgcagtcaccgcgcagggcggccgcccggaggtagctaccacggcctgtgtcaacgactaaagctccagtacagcggcgccctcagacagctgggagggtggctctggccgggagcggcggccgccagcacctgtccagtgaaacaacttgataatcgtttcgaggggcgtccgccgggttaggaagccactgcctggcagcttgtggaagcctcatttgcaaagccacccctcagatgttttgaagatcgtgacgtcttgtaactagcagtgtgtgcacagaatcctactcaaggaacgtcttggcccagcgatgcaaagaactgaagtttcaagctggaagagcctgtattgtcctcacaatagtatagaagaattcaagagaggagagagagacagcaccgaatgaagactgtaaaagaaaagaaggaatgccagagattgagaaaatctgccaagactaggagggtaacccagaggaaaccgtcttcagggcctggtaagaaagactggagcttgtgttcgcccactgcctccagccctcagcaaagaaggccacctgtgtggggcagtatacttgcttcttctctctctcccagccctacttccttcctagattctctaagatcttgaggactcaggaactgcca

SEQ ID NO: 437839 - DNA, 377 bp, Homo sapiens
aataaccaccaccccaatcaaaataggtaatattttcatcaccccagaaagttccctcctgcctccttttccagtcaatcccactagacgtaatcactgttctgatctatggattatttttggctattcttttacttcatataagtgaaatcatatagtttataatcttctgtatctggcttttttctcccaacacagtgttttggagattcatccatgttgttgcatgcattcatagcttgtgcctttttattacttggtagtattcggttgcatgaataagttactatttgcttatctgttcacctgttgatgaacatctgaattgtttccatttgaggactattatgaataaagctactttaagcattcatgta

SEQ ID NO: 437840 - DNA, 2281 bp, Homo sapiens
ggggcgggtgttgggcgctgaggcgcgagaggaggggatgggcggggcgcgcggccgttagcgcgcggccgttagcggtcggtttctactaacggtaggcgtcgccgcgattcccgaaggtcatagtccgcgtgacccacccccgtttgcgcgctcgcagtcttcgccggcgcagtcaccgcgcagggcggccgcccggaggtagctaccacggcctgtgtcaacgactaaagctccagtacagcggcgccctcagacagctgggagggtggctctggccgggagcggcggccggtgagctaccgcgaggaggagcggcggaggcgacctcggcccggccctgcactggccgcccggcaggcgcgacatgagcctggtctggcatccgcgggatgctccttaagccccttctccggctgttaacctccggggaacggttgtgaccacaccgacacgtattttacagataaatcattcttgcggcggcgggtcgaacacgtttatttattttttattttctcaacaagcttttacccagcacctgtccagtgaaacaacttgataatcgtttcgaggggcgtccgccgggttaggaagccactgcctggcagcttgtggaagcctcatttgcaaagccacccctcagatgttttgaagatcgtgacgtcttgtaactagcagtgtgtgcacagaatcctactcaaggaacgtcttggcccagcgatgcaaagaactgaagtttcaagctggaagagcctgtattgtcctcacaatagtatagaagaattcaagagaggagagagagacagcaccgaatgaagactgtaaaagaaaagaaggaatgccagagattgagaaaatctgccaagactaggagggtaacccagaggaaaccgtcttcagggcctgtttgctggctatgccttcgagaacctggggatcccgaaaaattaggggaatttcttcagaaagacaatatcagcgtgcattatttctgtcttatcttatctagtaagctgcctcagaggggccagtccaacagaggtttccatggatttctgcctgaagacatcaaaaaggaggcagcccgggcttctaggaagatctgctttgtgtgcaagaaaaagggagctgctatcaactgccagaaggatcagtgcctcagaaacttccatctgccttgtggccaagaaaggggttgcctttcacaattttttggagagtacaaatcattttgtgacaaacatcgcccaacacagaacatccaacatgggcatgtgggggaggaaagctgcatcttatgttgtgaagacttatcccaacagagtgttgagaacatccagagcccgtgttgtagtcaagccatctaccaccgcaagtgcatacagaaatatgcccacacatcagcaaagcatttcttcaaatgtccacagtgtaacaatcgaaaagagtttcctcaagaaatgctgagaatgggaattcatattccagacagagatgctgcctgggaactcgagccaggggctttctcagacttatatcagcgctatcagcactgtgatgcccccatctgtctgtatgaacaaggcagagacagctttgaggatgaagggaggtggtgcctcattctgtgtgctacatgcggatcccacggaacccacagggactgctcctctcttagatctaacagtaagaaatgggagtgtgaggagtgttcacctgctgcagccacagactacatacctgaaaactcaggggacatcccttgctgcagcagcaccttccaccctgaggaacatttctgcagagacaacaccttggaagagaatccgggcctttcttggactgattggccagaaccttccttattagaaaagccagagtcctctcgtggcaggaggagctactcctggaggtccaagggtgtcagaatcactaacagctgcaaaaaatccaagtaacaccttctgagtagctgctgtcccacacaatagggtatgaagctgcgctcctccatcgggtttggggagggagcactctgggactgtgagacaaggaagcagggccagcagtgagactatgagccaagcaaagagaagtctcagtggagcatgaggagggagcagtccagatgccaacaaggaaatgcgtttatggctacaagagtgcctctgctttctcctcctctcctcccaccaaggattcttccaccttaatcttgttttcatatgcctcttcttacttcacccatgtttgttgttatgcaaataaaggttttctc

SEQ ID NO: 437841 - DNA, 3127 bp, Homo sapiens
ggggcgggtgttgggcgctgaggcgcgagaggaggggatgggcggggcgcgcggccgttagcgcgcggccgttagcggtcggtttctactaacggtaggcgtcgccgcgattcccgaaggtcatagtccgcgtgacccacccccgtttgcgcgctcgcagtcttcgccggcgcagtcaccgcgcagggcggccgcccggaggtagctaccacggcctgtgtcaacgactaaagctccagtacagcggcgccctcagacagctgggagggtggctctggccgggagcggcggccggtgagctaccgcgaggaggagcggcggaggcgacctcggcccggccctgcactggccgcccggcaggcgcgacatgagcctggtctggcatccgcgggatgctccttaagccccttctccggctgttaacctccggggaacggttgtgaccacaccgacacgtattttacagataaatcattcttgcggcggcgggtcgaacacgtttatttattttttattttctcaacaagcttttacccagcacctgtccagtgaaacaacttgataatcgtttcgaggggcgtccgccgggttaggaagccactgcctggcagcttgtggaagcctcatttgcaaagccacccctcagatgttttgaagatcgtgacgtcttgtaactagcagtgtgtgcacagaatcctactcaaggaacgtcttggcccagcgatgcaaagaactgaagtttcaagctggaagagcctgtattgtcctcacaatagtatagaagaattcaagagaggagagagagacagcaccgaatgaagactgtaaaagaaaagaaggaatgccagagattgagaaaatctgccaagactaggagggtaacccagaggaaaccgtcttcagggcctgtttgctggctatgccttcgagaacctggggatcccgaaaaattaggggaatttcttcagaaagacaatatcagcgtgcattatttctgtcttatcttatctagtaagctgcctcagaggggccagtccaacagaggtttccatggatttctgcctgaagacatcaaaaaggaggcagcccgggcttctaggaagatctgctttgtgtgcaagaaaaagggagctgctatcaactgccagaaggatcagtgcctcagaaacttccatctgccttgtggccaagaaaggggttgcctttcacaattttttggagagtacaaatcattttgtgacaaacatcgcccaacacagaacatccaacatgggcatgtgggggaggaaagctgcatcttatgttgtgaagacttatcccaacagagtgttgagaacatccagagcccgtgttgtagtcaagccatctaccaccgcaagtgcatacagaaatatgcccacacatcagcaaagcatttcttcaaatgtccacagtgtaacaatcgaaaagagtttcctcaagaaatgctgagaatgggaattcatattccagacaggtagtgggaaccccaaagcaggaactgagccagggagtgggttgcctagatttctagagaggaggtgagtgagaggatagttcagagaatgagagcagcagaggcactgataagaaggaaggggaggagggagtgcttttcaattatcaaaacagaagggagggggaagaagtttgcgggggaatggggtgcttgttgctgaaaagggcatttggggaatcagaattccctggggggttgagttattggattccagagtggaactaaggaacctgcatgcatgttccattcatcctgcttcaaccctctcccactgccaggccacttggccagccttgttggaagtgttcaggcagcctactgaactcttgctgtgcttagcttgggctcttcctaactcctccctgatggacaaaagtttcaccaacccattatgttcttattcactgtttcttctcccactgcagagatgctgcctgggaactcgagccaggggctttctcagacttatatcagcgctatcagcactgtgatgcccccatctgtctgtatgaacaaggcagagacagctttgaggatgaagggtaggggaaggcttctggctagaaagagctctcatcagtgctatcttagagttagaccttggcacagttattagaagtaagaaattcactcttgtatgcagaccttaggataaacacgattgctaagtctcattcttgaccagcccgactcacttgtgtgcacgtgaacacgtctcccctgcaaggtccgcttcaccttgtgcccagtggagagacattcagagccaattcctttcctaatctacctttcaaggggttacgactgatggcaggcttctgggatcagcactcatcctctctgagccatacattcatcttgggtaaaatgtgctgtaaaaaatgcctggcccatagcaaacatccaagcatggcagttggtgttctgtatgtctccacaacccttcctgggctcttcctctaggaggtggtgcctcattctgtgtgctacatgcggatcccacggaacccacagggactgctcctctcttagatctaacagtaagaaatgggagtgtgaggagtgttcacctgctgcagccacagactacatacctgaaaactcaggggacatcccttgctgcagcagcaccttccaccctgaggaacatttctgcagagacaacaccttggaagagaatccgggcctttcttggactgattggccagaaccttccttattagaaaagccagagtcctctcgtggcaggaggagctactcctggaggtccaagggtgttctgtatgtctccacaacccttcctgggctcttcctctaggaggtggtgcctcattctgtgtgctacatgcggatcccacggaacccacagggactgctcctctcttagatctaacagtaagaaatgggagaatcagcagaacctgtaggatcttatttggaattgacattctctattgtaattttgttcctgtttatttttaaattttctttttgtttcactggaaaggaaagatgatgctcagttttaaacgttaaaagtgtacaagttgctttgttacaataaaactaaatgtgtacacaaaaaaaaaa

SEQ ID NO: 437842 - DNA, 2119 bp, Homo sapiens
ggggcgggtgttgggcgctgaggcgcgagaggaggggatgggcggggcgcgcggccgttagcgcgcggccgttagcggtcggtttctactaacggtaggcgtcgccgcgattcccgaaggtcatagtccgcgtgacccacccccgtttgcgcgctcgcagtcttcgccggcgcagtcaccgcgcagggcggccgcccggaggtagctaccacggcctgtgtcaacgactaaagctccagtacagcggcgccctcagacagctgggagggtggctctggccgggagcggcggccggtgagctaccgcgaggaggagcggcggaggcgacctcggcccggccctgcactggccgcccggcaggcgcgacatgagcctggtctggcatccgcgggatgctccttaagccccttctccggctgttaacctccggggaacggttgtgaccacaccgacacgtattttacagataaatcattcttgcggcggcgggtcgaacacgtttatttattttttattttctcaacaagcttttacccagcacctgtccagtgaaacaacttgataatcgtttcgaggggcgtccgccgggttaggaagccactgcctggcagcttgtggaagcctcatttgcaaagccacccctcagatgttttgaagatcgtgacgtcttgtaactagcagtgtgtgcacagaatcctactcaaggaacgtcttggcccagcgatgcaaagaactgaagtttcaagctggaagagcctgtattgtcctcacaatagtatagaagaattcaagagaggagagagagacagcaccgaatgaagactgtaaaagaaaagaaggaatgccagagattgagaaaatctgccaagactaggagggtaacccagaggaaaccgtcttcagggcctgtttgctggctatgccttcgagaacctggggatcccgaaaaattaggggaatttcttcagaaagacaatatcagcgtgcattatttctgtcttatcttatctagtaagctgcctcagaggggccagtccaacagaggtttccatggatttctgcctgaagacatcaaaaaggaggcagcccgggcttctaggaagatctgctttgtgtgcaagaaaaagggagctgctatcaactgccagaaggatcagtgcctcagaaacttccatctgccttgtggccaagaaaggggttgcctttcacaattttttggagagtacaaatcattttgtgacaaacatcgcccaacacagaacatccaacatgggcatgtgggggaggaaagctgcatcttatgttgtgaagacttatcccaacagagtgttgagaacatccagagcccgtgttgtagtcaagccatctaccaccgcaagtgcatacagaaatatgcccacacatcagcaaagcatttcttcaaatgtccacagtgtaacaatcgaaaagagtttcctcaagaaatgctgagaatgggaattcatattccagacaggaggtggtgcctcattctgtgtgctacatgcggatcccacggaacccacagggactgctcctctcttagatctaacaactacatacctgaaaactcaggggacatcccttgctgcagcagcaccttccaccctgaggaacatttctgcagagacaacaccttggaagagaatccgggcctttcttggactgattggccagaaccttccttattagaaaagccagagtcctctcgtggcaggaggagctactcctggaggtccaagggtgtcagaatcactaacagctgcaaaaaatccaagtaacaccttctgagtagctgctgtcccacacaatagggtatgaagctgcgctcctccatcgggtttggggagggagcactctgggactgtgagacaaggaagcagggccagcagtgagactatgagccaagcaaagagaagtctcagtggagcatgaggagggagcagtccagatgccaacaaggaaatgcgtttatggctacaagagtgcctctgctttctcctcctctcctcccaccaaggattcttccaccttaatcttgttttcatatgcctcttcttacttcacccatgtttgttgttatgcaaataaaggttttctc

SEQ ID NO: 437843 - DNA, 1863 bp, Homo sapiens
ggggcgggtgttgggcgctgaggcgcgagaggaggggatgggcggggcgcgcggccgttagcgcgcggccgttagcggtcggtttctactaacggtaggcgtcgccgcgattcccgaaggtcatagtccgcgtgacccacccccgtttgcgcgctcgcagtcttcgccggcgcagtcaccgcgcagggcggccgcccggaggtagctaccacggcctgtgtcaacgactaaagctccagtacagcggcgccctcagacagctgggagggtggctctggccgggagcggcggccggtgagctaccgcgaggaggagcggcggaggcgacctcggcccggccctgcactggccgcccggcaggcgcgacatgagcctggtctggcatccgcgggatgctccttaagccccttctccggctgttaacctccggggaacggttgtgaccacaccgacacgtattttacagataaatcattcttgcggcggcgggtcgaacacgtttatttattttttattttctcaacaagcttttacccagcacctgtccagtgaaacaacttgataatcgtttcgaggggcgtccgccgggttaggaagccactgcctggcagcttgtggaagcctcatttgcaaagccacccctcagatgttttgaagatcgtgacgtcttgtaactagcagtgtgtgcacagaatcctactcaaggaacgtcttggcccagcgatgcaaagaactgaagtttcaagctggaagagcctgtattgtcctcacaatagtatagaagaattcaagagaggagagagagacagcaccgaatgaagactgtaaaagaaaagaaggaatgccagagattgagaaaatctgccaagactaggagggtaacccagaggaaaccgtcttcagggcctgtttgctggctatgccttcgagaacctggggatcccgaaaaattaggggaatttcttcagaaagacaatatcagcgtgcattatttctgtcttatcttatctagtaagctgcctcagaggggccagtccaacagaggtttccatggatttctgcctgaagacatcaaaaaggaggcagcccgggcttctaggaagatctgctttgtgtgcaagaaaaagggagctgctatcaactgccagaaggatcagtgcctcagaaacttccatctgccttgtggccaagaaaggggttgcctttcacaattttttggagagtacaaatcattttgtgacaaacatcgcccaacacagaacatccaacatgggcatgtgggggaggaaagctgcatcttatgttgtgaagacttatcccaacagagtgttgagaacatccagagcccgtgttgtagtcaagccatctaccaccgcaagtgcatacagaaatatgcccacacatcagcaaagcatttcttcaaatgtccacagtgtaacaatcgaaaagagtttcctcaagaaatgctgagaatgggaattcatattccagacagagatgctgcctgggaactcgagccaggggctttctcagacttatatcagcgctatcagcactgtgatgcccccatctgtctgtatgaacaaggcagagacagctttgaggatgaaggggagcactctgggactgtgagacaaggaagcagggccagcagtgagactatgagccaagcaaagagaagtctcagtggagcatgaggagggagcagtccagatgccaacaaggaaatgcgtttatggctacaagagtgcctctgctttctcctcctctcctcccaccaaggattcttccaccttaatcttgttttcatatgcctcttcttacttcacccatgtttgttgttatgcaaataaaggttttctc

SEQ ID NO: 437844 - DNA, 1717 bp, Homo sapiens
ggggcgggtgttgggcgctgaggcgcgagaggaggggatgggcggggcgcgcggccgttagcgcgcggccgttagcggtcggtttctactaacggtaggcgtcgccgcgattcccgaaggtcatagtccgcgtgacccacccccgtttgcgcgctcgcagtcttcgccggcgcagtcaccgcgcagggcggccgcccggaggtagctaccacggcctgtgtcaacgactaaagctccagtacagcggcgccctcagacagctgggagggtggctctggccgggagcggcggccggtgagctaccgcgaggaggagcggcggaggcgacctcggcccggccctgcactggccgcccggcaggcgcgacatgagcctggtctggcatccgcgggatgctccttaagccccttctccggctgttaacctccggggaacggttgtgaccacaccgacacgtattttacagataaatcattcttgcggcggcgggtcgaacacgtttatttattttttattttctcaacaagcttttacccagcacctgtccagtgaaacaacttgataatcgtttcgaggggcgtccgccgggttaggaagccactgcctggcagcttgtggaagcctcatttgcaaagccacccctcagatgttttgaagatcgtgacgtcttgtaactagcagtgtgtgcacagaatcctactcaaggaacgtcttggcccagcgatgcaaagaactgaagtttcaagctggaagagcctgtattgtcctcacaatagtatagaagaattcaagagaggagagagagacagcaccgaatgaagactgtaaaagaaaagaaggaatgccagagattgagaaaatctgccaagactaggagggtaacccagaggaaaccgtcttcagggcctgtttgctggctatgccttcgagaacctggggatcccgaaaaattaggggaatttcttcagaaagacaatatcagcgtgcattatttctgtcttatcttatctagtaagctgcctcagaggggccagtccaacagaggtttccatggatttctgcctgaagacatcaaaaaggaggcagcccgggcttctaggaagatctgctttgtgtgcaagaaaaagggagctgctatcaactgccagaaggatcagtgcctcagaaacttccatctgccttgtggccaagaaaggggttgcctttcacaattttttggagagtacaaatcattttgtgacaaacatcgcccaacacagaacatccaacatgggcatgtgggggaggaaagctgcatcttatgttgtgaagacttatcccaacagagtgttgagaacatccagagcccgtgttgtagtcaagccatctaccaccgcaagtgcatacaggtggggctttttccgccctgggtcccttccaccattgccctagttctctgcctggaaccagagaaccctgggaatgctcaggtgtgcctcagctttggtgctccatgctggaggcctgtattgagggctggtttcaggcagttagaggaaagtcagtccagtctgtggtcattcctggcctataggacctcacacatgataagatttagaataagcaaaatcttcagcattgctagagcaaatgggctcatcccagaatgagctgagaagcctctatgtcagcctcacttcctgggatgaaagaaaagggaaacatgtatccaggtggc

SEQ ID NO: 437845 - DNA, 1180 bp, Homo sapiens
ggggcgggtgttgggcgctgaggcgcgagaggaggggatgggcggggcgcgcggccgttagcgcgcggccgttagcggtcggtttctactaacggtaggcgtcgccgcgattcccgaaggtcatagtccgcgtgacccacccccgtttgcgcgctcgcagtcttcgccggcgcagtcaccgcgcagggcggccgcccggaggtagctaccacggcctgtgtcaacgactaaagctccagtacagcggcgccctcagacagctgggagggtggctctggccgggagcggcggccggtgagctaccgcgaggaggagcggcggaggcgacctcggcccggccctgcactggccgcccggcaggcgcgacatgagcctggtctggcatccgcgggatgctccttaagccccttctccggctgttaacctccggggaacggttgtgaccacaccgacacgtattttacagataaatcattcttgcggcggcgggtcgaacacgtttatttattttttattttctcaacaagcttttacccagcacctgtccagtgaaacaacttgataatcgtttcgaggggcgtccgccgggttaggaagccactgcctggcagcttgtggaagcctcatttgcaaagccacccctcagatgttttgaagatcgtgacgtcttgtaactagcagtgtgtgcacagaatcctactcaaggaacgtcttggcccagcgatgcaaagaactgaagtttcaagctggaagagcctgtattgtcctcacaatagtatagaagaattcaagagaggagagagagacagcaccgaatgaagactgtaaaagaaaagaaggaatgccagagattgagaaaatctgccaagactaggagggtaacccagaggaaaccgtcttcagggcctgtttgctggctatgccttcgagaacctggggatcccgaaaaattaggggaatttcttcagaaagacaatatcagcgtgcattatttctgtctttgttttggagattcatccatgttgttgcatgcattcatagcttgtgcctttttattacttggtagtattcggttgcatgaataagttactatttgcttatctgttcacctgttgatgaacatctgaattgtttccatttgaggactattatgaataaagctactttaagcattcatgta

SEQ ID NO: 437846 - DNA, 2256 bp, Homo sapiens
ggggcgggtgttgggcgctgaggcgcgagaggaggggatgggcggggcgcgcggccgttagcgcgcggccgttagcggtcggtttctactaacggtaggcgtcgccgcgattcccgaaggtcatagtccgcgtgacccacccccgtttgcgcgctcgcagtcttcgccggcgcagtcaccgcgcagggcggccgcccggaggtagctaccacggcctgtgtcaacgactaaagctccagtacagcggcgccctcagacagctgggagggtggctctggccgggagcggcggccggtgagctaccgcgaggaggagcggcggaggcgacctcggcccggccctgcactggccgcccggcaggcgcgacatgagcctggtctggcatccgcgggatgctccttaagccccttctccggctgttaacctccggggaacggttgtgaccacaccgacacgtattttacagataaatcattcttgcggcggcgggtcgaacacgtttatttattttttattttctcaacaagcttttacccagcacctgtccagtgaaacaacttgataatcgtttcgaggggcgtccgccgggttaggaagccactgcctggcagcttgtggaagcctcatttgcaaagccacccctcagatgttttgaagatcgtgacgtcttgtaactagcagtgtgtgcacagaatcctactcaaggaacgtcttggcccagcgatgcaaagaactgaagtttcaaggttttatgtctattgctggatggtcggggtagccccagtaactgggaactgctccgcagtccgctcacgtggacccctgtgggaatagcaagctggaagagcctgtattgtcctcacaatagtatagaagaattcaagagaggagagagagacagcaccgaatgaagactgtaaaagaaaagaaggaatgccagagattgagaaaatctgccaagactaggagggtaacccagaggaaaccgtcttcagggcctgtttgctggctatgccttcgagaacctggggatcccgaaaaattaggggaatttcttcagaaagacaatatcagcgtgcattatttctgtcttatcttatctagtaagctgcctcagaggggccagtccaacagaggtttccatggatttctgcctgaagacatcaaaaaggaggcagcccgggcttctaggaagatctgctttgtgtgcaagaaaaagggagctgctatcaactgccagaaggatcagtgcctcagaaacttccatctgccttgtggccaagaaaggggttgcctttcacaattttttggagagtacaaatcattttgtgacaaacatcgcccaacacagaacatccaacatgggcatgtgggggaggaaagctgcatcttatgttgtgaagacttatcccaacagagtgttgagaacatccagagcccgtgttgtagtcaagccatctaccaccgcaagtgcatacagaaatatgcccacacatcagcaaagcatttcttcaaatgtccacagtgtaacaatcgaaaagagtttcctcaagaaatgctgagaatgggaattcatattccagacaggaggtggtgcctcattctgtgtgctacatgcggatcccacggaacccacagggactgctcctctcttagatctaacagtaagaaatgggagtgtgaggagtgttcacctgctgcagccacagactacatacctgaaaactcaggggacatcccttgctgcagcagcaccttccaccctgaggaacatttctgcagagacaacaccttggaagagaatccgggcctttcttggactgattggccagaaccttccttattagaaaagccagagtcctctcgtggcaggaggagctactcctggaggtccaagggtgtcagaatcactaacagctgcaaaaaatccaagtaacaccttctgagtagctgctgtcccacacaatagggtatgaagctgcgctcctccatcgggtttggggagggagcactctgggactgtgagacaaggaagcagggccagcagtgagactatgagccaagcaaagagaagtctcagtggagcatgaggagggagcagtccagatgccaacaaggaaatgcgtttatggctacaagagtgcctctgctttctcctcctctcctcccaccaaggattcttccaccttaatcttgttttcatatgcctcttcttacttcacccatgtttgttgttatgcaaataaaggttttctc

SEQ ID NO: 437847 - DNA, 2123 bp, Homo sapiens
ggggcgggtgttgggcgctgaggcgcgagaggaggggatgggcggggcgcgcggccgttagcgcgcggccgttagcggtcggtttctactaacggtaggcgtcgccgcgattcccgaaggtcatagtccgcgtgacccacccccgtttgcgcgctcgcagtcttcgccggcgcagtcaccgcgcagggcggccgcccggaggtagctaccacggcctgtgtcaacgactaaagctccagtacagcggcgccctcagacagctgggagggtggctctggccgggagcggcggccggtgagctaccgcgaggaggagcggcggaggcgacctcggcccggccctgcactggccgcccggcaggcgcgacatgagcctggtctggcatccgcgggatgctccttaagccccttctccggctgttaacctccggggaacggttgtgaccacaccgacacgtattttacagataaatcattcttgcggcggcgggtcgaacacgtttatttattttttattttctcaacaagcttttacccagcacctgtccagtgaaacaacttgataatcgtttcgaggggcgtccgccgggttaggaagccactgcctggcagcttgtggaagcctcatttgcaaagccacccctcagatgttttgaagatcgtgacgtcttgtaactagcagtgtgtgcacagaatcctactcaagctggaagagcctgtattgtcctcacaatagtatagaagaattcaagagaggagagagagacagcaccgaatgaagactgtaaaagaaaagaaggaatgccagagattgagaaaatctgccaagactaggagggtaacccagaggaaaccgtcttcagggcctgtttgctggctatgccttcgagaacctggggatcccgaaaaattaggggaatttcttcagaaagacaatatcagcgtgcattatttctgtcttatcttatctagtaagctgcctcagaggggccagtccaacagaggtttccatggatttctgcctgaagacatcaaaaaggaggcagcccgggcttctaggaagatctgctttgtgtgcaagaaaaagggagctgctatcaactgccagaaggatcagtgcctcagaaacttccatctgccttgtggccaagaaaggggttgcctttcacaattttttggagagtacaaatcattttgtgacaaacatcgcccaacacagaacatccaacatgggcatgtgggggaggaaagctgcatcttatgttgtgaagacttatcccaacagagtgttgagaacatccagagcccgtgttgtagtcaagccatctaccaccgcaagtgcatacagaaatatgcccacacatcagcaaagcatttcttcaaatgtccacagtgtaacaatcgaaaagagtttcctcaagaaatgctgagaatgggaattcatattccagacaggaggtggtgcctcattctgtgtgctacatgcggatcccacggaacccacagggactgctcctctcttagatctaacagtaagaaatgggagtgtgaggagtgttcacctgctgcagccacagactacatacctgaaaactcaggggacatcccttgctgcagcagcaccttccaccctgaggaacatttctgcagagacaacaccttggaagagaatccgggcctttcttggactgattggccagaaccttccttattagaaaagccagagtcctctcgtggcaggaggagctactcctggaggtccaagggtgtcagaatcactaacagctgcaaaaaatccaagtaacaccttctgagtagctgctgtcccacacaatagggtatgaagctgcgctcctccatcgggtttggggagggagcactctgggactgtgagacaaggaagcagggccagcagtgagactatgagccaagcaaagagaagtctcagtggagcatgaggagggagcagtccagatgccaacaaggaaatgcgtttatggctacaagagtgcctctgctttctcctcctctcctcccaccaaggattcttccaccttaatcttgttttcatatgcctcttcttacttcacccatgtttgttgttatgcaaataaaggttttctc

SEQ ID NO: 437848 - DNA, 1471 bp, Homo sapiens
ggggcgggtgttgggcgctgaggcgcgagaggaggggatgggcggggcgcgcggccgttagcgcgcggccgttagcggtcggtttctactaacggtaggcgtcgccgcgattcccgaaggtcatagtccgcgtgacccacccccgtttgcgcgctcgcagtcttcgccggcgcagtcaccgcgcagggcggccgcccggaggtagctaccacggcctgtgtcaacgactaaagctccagtacagcggcgccctcagacagctgggagggtggctctggccgggagcggcggccggtgagctaccgcgaggaggagcggcggaggcgacctcggcccggccctgcactggccgcccggcaggcgcgacatgagcctggtctggcatccgcgggatgctccttaagccccttctccggctgttaacctccggggaacggttgtgaccacaccgacacgtattttacagataaatcattcttgcggcggcgggtcgaacacgtttatttattttttattttctcaacaagcttttacccagcacctgtccagtgaaacaacttgataatcgtttcgaggggcgtccgccgggttaggaagccactgcctggcagcttgtggaagcctcatttgcaaagccacccctcagatgttttgaagatcgtgacgtcttgtaactagcagtgtgtgcacagaatcctactcaaggaacgtcttggcccagcgatgcaaagaactgaagtttcaagctggaagagcctgtattgtcctcacaatagtatagaagaattcaagagaggagagagagacagcaccgaatgaagactgtaaaagaaaagaaggaatgccagagattgagggtagaagtagttgacatagggaatttgggagaaattgtccaatggcctgtggtataggctgcactttttgccccctttgtcgtagtcttgggggttgaggttggaccagtgtggaagcacacacggagctgggagctgtcatacctgtcttaccagtgctgtccctagtagcaaagtgctgactctggaaccttactacccaaattcatatcctactctgccacttgccaataactgtgacagaaggcactacatttctttatgcctcagtttcctcatctggaaaatgtacataataatggcatgtactttttagagtgttctgtagattcattgagctactgtagattaattgagccaatacatgtaaagtgccaagaatagtgcctcgcaacaggaaatacttttatcaattttggttcatttcagtatgctttgtaaaggtggtaccacctgagattcagagtagttggcagaagaagcagtaaaaaagtaaaagagggtttgctcttgcattcattcagtcaacataggcagtacaggcactggggagagaaagatgcttacaatccggttcctgccctcaaataactcagtgagtatgttttgcactt

SEQ ID NO: 437849 - DNA, 2121 bp, Homo sapiens
ggggcgggtgttgggcgctgaggcgcgagaggaggggatgggcggggcgcgcggccgttagcgcgcggccgttagcggtcggtttctactaacggtaggcgtcgccgcgattcccgaaggtcatagtccgcgtgacccacccccgtttgcgcgctcgcagtcttcgccggcgcagtcaccgcgcagggcggccgcccggaggtagctaccacggcctgtgtcaacgactaaagctccagtacagcggcgccctcagacagctgggagggtggctctggccgggagcggcggccggtgagctaccgcgaggaggagcggcggaggcgacctcggcccggccctgcactggccgcccggcaggcgcgacatgagcctggtctggcatccgcgggatgctccttaagccccttctccggctgttaacctccggggaacggttgtgaccacaccgacacgtttatttattttttattttctcaacaagcttttacccagcacctgtccagtgaaacaacttgataatcgtttcgaggggcgtccgccgggttaggaagccactgcctggcagcttgtggaagcctcatttgcaaagccacccctcagatgttttgaagatcgtgacgtcttgtaactagcagtgtgtgcacagaatcctactcaaggaacgtcttggcccagcgatgcaaagaactgaagtttcaagctggaagagcctgtattgtcctcacaatagtatagaagaattcaagagaggagagagagacagcaccgaatgaagactgtaaaagaaaagaaggaatgccagagattgagaaaatctgccaagactaggagggtaacccagaggaaaccgtcttcagggcctgtttgctggctatgccttcgagaacctggggatcccgaaaaattaggggaatttcttcagaaagacaatatcagcgtgcattatttctgtcttatcttatctagtaagctgcctcagaggggccagtccaacagaggtttccatggatttctgcctgaagacatcaaaaaggaggcagcccgggcttctaggaagatctgctttgtgtgcaagaaaaagggagctgctatcaactgccagaaggatcagtgcctcagaaacttccatctgccttgtggccaagaaaggggttgcctttcacaattttttggagagtacaaatcattttgtgacaaacatcgcccaacacagaacatccaacatgggcatgtgggggaggaaagctgcatcttatgttgtgaagacttatcccaacagagtgttgagaacatccagagcccgtgttgtagtcaagccatctaccaccgcaagtgcatacagaaatatgcccacacatcagcaaagcatttcttcaaatgtccacagtgtaacaatcgaaaagagtttcctcaagaaatgctgagaatgggaattcatattccagacaggaggtggtgcctcattctgtgtgctacatgcggatcccacggaacccacagggactgctcctctcttagatctaacagtaagaaatgggagtgtgaggagtgttcacctgctgcagccacagactacatacctgaaaactcaggggacatcccttgctgcagcagcaccttccaccctgaggaacatttctgcagagacaacaccttggaagagaatccgggcctttcttggactgattggccagaaccttccttattagaaaagccagagtcctctcgtggcaggaggagctactcctggaggtccaagggtgtcagaatcactaacagctgcaaaaaatccaagtaacaccttctgagtagctgctgtcccacacaatagggtatgaagctgcgctcctccatcgggtttggggagggagcactctgggactgtgagacaaggaagcagggccagcagtgagactatgagccaagcaaagagaagtctcagtggagcatgaggagggagcagtccagatgccaacaaggaaatgcgtttatggctacaagagtgcctctgctttctcctcctctcctcccaccaaggattcttccaccttaatcttgttttcatatgcctcttcttacttcacccatgtttgttgttatgcaaataaaggttttctc

SEQ ID NO: 437850 - DNA, 1860 bp, Homo sapiens
ctccttttcctgtaccctcaaactctcttagcaacatcctctttgtaggggtgagggtgggaggagaaagaaggtagtcaaagggtttttacaaacacagagctcttccctgtttctcttacagaaatatgcccacacatcagcaaagcatttcttcaaatgtccacagtgtaacaatcgaaaagagtttcctcaagaaatgctgagaatgggaattcatattccagacaggtagtgggaaccccaaagcaggaactgagccagggagtgggttgcctagatttctagagaggaggtgagtgagaggatagttcagagaatgagagcagcagaggcactgataagaaggaaggggaggagggagtgcttttcaattatcaaaacagaagggagggggaagaagtttgcgggggaatggggtgcttgttgctgaaaagggcatttggggaatcagaattccctggggggttgagttattggattccagagtggaactaaggaacctgcatgcatgttccattcatcctgcttcaaccctctcccactgccaggccacttggccagccttgttggaagtgttcaggcagcctactgaactcttgctgtgcttagcttgggctcttcctaactcctccctgatggacaaaagtttcaccaacccattatgttcttattcactgtttcttctcccactgcagagatgctgcctgggaactcgagccaggggctttctcagacttatatcagcgctatcagcactgtgatgcccccatctgtctgtatgaacaaggcagagacagctttgaggatgaagggtaggggaaggcttctggctagaaagagctctcatcagtgctatcttagagttagaccttggcacagttattagaagtaagaaattcactcttgtatgcagaccttaggataaacacgattgctaagtctcattcttgaccagcccgactcacttgtgtgcacgtgaacacgtctcccctgcaaggtccgcttcaccttgtgcccagtggagagacattcagagccaattcctttcctaatctacctttcaaggggttacgactgatggcaggcttctgggatcagcactcatcctctctgagccatacattcatcttgggtaaaatgtgctgtaaaaaatgcctggcccatagcaaacatccaagcatggcagttggtgttctgtatgtctccacaacccttcctgggctcttcctctaggaggtggtgcctcattctgtgtgctacatgcggatcccacggaacccacagggactgctcctctcttagatctaacaactacatacctgaaaactcaggggacatcccttgctgcagcagcaccttccaccctgaggaacatttctgcagagacaacaccttggaagagaatccgggcctttcttggactgattggccagaaccttccttattagaaaagccagagtcctctcgtggcaggaggagctactcctggaggtccaagggtgtcagaatcactaacagctgcaaaaaatccaagtaacaccttctgagtagctgctgtcccacacaatagggtatgaagctgcgctcctccatcgggtttggggagggagcactctgggactgtgagacaaggaagcagggccagcagtgagactatgagccaagcaaagagaagtctcagtggagcatgaggagggagcagtccagatgccaacaaggaaatgcgtttatggctacaagagtgcctctgctttctcctcctctcctcccaccaaggattcttccaccttaatcttgttttcatatgcctcttcttacttcacccatgtttgttgttatgcaaataaaggttttctc

SEQ ID NO: 437851 - DNA, 2164 bp, Homo sapiens
ggggcgggtgttgggcgctgaggcgcgagaggaggggatgggcggggcgcgcggccgttagcgcgcggccgttagcggtcggtttctactaacggtaggcgtcgccgcgattcccgaaggtcatagtccgcgtgacccacccccgtttgcgcgctcgcagtcttcgccggcgcagtcaccgcgcagggcggccgcccggaggtagctaccacggcctgtgtcaacgactaaagctccagtacagcggcgccctcagacagctgggagggtggctctggccgggagcggcggccggtgagctaccgcgaggaggagcggcggaggcgacctcggcccggccctgcactggccgcccggcaggcgcgacatgagcctggtctggcatccgcgggatgctccttaagccccttctccggctgttaacctccggggaacggttgtgaccacaccgacacgtattttacagataaatcattcttgcggcggcgggtcgaacacgtttatttattttttattttctcaacaagcttttacccagcacctgtccagtgaaacaacttgataatcgtttcgaggggcgtccgccgggttaggaagccactgcctggcagcttgtggaagcctcatttgcaaagccacccctcagatgttttgaagatcgtgacgtcttgtaactagcagtgtgtgcacagaatcctactcaaggaacgtcttggcccagcgatgcaaagaactgaagtttcaagctggaagagcctgtattgtcctcacaatagtatagaagaattcaagagaggagagagagacagcaccgaatgaagactgtaaaagaaaagaaggaatgccagagattgagaaaatctgccaagactaggagggtaacccagaggaaaccgtcttcagggcctgtttgctggctatgccttcgagaacctggggatcccgaaaaattaggggaatttcttcagaaagacaatatcagcgtgcattatttctgtcttatcttatctagtaagctgcctcagaggggccagtccaacagaggtttccatggatttctgcctgaagacatcaaaaaggaggcagcccgggcttctaggaagatctgctttgtgtgcaagaaaaagggagctgctatcaactgccagaaggatcagtgcctcagaaacttccatctgccttgtggccaagaaaggggttgcctttcacaattttttggagagtacaaatcattttgtgacaaacatcgcccaacacagaacatccaacatgggcatgtgggggaggaaagctgcatcttatgttgtgaagacttatcccaacagagtgttgagaacatccagagcccgtgttgtagtcaagccatctaccaccgcaagtgcatacagaaatatgcccacacatcagcaaagcatttcttcaaatgtccacagtgtaacaatcgaaaagagtttcctcaagaaatgctgagaatgggaattcatattccagacaggaggtggtgcctcattctgtgtgctacatgcggatcccacggaacccacagggactgctcctctcttagatctaacagtaagaaatgggagtgtgaggagtgttcacctgctgcagccacagactacatacctgaaaactcaggggacatcccttgctgcagcagcaccttccaccctgaggaacatttctgcagagacaacaccttggaagagaatccgggcctttcttggactgattggccagaaccttccttattagaaaagccagagtcctctcgtggcaggaggagctactcctggaggtccaagggtgtcagaatcactaacagctgcaaaaaatccaagtaacaccttctgagtagctgctgtcccacacaatagggtatgaagctgcgctcctccatcgggtttggggagggagcactctgggactgtgagacaaggaagcagggccagcagtgagactatgagccaagcaaagagaagtctcagtggagcatgaggagggagcagtccagatgccaacaaggaaatgcgtttatggctacaagagtgcctctgctttctcctcctctcctcccaccaaggattcttccaccttaatcttgttttcatatgcctcttcttacttcacccatgtttgttgttatgcaaataaaggttttctc

SEQ ID NO: 437852 - DNA, 2042 bp, Homo sapiens
ggggcgggtgttgggcgctgaggcgcgagaggaggggatgggcggggcgcgcggccgttagcgcgcggccgttagcggtcggtttctactaacggtaggcgtcgccgcgattcccgaaggtcatagtccgcgtgacccacccccgtttgcgcgctcgcagtcttcgccggcgcagtcaccgcgcagggcggccgcccggaggtagctaccacggcctgtgtcaacgactaaagctccagtacagcggcgccctcagacagctgggagggtggctctggccgggagcggcggccggtgagctaccgcgaggaggagcggcggaggcgacctcggcccggccctgcactggccgcccggcaggcgcgacatgagcctggtctggcatccgcgggatgctccttaagccccttctccggctgttaacctccggggaacggttgtgaccacaccgacacgtattttacagataaatcattcttgcggcggcgggtcgaacacgtttatttattttttattttctcaacaagcttttacccagcacctgtccagtgaaacaacttgataatcgtttcgaggggcgtccgccgggttaggaagccactgcctggcagcttgtggaagcctcatttgcaaagccacccctcagatgttttgaagatcgtgacgtcttgtaactagcagtgtgtgcacagaatcctactcaaggaacgtcttggcccagcgatgcaaagaactgaagtttcaagctggaagagcctgtattgtcctcacaatagtatagaagaattcaagagaggagagagagacagcaccgaatgaagactgtaaaagaaaagaaggaatgccagagattgagaaaatctgccaagactaggagggtaacccagaggaaaccgtcttcagggcctgtttgctggctatgccttcgagaacctggggatcccgaaaaattaggggaatttcttcagaaagacaatatcagcgtgcattatttctgtcttatcttatctagtaagctgcctcagaggggccagtccaacagaggtttccatggatttctgcctgaagacatcaaaaaggaggcagcccgggcttctaggaagatctgctttgtgtgcaagaaaaagggagctgctatcaactgccagaaggatcagtgcctcagaaacttccatctgccttgtggccaagaaaggggttgcctttcacaattttttggagagtacaaatcattttgtgacaaacatcgcccaacacagaacatccaacatgggcatgtgggggaggaaagctgcatcttatgttgtgaagacttatcccaacagagtgttgagaacatccagagcccgtgttgtagtcaagccatctaccaccgcaagtgcatacagaaatatgcccacacatcagcaaagcatttcttcaaatgtccacagtgtaacaatcgaaaagagtttcctcaagaaatgctgagaatgggaattcatattccagacagactacatacctgaaaactcaggggacatcccttgctgcagcagcaccttccaccctgaggaacatttctgcagagacaacaccttggaagagaatccgggcctttcttggactgattggccagaaccttccttattagaaaagccagagtcctctcgtggcaggaggagctactcctggaggtccaagggtgtcagaatcactaacagctgcaaaaaatccaagtaacaccttctgagtagctgctgtcccacacaatagggtatgaagctgcgctcctccatcgggtttggggagggagcactctgggactgtgagacaaggaagcagggccagcagtgagactatgagccaagcaaagagaagtctcagtggagcatgaggagggagcagtccagatgccaacaaggaaatgcgtttatggctacaagagtgcctctgctttctcctcctctcctcccaccaaggattcttccaccttaatcttgttttcatatgcctcttcttacttcacccatgtttgttgttatgcaaataaaggttttctc

SEQ ID NO: 437853 - DNA, 1599 bp, Homo sapiens
ggggcgggtgttgggcgctgaggcgcgagaggaggggatgggcggggcgcgcggccgttagcgcgcggccgttagcggtcggtttctactaacggtaggcgtcgccgcgattcccgaaggtcatagtccgcgtgacccacccccgtttgcgcgctcgcagtcttcgccggcgcagtcaccgcgcagggcggccgcccggaggtagctaccacggcctgtgtcaacgactaaagctccagtacagcggcgccctcagacagctgggagggtggctctggccgggagcggcggccggtgagctaccgcgaggaggagcggcggaggcgacctcggcccggccctgcactggccgcccggcaggcgcgacatgagcctggtctggcatccgcgggatgctccttaagccccttctccggctgttaacctccggggaacggttgtgaccacaccgacacgtattttacagataaatcattcttgcggcggcgggtcgaacacgtttatttattttttattttctcaacaagcttttacccagcacctgtccagtgaaacaacttgataatcgtttcgaggggcgtccgccgggttaggaagccactgcctggcagcttgtggaagcctcatttgcaaagccacccctcagatgttttgaagatcgtgacgtcttgtaactagcagtgtgtgcacagaatcctactcaaggaacgtcttggcccagcgatgcaaagaactgaagtttcaagctggaagagcctgtattgtcctcacaatagtatagaagaattcaagagaggagagagagacagcaccgaatgaagactgtaaaagaaaagaaggaatgccagagattgagaaaatctgccaagactaggagggtaacccagaggaaaccgtcttcagggcctgtttgctggctatgccttcgagaacctggggatcccgaaaaattaggggaatttcttcagaaagacaatatcagcgtgcattatttctgtcttatcttatctagtaagctgcctcagaggggccagtccaacagaggtttccatggatttctgcctgaagacatcaaaaaggaggcagcccgggcttctaggaagatctgctttgtgtgcaagaaaaagggagctgctatcaactgccagaaggatcagtgcctcagaaacttccatctgccttgtggccaagaaaggggttgcctttcacaattttttggagagtacaaatcattttgtgacaaacatcgcccaacacagaacatccaacatgggcatgtgggggaggaaagctgcatcttatgttgtgaagacttatcccaacagagtgttgagaacatccagagcccgtgttgtagtcaagccatctaccaccgcaagtgcatacagaaatatgcccacacatcagcaaagcatttcttcaaatgtccacagtgtaacaatcgaaaagagtttcctcaagaaatgccaaattttttgcgagagtacaaaccattttgtgacaacatcgcccaacacagcacacccaacatgggcatgtggggaggaaagctgcagtctattgttgtgaagacttatcccaacagtagtgttgagaaca

SEQ ID NO: 437854 - DNA, 2982 bp, Homo sapiens
ggggcgggtgttgggcgctgaggcgcgagaggaggggatgggcggggcgcgcggccgttagcgcgcggccgttagcggtcggtttctactaacggtaggcgtcgccgcgattcccgaaggtcatagtccgcgtgacccacccccgtttgcgcgctcgcagtcttcgccggcgcagtcaccgcgcagggcggccgcccggaggtagctaccacggcctgtgtcaacgactaaagctccagtacagcggcgccctcagacagctgggagggtggctctggccgggagcggcggccggtgagctaccgcgaggaggagcggcggaggcgacctcggcccggccctgcactggccgcccggcaggcgcgacatgagcctggtctggcatccgcgggatgctccttaagccccttctccggctgttaacctccggggaacggttgtgaccacaccgacacgtattttacagataaatcattcttgcggcggcgggtcgaacacgtttatttattttttattttctcaacaagcttttacccagcacctgtccagtgaaacaacttgataatcgtttcgaggggcgtccgccgggttaggaagccactgcctggcagcttgtggaagcctcatttgcaaagccacccctcagatgttttgaagatcgtgacgtcttgtaactagcagtgtgtgcacagaatcctactcaaggaacgtcttggcccagcgatgcaaagaactgaagtttcaagctggaagagcctgtattgtcctcacaatagtatagaagaattcaagagaggagagagagacagcaccgaatgaagactgtaaaagaaaagaaggaatgccagagattgagatcttatctagtaagctgcctcagaggggccagtccaacagaggtttccatggatttctgcctgaagacatcaaaaaggaggcagcccgggcttctaggaagatctgctttgtgtgcaagaaaaagggagctgctatcaactgccagaaggatcagtgcctcagaaacttccatctgccttgtggccaagaaaggggttgcctttcacaattttttggagagtacaaatcattttgtgacaaacatcgcccaacacagaacatccaacatgggcatgtgggggaggaaagctgcatcttatgttgtgaagacttatcccaacagagtgttgagaacatccagagcccgtgttgtagtcaagccatctaccaccgcaagtgcatacagaaatatgcccacacatcagcaaagcatttcttcaaatgtccacagtgtaacaatcgaaaagagtttcctcaagaaatgctgagaatgggaattcatattccagacaggtagtgggaaccccaaagcaggaactgagccagggagtgggttgcctagatttctagagaggaggtgagtgagaggatagttcagagaatgagagcagcagaggcactgataagaaggaaggggaggagggagtgcttttcaattatcaaaacagaagggagggggaagaagtttgcgggggaatggggtgcttgttgctgaaaagggcatttggggaatcagaattccctggggggttgagttattggattccagagtggaactaaggaacctgcatgcatgttccattcatcctgcttcaaccctctcccactgccaggccacttggccagccttgttggaagtgttcaggcagcctactgaactcttgctgtgcttagcttgggctcttcctaactcctccctgatggacaaaagtttcaccaacccattatgttcttattcactgtttcttctcccactgcagagatgctgcctgggaactcgagccaggggctttctcagacttatatcagcgctatcagcactgtgatgcccccatctgtctgtatgaacaaggcagagacagctttgaggatgaagggtaggggaaggcttctggctagaaagagctctcatcagtgctatcttagagttagaccttggcacagttattagaagtaagaaattcactcttgtatgcagaccttaggataaacacgattgctaagtctcattcttgaccagcccgactcacttgtgtgcacgtgaacacgtctcccctgcaaggtccgcttcaccttgtgcccagtggagagacattcagagccaattcctttcctaatctacctttcaaggggttacgactgatggcaggcttctgggatcagcactcatcctctctgagccatacattcatcttgggtaaaatgtgctgtaaaaaatgcctggcccatagcaaacatccaagcatggcagttggtgttctgtatgtctccacaacccttcctgggctcttcctctaggaggtggtgcctcattctgtgtgctacatgcggatcccacggaacccacagggactgctcctctcttagatctaacagtaagaaatgggagtgtgaggagtgttcacctgctgcagccacagactacatacctgaaaactcaggggacatcccttgctgcagcagcaccttccaccctgaggaacatttctgcagagacaacaccttggaagagaatccgggcctttcttggactgattggccagaaccttccttattagaaaagccagagtcctctcgtggcaggaggagctactcctggaggtccaagggtgttctgtatgtctccacaacccttcctgggctcttcctctaggaggtggtgcctcattctgtgtgctacatgcggatcccacggaacccacagggactgctcctctcttagatctaacagtaagaaatgggagaatcagcagaacctgtaggatcttatttggaattgacattctctattgtaattttgttcctgtttatttttaaattttctttttgtttcactggaaaggaaagatgatgctcagttttaaacgttaaaagtgtacaagttgctttgttacaataaaactaaatgtgtacacaaaaaaaaaa

SEQ ID NO: 437855 - DNA, 2144 bp, Homo sapiens
ggggcgggtgttgggcgctgaggcgcgagaggaggggatgggcggggcgcgcggccgttagcgcgcggccgttagcggtcggtttctactaacggtaggcgtcgccgcgattcccgaaggtcatagtccgcgtgacccacccccgtttgcgcgctcgcagtcttcgccggcgcagtcaccgcgcagggcggccgcccggaggtagctaccacggcctgtgtcaacgactaaagctccagtacagcggcgccctcagacagctgggagggtggctctggccgggagcggcggccggtgagctaccgcgaggaggagcggcggaggcgacctcggcccggccctgcactggccgcccggcaggcgcgacatgagcctggtctggcatccgcgggatgctccttaagccccttctccggctgttaacctccggggaacggttgtgaccacaccgacacgtattttacagataaatcattcttgcggcggcgggtcgaacacgtttatttattttttattttctcaacaagcttttacccagcacctgtccagtgaaacaacttgataatcgtttcgaggggcgtccgccgggttaggaagccactgcctggcagcttgtggaagcctcatttgcaaagccacccctcagtcttgtaactagcagtgtgtgcacagaatcctactcaaggaacgtcttggcccagcgatgcaaagaactgaagtttcaagctggaagagcctgtattgtcctcacaatagtatagaagaattcaagagaggagagagagacagcaccgaatgaagactgtaaaagaaaagaaggaatgccagagattgagaaaatctgccaagactaggagggtaacccagaggaaaccgtcttcagggcctgtttgctggctatgccttcgagaacctggggatcccgaaaaattaggggaatttcttcagaaagacaatatcagcgtgcattatttctgtcttatcttatctagtaagctgcctcagaggggccagtccaacagaggtttccatggatttctgcctgaagacatcaaaaaggaggcagcccgggcttctaggaagatctgctttgtgtgcaagaaaaagggagctgctatcaactgccagaaggatcagtgcctcagaaacttccatctgccttgtggccaagaaaggggttgcctttcacaattttttggagagtacaaatcattttgtgacaaacatcgcccaacacagaacatccaacatgggcatgtgggggaggaaagctgcatcttatgttgtgaagacttatcccaacagagtgttgagaacatccagagcccgtgttgtagtcaagccatctaccaccgcaagtgcatacagaaatatgcccacacatcagcaaagcatttcttcaaatgtccacagtgtaacaatcgaaaagagtttcctcaagaaatgctgagaatgggaattcatattccagacaggaggtggtgcctcattctgtgtgctacatgcggatcccacggaacccacagggactgctcctctcttagatctaacagtaagaaatgggagtgtgaggagtgttcacctgctgcagccacagactacatacctgaaaactcaggggacatcccttgctgcagcagcaccttccaccctgaggaacatttctgcagagacaacaccttggaagagaatccgggcctttcttggactgattggccagaaccttccttattagaaaagccagagtcctctcgtggcaggaggagctactcctggaggtccaagggtgtcagaatcactaacagctgcaaaaaatccaagtaacaccttctgagtagctgctgtcccacacaatagggtatgaagctgcgctcctccatcgggtttggggagggagcactctgggactgtgagacaaggaagcagggccagcagtgagactatgagccaagcaaagagaagtctcagtggagcatgaggagggagcagtccagatgccaacaaggaaatgcgtttatggctacaagagtgcctctgctttctcctcctctcctcccaccaaggattcttccaccttaatcttgttttcatatgcctcttcttacttcacccatgtttgttgttatgcaaataaaggttttctc

SEQ ID NO: 437856 - DNA, 1776 bp, Homo sapiens
aagtaatggttctaagttcttttgctactgtgtgatagcagtataacatgagagttagtgttggcctctggagccaggctacttgagttcagatcccatctatatcacttactaactcttaccttgggcaggatacttaaacctctctgtgcctcagtcccccatcttgaaaatggggataataatggtacctactgcatggcgtgtttgtgagttaacacatgtcaagtacctagaacagtcccttttattccatcacatgggttgggaggtgaagtgcaccattgccttgaccctggggaacttgataaccaaatacagaattaaattgcttaccaaaccccatttatatttatagctggaagagcctgtattgtcctcacaatagtatagaagaattcaagagaggagagagagacagcaccgaatgaagactgtaaaagaaaagaaggaatgccagagattgagaaaatctgccaagactaggagggtaacccagaggaaaccgtcttcagggcctgtttgctggctatgccttcgagaacctggggatcccgaaaaattaggggaatttcttcagaaagacaatatcagcgtgcattatttctgtcttatcttatctagtaagctgcctcagaggggccagtccaacagaggtttccatggatttctgcctgaagacatcaaaaaggaggcagcccgggcttctaggaagatctgctttgtgtgcaagaaaaagggagctgctatcaactgccagaaggatcagtgcctcagaaacttccatctgccttgtggccaagaaaggggttgcctttcacaattttttggagagtacaaatcattttgtgacaaacatcgcccaacacagaacatccaacatgggcatgtgggggaggaaagctgcatcttatgttgtgaagacttatcccaacagagtgttgagaacatccagagcccgtgttgtagtcaagccatctaccaccgcaagtgcatacagaaatatgcccacacatcagcaaagcatttcttcaaatgtccacagtgtaacaatcgaaaagagtttcctcaagaaatgctgagaatgggaattcatattccagacaggaggtggtgcctcattctgtgtgctacatgcggatcccacggaacccacagggactgctcctctcttagatctaacagtaagaaatgggagtgtgaggagtgttcacctgctgcagccacagactacatacctgaaaactcaggggacatcccttgctgcagcagcaccttccaccctgaggaacatttctgcagagacaacaccttggaagagaatccgggcctttcttggactgattggccagaaccttccttattagaaaagccagagtcctctcgtggcaggaggagctactcctggaggtccaagggtgtcagaatcactaacagctgcaaaaaatccaagtaacaccttctgagtagctgctgtcccacacaatagggtatgaagctgcgctcctccatcgggtttggggagggagcactctgggactgtgagacaaggaagcagggccagcagtgagactatgagccaagcaaagagaagtctcagtggagcatgaggagggagcagtccagatgccaacaaggaaatgcgtttatggctacaagagtgcctctgctttctcctcctctcctcccaccaaggattcttccaccttaatcttgttttcatatgcctcttcttacttcacccatgtttgttgttatgcaaataaaggttttctc

SEQ ID NO: 437857 - DNA, 1288 bp, Homo sapiens
cttcgcggcgctcgtttcctggcgctccccacctttagcgagaccaacgagagaacaccgcctgcagctagaacagcctggtcaggagcgtaacggagtggtgcgccaacgtgagaggaaacccgtgcgcggctgcgctttcctgtccccaagccgttctagacgcgggaaaaatgctttctgaaagcagctcctttttgaagggtgtgatgcttggaagcattttctgtgctttgatcactatgctaggacacattaggattggtcatggaaatagaatgcaccaccatgagcatcatcacctacaagctcctaacaaagaagatatcttgaaaatttcagaggatgagcgcatggagctcagtaagagctttcgagtatactgtattatccttgtaaaacccaaagatgtgagtctttgggctgcagtaaaggagacttggaccaaacactgtgacaaagcagagttcttcagttctgaaaatgttaaagtgtttgagtcaattaatatggacacaaatgacatgtggttaatgatgagaaaagcttacaaatacgcctttgataagtatagagaccaatacaactggttcttccttgcacgccccactacgtttgctatcattgaaaacctaaagtattttttgttaaaaaaggatccatcacagcctttctatctaggccacactataaaatctggagaccttgaatatgtgggtatggaaggaggaattgtcttaagtgtagaatcaatgaaaagacttaacagccttctcaatatcccagaaaagtgtcctgaacagggagggatgatttggaagatatctgaagataaacagctagcagtttgcctgaaatatgctggagtatttgcagaaaatgcagaagatgctgatggaaaagatgtatttaataccaaatctgttgggctttctattaaagaggcaatgacttatcaccccaaccaggtagtagaaggctgttgttcagatatggctgttacttttaatggactgactccaaatcagatgcatgtgatgatgtatggggtataccgccttagggcatttgggcatattttcaatgatgcattggttttcttacctccaaatggttctgacaatgactgagaagtggtagaaaagcgtgaatatgatctttgtataggacgtgtgttgtcattatttgtagtagtaactacatatccaatacagctgtatgtttctttttcttttctaatttggtggcactggtataaccacacattaaagtcagtagtacattttta

SEQ ID NO: 437858 - DNA, 914 bp, Homo sapiens
cttcgcggcgctcgtttcctggcgctccccacctttagcgagaccaacgagagaacaccgcctgcagctagaacagcctggtcaggagcgtaacggagtggtgcgccaacgtgagaggaaacccgtgcgcggctgcgctttcctgtccccaagccgttctagacgcgggaaaaatgctttctgaaagcagctcctttttgaagggtgtgatgcttggaagcattttctgtgctttgatcactatgctaggacacattaggattggtcatggaaatagaatgcaccaccatgagcatcatcacctacaagctcctaacaaagaagatatcttgaaaatttcagaggatgagcgcatggagctcagtaagagctttcgagtatactgtattatccttgtaaaacccaaagatgtgagtctttgggctgcagtaaaggagacttggaccaaacactgtgacaaagcagagttcttcagttctgaaaatgttaaagtgtttgagtcaattaatatggacacaaatgacatgtggttaatgatgagaaaagcttacaaatacgcctttgataagtatagagaccaatacaactggttcttccttgcacgccccactacgtttgctatcattgaaaacctaaagtattttttgttaaaaaaggatccatcacagcctttctatctaggccacactataaaatctggagaccttgaatatgtgggtatggaaggaggaattgtcttaagtgtagaatcaatgaaaagacttaacagccttctcaattccaaaaatttctggacggagggtattggacattcttaataaacgttcagatggcgcaattcgggtttggacatgcgtggggagtataacaatcggggttggtaccacgtgggttttgcttgtcctgtgttcgcg

SEQ ID NO: 437859 - DNA, 1408 bp, Homo sapiens
cttcgcggcgctcgtttcctggcgctccccacctttagcgagaccaacgagagaacaccgcctgcagctagaacagcctggtcaggagcgtaacggagtggtgcgccaacgtgagaggaaacccgtgcgcggctgcgctttcctgtccccaagccgttctagacgcgggaaaaatgctttctgaaagcagctcctttttgaagggtgtgatgcttggaagcattttctgtgctttgatcactatgctaggacacattaggattggtcatggaaatagaatgcaccaccatgagcatcatcacctacaagctcctaacaaagaagatatcttgaaaatttcagaggatgagcgcatggagctcagtaagagctttcgagtatactgtattatccttgtaaaacccaaagatgtgagtctttgggctgcagtaaaggagacttggaccaaacactgtgacaaagcagagttcttcagttctgaaaatgttaaagtgtttgagtcaattaatatggacacaaatgacatgtggttaatgatgagaaaagcttacaaatacgcctttgataagtatagagaccaatacaactggttcttccttgcacgccccactacgtttgctatcattgaaaacctaaagtattttttgttaaaaaaggatccatcacagcctttctatctaggccacactataaaatctggagaccttgaatatgtgggtatggaaggaggaattgtcttaagtgtagaatcaatgaaaagacttaacagccttctcaatatcccagaaaagtgtcctgaacagggagggatgatttggaagatatctgaagataaacagctagcagtttgcctgaaatatgctggagtatttgcagaaaatgcagaagatgctgatggaaaagatgtatttaataccaaatctgttgggctttctattaaagaggcaatgacttatcaccccaaccaggtagtagaaggctgttgttcagatatggctgttacttttaatggactgactccaaatcagatgcatgtgatgatgtatggggtataccgccttagggcatttgggcatattttcaatgatgcattggttttcttacctccaaatggttctgacaatgactgagaagtggtagaaaagcgtgaatatgatctttgtataggacgtgtgttgtcattatttgtagtagtaactacatatccaatacagctgtatgtttctttttcttttctaatttggtggcactggtataaccacacattaaagtcagtagtacatttttaaatgagggtggtttttttctttaaaacacatgaacattgtaaatgtgttggaaagaagtgttttaagaataataattttgcaaataaactattaataaatattatatgtgataaattcta

SEQ ID NO: 437860 - DNA, 1579 bp, Homo sapiens
tacatgattaaatcgagctctgtacctgaacattcgtgttcggcggctgcgtttcctgtccccaagccgttctagacacgggaaaaatgctttctgaaagcagctcctttttgaagggtgtgatgcttggaagcattttctgtgctttgatcactatgctaggacacattaggattggtcatggaaatagaatgcaccaccatgagcatcatcacctacaagctcctaacaaagaagatatcttgaaaatttcagaggatgagcgcatggagctcagtaagagctttcgagtatactgtattatccttgtaaaacccaaagatgtgagtctttgggctgcagtaaaggagacttggaccaaacactgtgacaaagcagagttcttcagttctgaaaatgttaaagtgtttgagtcaattaatatggacacaaatgacatgtggttaatgatgagaaaagcttacaaatacgcctttgataagtatagagaccaatacaactggttcttccttgcacgccccactacgtttgctatcattgaaaacctaaagtattttttgttaaaaaaggatccatcacagcctttctatctaggccacactataaaatctggagaccttgaatatgtgggtatggaaggaggaattgtcttaagtgtagaatcaatgaaaagacttaacagccttctcaatatcccagaaaagtgtcctgaacagggagggatgatttggaagatatctgaagataaacagctagcagtttgcctgaaatatgctggagtatttgcagaaaatgcagaagatgctgatggaaaagatgtatttaataccaaatctgttgggctttctattaaagaggcaatgacttatcaccccaaccaggtagtagaaggctgttgttcagatatggctgttacttttaatggactgactccaaatcagatgcatgtgatgatgtatggggtataccgccttagggcatttgggcatattttcaatgatgcattggttttcttacctccaaatggttctgacaatgactgagaagtggtagaaaagcgtgaatatgatctttgtataggacgtgtgttgtcattatttgtagtagtaactacatatccaatacagctgtatgtttctttttcttttctaatttggtggcactggtataaccacacattaaagtcagtagtacatttttaaatgagggtggtttttttctttaaaacacatgaacattgtaaatgtgttggaaagaagtgttttaagaataataattttgcaaataaactattaataaatattatatgtgataaattctaaattatgaacattagaaatctgtggggcacatatttttgctgattggttaaaaaattttaacaggtctttagcgttctaagatatgcaaatgatatctctagttgtgaatttgtgattaaagtaaaacttttagctgtgtgttccctttacttctaatactgatttatgttctaagcctccccaagttccaatggatttgccttctcaaaatgtacaactaagcaactaaagaaaattaaagtgaaagttgaaaaata

SEQ ID NO: 437861 - DNA, 1836 bp, Homo sapiens
cttcgcggcgctcgtttcctggcgctccccacctttagcgagaccaacgagagaacaccgcctgcagctagaacagcctggtcaggagcgtaacggagtggtgcgccaacgtgagaggaaacccgtgcgcggctgcgctttcctgtccccaagccgttctagacgcggatgaagtgcaaaacaaacttctccatagaggagttgttgcaaagttccagtttataccaaacagtaatcagattccattggaagctaaagattttgagagccttttgtactatatgcaactaacttgatttcaagcttgggaacttttaaaaaaaacattaaagcaaaatgaaaaatgctttctgaaagcagctcctttttgaagggtgtgatgcttggaagcattttctgtgctttgatcactatgctaggacacattaggattggtcatggaaatagaatgcaccaccatgagcatcatcacctacaagctcctaacaaagaagatatcttgaaaatttcagaggatgagcgcatggagctcagtaagagctttcgagtatactgtattatccttgtaaaacccaaagatgtgagtctttgggctgcagtaaaggagacttggaccaaacactgtgacaaagcagagttcttcagttctgaaaatgttaaagtgtttgagtcaattaatatggacacaaatgacatgtggttaatgatgagaaaagcttacaaatacgcctttgataagtatagagaccaatacaactggttcttccttgcacgccccactacgtttgctatcattgaaaacctaaagtattttttgttaaaaaaggatccatcacagcctttctatctaggccacactataaaatctggagaccttgaatatgtgggtatggaaggaggaattgtcttaagtgtagaatcaatgaaaagacttaacagccttctcaatatcccagaaaagtgtcctgaacagggagggatgatttggaagatatctgaagataaacagctagcagtttgcctgaaatatgctggagtatttgcagaaaatgcagaagatgctgatggaaaagatgtatttaataccaaatctgttgggctttctattaaagaggcaatgacttatcaccccaaccaggtagtagaaggctgttgttcagatatggctgttacttttaatggactgactccaaatcagatgcatgtgatgatgtatggggtataccgccttagggcatttgggcatattttcaatgatgcattggttttcttacctccaaatggttctgacaatgactgagaagtggtagaaaagcgtgaatatgatctttgtataggacgtgtgttgtcattatttgtagtagtaactacatatccaatacagctgtatgtttctttttcttttctaatttggtggcactggtataaccacacattaaagtcagtagtacatttttaaatgagggtggtttttttctttaaaacacatgaacattgtaaatgtgttggaaagaagtgttttaagaataataattttgcaaataaactattaataaatattatatgtgataaattctaaattatgaacattagaaatctgtggggcacatatttttgctgattggttaaaaaattttaacaggtctttagcgttctaagatatgcaaatgatatctctagttgtgaatttgtgattaaagtaaaacttttagctgtgtgttccctttacttctaatactgatttatgttctaagcctccccaagttccaatggatttgccttctcaaaatgtacaactaagcaactaaagaaaattaaagtgaaagttgaaaaata

SEQ ID NO: 437862 - DNA, 2751 bp, Homo sapiens
cttcgcggcgctcgtttcctggcgctccccacctttagcgagaccaacgagagaacaccgcctgcagctagaacagcctggtcaggagcgtaacggagtggtgcgccaacgtgagaggaaacccgtgcgcggctgcgctttcctgtccccaagccgttctagacgcgggttggagtgcaatggcgtgatctcggctcatcccaacctccacctcccgagatcgtgccattgcactccagcctgggcaatgaagcaagactccatctcaaaaacaacaacaacaacaacaacaacaaatgtatgagttggatgagtttaattttttgctttctgtttctgcctaaagataaaccaatttagcatatattgatattaagatgtctgccatattttgaatgttagcctgttgatttacagtcttccaaataagactgatgcctgaagctcattttttggttaactgcttctgttagttgcacaccttttcctaccttcctctaatcttaagtctatttagtcatttgaaatatcagttttcacctgttagtattactagctatgtttgctatatttcacaaatacatttctaaaacaatccattaattagaattggacattaatagtgaggcatgtcattctctgtaacaactaagattttaagtagaaattatttcactaattcatcttttatttctcaaagtattcaaggctaaaatttggagttctttaattttcattctaagaggcaagtattaattatactaatgagttcagatgtttttatttatttttcctcccaatgacctattcttaatgaacatggtattattaagagacattccagtgaatcatctcctgtatttttttacatgcataaattatattccctaaggccagactcttaaacagacagatgaacctaatagtctcaacaatgatttaaaaactggccctcaattttcttcattcattcctgatctcgtggagttgtggtcctttacttggttttaacacagtattcaacaaattgttgttatagttgataacatctactcattcttttacctgccttaaaaagtgtaataaaagtattcatacaaagtataaaatacatacaagtataaaaatgtataatacatttaatttacatgcatcttctacaatgacaagtatgatttctttagaaactgatgcatacattttcactgtttttctttcattatatatcagttttaatgcatactacttagaaattagaatcattttgagtttcttgaagagccttgataattatagtctcaaaattaaggaacctagacaaacaaagttaaaatatttatgacattttgcttgggcatacattcatatttccattaatatataattgctacattattaataagtgacatatttattataatgaaacacctccacgaatttagtgaattgtaattcttatctcttcctctgaagtattatacttagaaatacgtatcttcagttactgatttgggtacgacagggaacctggctggatatcattattatttgatatatgccatataaccttctgtttggggaatataaaatccctcaaattggaaatgttcatgactacccatgggataaatccagctgtttttgtttggggtccagagcataaaaacagaaaaggaaaaatgcagcttcccaacagaccactaccaaaccaccataacagacagtctgctagaagagaactgatcaggccattatgtcaccggacaacaggacaatcatctgagttgggatgctgaatcacggcaactccaagacatctgggattttttttttaccctcacattggatacaatctatggaatattactacatttagttcatttgtaatttacaatttttgatgactaaaattggaaaaggattagtacattcctactggctttacatattagtattgggctgtcaccattacccagattatttaaaatgtaaattttctttactcactagattggaagctccttaagagcaagggctacttctgtattattcatcttcatgccacgtcacttagaacctagtagatactcaataaatacctattgagctgaactgaccttgtctgagtaaaagtgagtccaatacacaagttactagattgtaggttggtttgacacaaacttaattttgaaactaaaaatgaactaaagacacactgcctgagagaagcaggctctctatccctgtattcctattctcacgaatataggtaaactaagtttccattaagcacagtatctaaagatgctgacacatctgctagtttaatctctttgaattgcctttcatgtatgacctaatgtttagaaaatgacaaggatcacacatgtagagtgacatccctgattaacagtgatgagcagaggcctcagacccaggggaagcagagaacatacatatttagtccatatcaccaaggcaacacagtgtacctcagcacagtagaaaaacaagcacagatgttgatgttgaatatttaaaaagtgttccttacacccactgtaacagtggttagacacaaagatgaattatttcaaaaaccaagctattaaaagtttttacttctctaatgtatgtatatgtgtgctttgtttttcattgctaatactccataggcagtcttggtcaaaaaacattctcttagcaacaaaaataaaggttcaaagtttgattctgacataaatgacttgt

SEQ ID NO: 437863 - DNA, 1666 bp, Homo sapiens
cttcgcggcgctcgtttcctggcgctccccacctttagcgagaccaacgagagaacaccgcctgcagctagaacagcctggtcaggagcgtaacggagtggtgcgccaacgtgagaggaaacccgtgcgcggctgcgctttcctgtccccaagccgttctagacgcgggaaaaatgctttctgaaagcagctcctttttgaagggtgtgatgcttggaagcattttctgtgctttgatcactatgctaggacacattaggattggtcatggaaatagaatgcaccaccatgagcatcatcacctacaagctcctaacaaagaagatatcttgaaaatttcagaggatgagcgcatggagctcagtaagagctttcgagtatactgtattatccttgtaaaacccaaagatgtgagtctttgggctgcagtaaaggagacttggaccaaacactgtgacaaagcagagttcttcagttctgaaaatgttaaagtgtttgagtcaattaatatggacacaaatgacatgtggttaatgatgagaaaagcttacaaatacgcctttgataagtatagagaccaatacaactggttcttccttgcacgccccactacgtttgctatcattgaaaacctaaagtattttttgttaaaaaaggatccatcacagcctttctatctaggccacactataaaatctggagaccttgaatatgtgggtatggaaggaggaattgtcttaagtgtagaatcaatgaaaagacttaacagccttctcaatatcccagaaaagtgtcctgaacagggagggatgatttggaagatatctgaagataaacagctagcagtttgcctgaaatatgctggagtatttgcagaaaatgcagaagatgctgatggaaaagatgtatttaataccaaatctgttgggctttctattaaagaggcaatgacttatcaccccaaccaggtagtagaaggctgttgttcagatatggctgttacttttaatggactgactccaaatcagatgcatgtgatgatgtatggggtataccgccttagggcatttgggcatattttcaatgatgcattggttttcttacctccaaatggttctgacaatgactgagaagtggtagaaaagcgtgaatatgatctttgtataggacgtgtgttgtcattatttgtagtagtaactacatatccaatacagctgtatgtttctttttcttttctaatttggtggcactggtataaccacacattaaagtcagtagtacatttttaaatgagggtggtttttttctttaaaacacatgaacattgtaaatgtgttggaaagaagtgttttaagaataataattttgcaaataaactattaataaatattatatgtgataaattctaaattatgaacattagaaatctgtggggcacatatttttgctgattggttaaaaaattttaacaggtctttagcgttctaagatatgcaaatgatatctctagttgtgaatttgtgattaaagtaaaacttttagctgtgtgttccctttacttctaatactgatttatgttctaagcctccccaagttccaatggatttgccttctcaaaatgtacaactaagcaactaaagaaaattaaagtgaaagttgaaaaata

SEQ ID NO: 437864 - DNA, 719 bp, Homo sapiens
cttcgcggcgctcgtttcctggcgctccccacctttagcgagaccaacgagagaacaccgcctgcagctagaacagcctggtcaggagcgtaacggagtggtgcgccaacgtgagaggaaacccgtgcgcggctgcgctttcctgtccccaagccgttctagacgcgggaaaaatgctttctgaaagcagctcctttttgaagggtgtgatgcttggaagcattttctgtgctttgatcactatgctaggacacattaggattggtcatggaaatagaatgcaccaccatgagcatcatcacctacaagctcctaacaaagaagatatcttgaaaatttcagaggatgagcgcatggagctcagtaagagctttcgagtatactgtattatccttgtaaaacccaaagatgtgagtctttgggctgcagtaaaggagacttggaccaaacactgtgacaaagcagagttcttcagttctgaaaatgttaaagtgtttgagtcaattattcgttgtcccataagttgagtaagcttatatacaccttttattaagagtttgtaaattctagcgtagtctacacagatttgtatatcaatttgtttatattgtttatgtaatgttatttctggaagtgtgaaaatgttaatgttcacaagcgacattaatataaatatacacgaattgatataaaaactgtgtagcaggatgaccaggggt

SEQ ID NO: 437865 - DNA, 1329 bp, Homo sapiens
cctcacttgtgttgctgtcagtgccagtagggcaggcaggaatgcagcagagaggactcgccatcgtggccttggctgtctgtgcggccctacatgcctcagaagccatacttcccattgcctccagctgttgcacggaggtttcacatcatatttccagaaggctcctggaaagagtgaatatgtgtcgcatccagagagctgatggggattgtgacttggctgctgtcatccttcatgtcaagcgcagaagaatctgtgtcagcccgcacaaccatactgttaagcagtggatgaaagtgcaagctgccaagaaaaatggtaaaggaaatgtttgccacaggaagaaacaccatggcaagaggaacagtaacagggcacatcaggggaaacacgaaacatacggccataaaactccttattagagagtctacagataaatctacagagacaattcctcaagtggacttggccatgattggttagtctcactctatcacacaggctggagggcagtggcaggatctcagttcaccccaacctttgcctcacgggttcaagggattctcgtgcctcagccttccaagtagctgggattacaggtgtgcgccagtacgcctggctagttttagtattttttgttacagacggggtttcaccatgttggctgggctggtctcgaacttctgatctcaagtgatccatctgccttggcctcccaaagtgctgggattacaggcatgagccactgcacctggcctacgtattaggctttatgtaagatgtacatagtactccatactcctttccttttcctcctattgaaactgttcctataaactttataaaattaatcagagaagaagagagggtgagaaacataaataatccaagcttgcaccacattcagcattaatcactaggtcactttgcttgctgaccccttcctcatagttgtttggctattgcttcagaattatgtggagtctgttacaagattatagttccccttaactgctctatagataacagcttgaacattatgaaatgctaagttttcccttcgagacattctttcaggtcctgcatactgatgaaactactgatgtcagctggtctgaaggaccctaccagaagctaaatcatcaaagaatgcaatttccatatcctaatgattcaatctcccttaccctgaccaatcagtggcccaaattttccagccccttgcctcccagaaccccagcccagaactcttcagagatttaagaatctcctcctacctcctgactcagcaccatgtaatcattaaactctctgctgcaaactctg

SEQ ID NO: 437866 - DNA, 528 bp, Homo sapiens
atagaggatccccaaacgcaggagaggatgatatattttaaaactgatttttctgcacgcaaataattgaacttgtctgaagatagtgtgcctgggaaaccagattttttttatttttatttttatttttatttttttgagatggagtcttgctctgtcaccaggctggagttgcagtgagcagcctgggtgacagaatgagaccctgtctctaaaaataataataataatgatagtgtatatcttcatataatattttaagaggagcatatagatataacttctcccaactttttaattatagttttccaaacttacagagaagttaaaagaatggtacaatgaacatctatatatctttcaccacaatattaatcattgttaatattgtgtcacatttgctttctctctcctctctttgtatgtgtttctatataaaatattataacttttaaaatatatcttgttttgctaaaccatttgaaaataagttgcaaaaatcatgacacttcacccctagtttctttt

SEQ ID NO: 437867 - DNA, 1204 bp, Homo sapiens
cctcacttgtgttgctgtcagtgccagtagggcaggcaggaatgcagcagagaggactcgccatcgtggccttggctgtctgtgcggccctacatgcctcagaagccatacttcccattgcctccagctgttgcacggaggtttcacatcatatttccagaaggctcctggaaagagtgaatatgtgtcgcatccagagagctgatggggattgtgacttggctgctgtcatccttcatgtcaagcgcagaagaatctgtgtcagcccgcacaaccatactgttaagcagtggatgaaagtgcaagctgccaagaaaaatggtaaaggaaatgtttgccacaggaagaaacaccatggcaagaggaacagtaacagggcacatcaggggaaacacgaaacatacggccataaaactccttattagagagtctacagataaatctacagagacaattcctcaagtggacttggccatgattggttgtaagtttatcatctgaattctccttattgtagacaacagaacaaaacaaaatattggtttttaaacaaatgaacaattgtgcggtatgcaaatgtagccaataatatactcaactggaaaatgaaatgaccagataatactggctgggtatggtggttcacaccttttatcccagcacttcgggaggctgaggcaggaggatcacttgagaccaggagtttgagaccagcctgggcaacatagcaagacctcatttctacaaacaaaaaaaaaattggcccggcatggtagtacttgcctataatcccagccacatgggaggctgaggtgggaggatcacttgagtctgggagagtttgaggttgcagtgagcagcctgggtgacagaatgagaccctgtctctaaaaataataataataatgatagtgtatatcttcatataatattttaagaggagcatatagatataacttctcccaactttttaattatagttttccaaacttacagagaagttaaaagaatggtacaatgaacatctatatatctttcaccacaatattaatcattgttaatattgtgtcacatttgctttctctctcctctctttgtatgtgtttctatataaaatattataacttttaaaatatatcttgttttgctaaaccatttgaaaataagttgcaaaaatcatgacacttcacccctagtttctttt

SEQ ID NO: 437868 - DNA, 1218 bp, Homo sapiens
ggactccaccctacctacccttcgcgtagtacttgttatactttggcagcttcttcacgtcggtcctctccgcgcgcgggtaggaaccgtccacggccttaaagaagcctcctcaccagccatacttcccattgcctccagctgttgcacggaggtttcacatcatatttccagaaggctcctggaaagagtgaatatgtgtcgcatccagagagctgatggggattgtgacttggctgctgtcatccttcatgtcaagcgcagaagaatctgtgtcagcccgcacaaccatactgttaagcagtggatgaaagtgcaagctgccaagaaaaatggtaaaggaaatgtttgccacaggaagaaacaccatggcaagaggaacagtaacagggcacatcaggggaaacacgaaacatacggccataaaactccttattagagagtctacagataaatctacagagacaattcctcaagtggacttggccatgattggttgtaagtttatcatctgaattctccttattgtagacaacagaacaaaacaaaatattggtttttaaacaaatgaacaattgtgcggtatgcaaatgtagccaataatatactcaactggaaaatgaaatgaccagataatactggctgggtatggtggttcacaccttttatcccagcacttcgggaggctgaggcaggaggatcacttgagaccaggagtttgagaccagcctgggcaacatagcaagacctcatttctacaaacaaaaaaaaaattggcccggcatggtagtacttgcctataatcccagccacatgggaggctgaggtgggaggatcacttgagtctgggagagtttgaggttgcagtgagcagcctgggtgacagaatgagaccctgtctctaaaaataataataataatgatagtgtatatcttcatataatattttaagaggagcatatagatataacttctcccaactttttaattatagttttccaaacttacagagaagttaaaagaatggtacaatgaacatctatatatctttcaccacaatattaatcattgttaatattgtgtcacatttgctttctctctcctctctttgtatgtgtttctatataaaatattataacttttaaaatatatcttgttttgctaaaccatttgaaaataagttgcaaaaatcatgacacttcacccctagtttctttt

SEQ ID NO: 437869 - DNA, 1055 bp, Homo sapiens
tgtgatttcaaatgaaacgcttaaagtatcatttctttgcttatctcttcccttctttctcctcatcccagtgcttgatgtttcattacaattatttttctttatctctgtaactttcaataatatacttgtcttccatttattagtctttttaaaataactttttcttttttctttctttctttctttttttttttttttttgatacagagtctcactctatcacacaggctggagggcagtggcaggatctcagttcaccccaacctttgcctcacgggttcaagggattctcgtgcctcagccttccaagtagctgggattacaggtgtgcgccagtacgcctggctagttttagtattttttgttacagacggggtttcaccatgttggctgggctggtctcgaacttctgatctcaagtgatccatctgccttggcctcccaaagtgctgggattacaggcatgagccactgcacctggcctacgtattaggctttatgtaagatgtacatagtactccatactcctttccttttcctcctattgaaactgttcctataaactttataaaattaatcagagaagaagagagggtgagaaacataaataatccaagcttgcaccacattcagcattaatcactaggtcactttgcttgctgaccccttcctcatagttgtttggctattgcttcagaattatgtggagtctgttacaagattatagttccccttaactgctctatagataacagcttgaacattatgaaatgctaagttttcccttcgagacattctttcaggtcctgcatactgatgaaactactgatgtcagctggtctgaaggaccctaccagaagctaaatcatcaaagaatgcaatttccatatcctaatgattcaatctcccttaccctgaccaatcagtggcccaaattttccagccccttgcctcccagaaccccagcccagaactcttcagagatttaagaatctcctcctacctcctgactcagcaccatgtaatcattaaactctctgctgcaaactctg

SEQ ID NO: 437870 - DNA, 879 bp, Homo sapiens
cccaggctccctggagtaaattcatagtctctctgtccaaagatgtcctgagccccataccagcacaccatctacttccaccctgtagtgctgtggttaggactaaattcccccagtcaccaaaaagtgttcatgactttcccaagcaaaacaaaaccccaaacaaaagataactctgttatatttcatggcttttaaccttttttagtatatgggttgctgtcatttctactttatgaattcatcaggagcatattataaagttcaaaaagttaggtgggattacaggcatgagccactgcacctggcctacgtattaggctttatgtaagatgtacatagtactccatactcctttccttttcctcctattgaaactgttcctataaactttataaaattaatcagagaagaagagagggtgagaaacataaataatccaagcttgcaccacattcagcattaatcactaggtcactttgcttgctgaccccttcctcatagttgtttggctattgcttcagaattatgtggagtctgttacaagattatagttccccttaactgctctatagataacagcttgaacattatgaaatgctaagttttcccttcgagacattctttcaggtcctgcatactgatgaaactactgatgtcagctggtctgaaggaccctaccagaagctaaatcatcaaagaatgcaatttccatatcctaatgattcaatctcccttaccctgaccaatcagtggcccaaattttccagccccttgcctcccagaaccccagcccagaactcttcagagatttaagaatctcctcctacctcctgactcagcaccatgtaatcattaaactctctgctgcaaactctg

SEQ ID NO: 437871 - DNA, 733 bp, Homo sapiens
cctcacttgtgttgctgtcagtgccagtagggcaggcaggaatgcagcagagaggactcgccatcgtggccttggctgtctgtgcggccctacatgcctcagaagccatacttcccattgcctccagctgttgcacggaggtttcacatcatatttccagaaggctcctggaaagagtgaatatgtgtcgcatccagagagctgatggggattgtgacttggctgctgtcatccttcatgtcaagcgcagaagaatctgtgtcagcccgcacaaccatactgttaagcagtggatgaaagtgcaagctgccaagaaaaatggtaaaggaaatgtttgccacaggaagaaacaccatggcaagaggaacagtaacagggcacatcaggggaaacacgaaacatacggccataaaactccttattagagagtctacagataaatctacagagacaattcctcaagtggacttggccatgattggttgtcctgcatactgatgaaactactgatgtcagctggtctgaaggaccctaccagaagctaaatcatcaaagaatgcaatttccatatcctaatgattcaatctcccttaccctgaccaatcagtggcccaaattttccagccccttgcctcccagaaccccagcccagaactcttcagagatttaagaatctcctcctacctcctgactcagcaccatgtaatcattaaactctctgctgcaaactctg

SEQ ID NO: 437872 - DNA, 951 bp, Homo sapiens
  misc_feature (16)..(16): n is a, c, g, or t
aatatatggctaggtngaggctgggttcgctccgtaaggcaagagaacccactaggggatgagcccgaactagggatgtgacagagcgcgagacccagcctaaagagagcccggagccagcgtgggaggccgctgccgtcgcgcgccttggtcgtgctgcggttgtcccattggggacttggcggcgactgtccctgtgctggtttgcagtgtgtgggttcattcacctggtgatcgagggctggttcgttctctactacgaagacctgcttggagaccaagccttcttatctcaactctggaaagagtatgccaagggagacagccgatacatcctgggtgacaacttcacagtgtgcatggaaaccatcacagcttgcctgtggggaccactcagcctgtgggtggtgatcgcctttctccgccagcatcccctccgcttcattctacagcttgtggtctctgtgggccagatctatggggatgtgctctacttcctgacagagcaccgcgacggattccagcacggagagctgggccaccctctctacttctggttttactttgtcttcatgaatgccctgtggctggtgctgcctggagtccttgtgcttgatgctgtgaagcacctcactcatgcccagagcacgctggatgccaaggccacaaaagccaagagcaagaagaactgaggagtggtggaccaggctcgaacactggccgaggaggagctctctgcctgccagaagagtctagtcctgctcccacagtttggagggacaaagctaattgatctgtcacactcaggctcatgggcaggcacaagaaggggaataaaggggctgtgtgaaggcactgctgggagccattagaacacagatacaagagaagccaggaggtctatgatggtgacgatttttaaaatcaggaaataaaagatcttgactctaa

SEQ ID NO: 437873 - DNA, 1913 bp, Homo sapiens
ctatttatccttaggactgagggttgtgggttctaattggatgggaggtctgggatgggtctggattctgattgattgctccatctgggggcccactggtggttaggcgtttgattggctttttagaactggcatatggagattgagggtcttcatgccaattggtcagtaggactgagaggcctgggttctaactagttcttctgacttgaggtcgggagaagagagaatgaccgctgctattaggactgaggagttctgagcactgaagagctggggagggggtggttgcagtgtatagcgtgtgatctgcttgtaacagtttcgttgcattatactaagggttactctacctagaaaagggcggaggtgaaaggatgcaacgcaacgctaatttcaccagcggaagaagcgggtacagaccttaatgagtccccgttttgatcgactgataagggaatggggaaattgaagccaggactcgatgcagattggctacggatccaaaacgcccactaaccttggcgcgtcccagtctccaccccaaacctaactcaggtgaaaatggcgccacgcgcgggggcggggctagaggtacaaagagagtgtctattggttgggagcggcacgggccgccttcttcgcttcaccattggctcgctccgtaaggcaagagaacccactaggggatgagcccgaactagggatgtgacagagcgcgagacccagcctaaagagagcccggagccagcgtgggaggccgctgccgtcgcgcgccttgcgctgcacgccagacaccggcctttcaatatccgtctcttccctgcaggttgacggcgttgcacgctctcgcggggaggctctggctttccaaacgctggcaccgagggtttttctgttcctttttttttttttttttaacttcctgcctatacacacgcagccatcagcccacaaagacatgactaccaacgcgggccccttgcacccatactggcctcagcacctaagactggacaactttgtacctaatgaccgccccacctggcatatactggctggcctcttctctgtcacaggggtcttagtcgtgaccacatggctgttgtcaggtcgtgctgcggttgtcccattggggacttggcggcgactgtccctgtgctggtttgcagtgtgtgggttcattcacctggtgatcgagggctggttcgttctctactacgaagacctgcttggagaccaagccttcttatctcaactctggaaagagtatgccaagggagacagccgatacatcctgggtgacaacttcacagtgtgcatggaaaccatcacagcttgcctgtggggaccactcagcctgtgggtggtgatcgcctttctccgccagcatcccctccgcttcattctacagcttgtggtctctgtgggccagatctatggggatgtgctctacttcctgacagagcaccgcgacggattccagcacggagagctgggccaccctctctacttctggttttactttgtcttcatgaatgccctgtggctggtgctgcctggagtccttgtgcttgatgctgtgaagcacctcactcatgcccagagcacgctggatgccaaggccacaaaagccaagagcaagaagaactgaggagtggtggaccaggctcgaacactggccgaggaggagctctctgcctgccagaagagtctagtcctgctcccacagtttggagggacaaagctaattgatctgtcacactcaggctcatgggcaggcacaagaaggggaataaaggggctgtgtgaaggcactgctgggagccattagaacacagatacaagagaagccaggaggtctatgatggtgacgatttttaaaatcaggaaataaaagatcttgactctaa

SEQ ID NO: 437874 - DNA, 1751 bp, Homo sapiens
ctatttatccttaggactgagggttgtgggttctaattggatgggaggtctgggatgggtctggattctgattgattgctccatctgggggcccactggtggttaggcgtttgattggctttttagaactggcatatggagattgagggtcttcatgccaattggtcagtaggactgagaggcctgggttctaactagttcttctgacttgaggtcgggagaagagagaatgaccgctgctattaggactgaggagttctgagcactgaagagctggggagggggtggttgcagtgtatagcgtgtgatctgcttgtaacagtttcgttgcattatactaagggttactctacctagaaaagggcggaggtgaaaggatgcaacgcaacgctaatttcaccagcggaagaagcgggtacagaccttaatgagtccccgttttgatcgactgataagggaatggggaaattgaagccaggactcgatgcagattggctacggatccaaaacgcccactaaccttggcgcgtcccagtctccaccccaaacctaactcaggtgaaaatggcgccacgcgcgggggcggggctagaggtacaaagagagtgtctattggttgggagcggcacgggccgccttcttcgcttcaccattggctcgctccgtaaggcaagagaacccactaggggatgagcccgaactagggatgtgacagagcgcgagacccagcctaaagagagcccggagccagcgtgggaggccgctgccgtcgcgcgccttgccatcagcccacaaagacatgactaccaacgcgggccccttgcacccatactggcctcagcacctaagactggacaactttgtacctaatgaccgccccacctggcatatactggctggcctcttctctgtcacaggggtcttagtcgtgaccacatggctgttgtcaggtcgtgctgcggttgtcccattggggacttggcggcgactgtccctgtgctggtttgcagtgtgtgggttcattcacctggtgatcgagggctggttcgttctctactacgaagacctgcttggagaccaagccttcttatctcaactctggaaagagtatgccaagggagacagccgatacatcctgggtgacaacttcacagtgtgcatggaaaccatcacagcttgcctgtggggaccactcagcctgtgggtggtgatcgcctttctccgccagcatcccctccgcttcattctacagcttgtggtctctgtgggccagatctatggggatgtgctctacttcctgacagagcaccgcgacggattccagcacggagagctgggccaccctctctacttctggttttactttgtcttcatgaatgccctgtggctggtgctgcctggagtccttgtgcttgatgctgtgaagcacctcactcatgcccagagcacgctggatgccaaggccacaaaagccaagagcaagaagaactgaggagtggtggaccaggctcgaacactggccgaggaggagctctctgcctgccagaagagtctagtcctgctcccacagtttggagggacaaagctaattgatctgtcacactcaggctcatgggcaggcacaagaaggggaataaaggggctgtgtgaaggcactgctgggagccattagaacacagatacaagagaagccaggaggtctatgatggtgacgatttttaaaatcaggaaataaaagatcttgactctaa

SEQ ID NO: 437875 - DNA, 708 bp, Homo sapiens
actactactaaatttgcgccccgtcgactggagaccaagccttcttatctcaactctggaaagagtatgccaagggagacagccgatacatcctgggtgacaacttcacagtgtgcatggaaaccatcacagcttgcctgtggggaccactcagcctgtgggtggtgatcgcctttctccgccagcatcccctccgcttcattctacagcttgtggtctctgtgggccagatctatggggatgtgctctacttcctgacagagcaccgcgacggattccagcacggagagctgggccaccctctctacttctggttttactttgtcttcatgaatgccctgtggctggtgctgcctggagtccttgtgcttgatgctgtgaagcacctcactcatgcccagagcacgctggatgccaaggccacaaaagccaagagcaagaagaactgaggagtggtggaccaggctcgaacactggccgaggaggagctctctgcctgccagaagagtctagtcctgctcccacagtttggagggacaaagctaattgatctgtcacactcaggctcatgggcaggcacaagaaggggaataaaggggctgtgtgaaggcactgctgggagccattagaacacagatacaagagaagccaggaggtctatgatggtgacgatttttaaaatcaggaaataaaagatcttgactctaa

SEQ ID NO: 437876 - DNA, 1322 bp, Homo sapiens
ctatttatccttaggactgagggttgtgggttctaattggatgggaggtctgggatgggtctggattctgattgattgctccatctgggggcccactggtggttaggcgtttgattggctttttagaactggcatatggagattgagggtcttcatgccaattggtcagtaggactgagaggcctgggttctaactagttcttctgacttgaggtcgggagaagagagaatgaccgctgctattaggactgaggagttctgagcactgaagagctggggagggggtggttgcagtgtatagcgtgtgatctgcttgtaacagtttcgttgcattatactaagggttactctacctagaaaagggcggaggtgaaaggatgcaacgcaacgctaatttcaccagcggaagaagcgggtacagaccttaatgagtccccgttttgatcgactgataagggaatggggaaattgaagccaggactcgatgcagattggctacggatccaaaacgcccactaaccttggcgcgtcccagtctccaccccaaacctaactcaggtgaaaatggcgccacgcgcgggggcggggctagaggtacaaagagagtgtctattggttgggagcggcacgggccgccttcttcgcttcaccattggctcgctccgtaaggcaagagaacccactaggggatgagcccgaactagggatgtgacagagcgcgagacccagcctaaagagagcccggagccagcgtgggaggccgctgccgtcgcgcgccttggtttttctgttcctttttttttttttttttaacttcctgcctatacacacgcagccatcagcccacaaagacatgactaccaacgcgggccccttgcacccatactggcctcagcacggagagctgggccaccctctctacttctggttttactttgtcttcatgaatgccctgtggctggtgctgcctggagtccttgtgcttgatgctgtgaagcacctcactcatgcccagagcacgctggatgccaaggccacaaaagccaagagcaagaagaactgaggagtggtggaccaggctcgaacactggccgaggaggagctctctgcctgccagaagagtctagtcctgctcccacagtttggagggacaaagctaattgatctgtcacactcaggctcatgggcaggcacaagaaggggaataaaggggctgtgtgaaggcactgctgggagccattagaacacagatacaagagaagccaggaggtctatgatggtgacgatttttaaaatcaggaaataaaagatcttgactctaa

SEQ ID NO: 437877 - DNA, 1351 bp, Homo sapiens
ctatttatccttaggactgagggttgtgggttctaattggatgggaggtctgggatgggtctggattctgattgattgctccatctgggggcccactggtggttaggcgtttgattggctttttagaactggcatatggagattgagggtcttcatgccaattggtcagtaggactgagaggcctgggttctaactagttcttctgacttgaggtcgggagaagagagaatgaccgctgctattaggactgaggagttctgagcactgaagagctggggagggggtggttgcagtgtatagcgtgtgatctgcttgtaacagtttcgttgcattatactaagggttactctacctagaaaagggcggaggtgaaaggatgcaacgcaacgctaatttcaccagcggaagaagcgggtacagaccttaatgagtccccgttttgatcgactgataagggaatggggaaattgaagccaggactcgatgcagattggctacggatccaaaacgcccactaaccttggcgcgtcccagtctccaccccaaacctaactcaggtgaaaatggcgccacgcgcgggggcggggctagaggtacaaagagagtgtctattggttgggagcggcacgggccgccttcttcgcttcaccattggctcgctccgtaaggcaagagaacccactaggggatgagcccgaactagggatgtgacagagcgcgagacccagcctaaagagagcccggagccagcgtgggaggccgctgccgtcgcgcgccttgcgctgcacgccagacaccggcctttcaatatccgtctcttccctgcaggttgacggcgttgcacgctctcgcggggaggctctggctttccaaacgctggcaccgagggttgtagttctgattcgttttctttcctctgtcccccagttgcagttttcaggactacgtgggggagggaatagctttttgttgaacggtttaagacgctgacctgtgcaactggaccacgcctggttcctgtgtctcttaccaaaccgtgaccccggagcacaggactgggtttggtggtcgtgagcagtttgtgacccttgaaggaagacaccaggcctggtcctgtatctccctcgccagactgtgaccagggagggctgggatcaggtgttgttcccatgtgcctcccaccagactttgacccccgagggctgagaccgggactgtttctaccacatcataatatggcttctaaagggctggaacaagctttcagcctttctgtggccttgtgtttcagtcatgttctttttcttttcttttttattttattttgtgacagagcaagactccgtctga

SEQ ID NO: 437878 - DNA, 457 bp, Homo sapiens
gttctgattcgttttctttcctctgtcccccagttgcagttttcaggactacgtgggggagggaatagctttttgttgaacggtttaagacgctgacctgtgcaactggaccacgcctggttcctgtgtctcttaccaaaccgtgaccccggagcacaggactgggtttggtggtcgtgagcagtttgtgacccttgaaggaagacaccaggcctggtcctgtatctccctcgccagactgtgaccagggagggctgggatcaggtgttgttcccatgtgcctcccaccagactttgacccccgagggctgagaccgggactgtttctaccacatcataatatggcttctaaagggctggaacaagctttcagcctttctgtggccttgtgtttcagtcatgttctttttcttttcttttttattttattttgtgacagagcaagactccgtctgac

SEQ ID NO: 437879 - DNA, 1805 bp, Homo sapiens
ctatttatccttaggactgagggttgtgggttctaattggatgggaggtctgggatgggtctggattctgattgattgctccatctgggggcccactggtggttaggcgtttgattggctttttagaactggcatatggagattgagggtcttcatgccaattggtcagtaggactgagaggcctgggttctaactagttcttctgacttgaggtcgggagaagagagaatgaccgctgctattaggactgaggagttctgagcactgaagagctggggagggggtggttgcagtgtatagcgtgtgatctgcttgtaacagtttcgttgcattatactaagggttactctacctagaaaagggcggaggtgaaaggatgcaacgcaacgctaatttcaccagcggaagaagcgggtacagaccttaatgagtccccgttttgatcgactgataagggaatggggaaattgaagccaggactcgatgcagattggctacggatccaaaacgcccactaaccttggcgcgtcccagtctccaccccaaacctaactcaggtgaaaatggcgccacgcgcgggggcggggctagaggtacaaagagagtgtctattggttgggagcggcacgggccgccttcttcgcttcaccattggctcgctccgtaaggcaagagaacccactaggggatgagcccgaactagggatgtgacagagcgcgagacccagcctaaagagagcccggagccagcgtgggaggccgctgccgtcgcgcgccttggtttttctgttcctttttttttttttttttaacttcctgcctatacacacgcagccatcagcccacaaagacatgactaccaacgcgggccccttgcacccatactggcctcagcacctaagactggacaactttgtacctaatgaccgccccacctggcatatactggctggcctcttctctgtcacaggggtcttagtcgtgaccacatggctgttgtcaggtcgtgctgcggttgtcccattggggacttggcggcgactgtccctgtgctggtttgcagtgtgtgggttcattcacctggtgatcgagggctggttcgttctctactacgaagacctgcttggagaccaagccttcttatctcaactctggaaagagtatgccaagggagacagccgatacatcctgggtgacaacttcacagtgtgcatggaaaccatcacagcttgcctgtggggaccactcagcctgtgggtggtgatcgcctttctccgccagcatcccctccgcttcattctacagcttgtggtctctgtgggccagatctatggggatgtgctctacttcctgacagagcaccgcgacggattccagcacggagagctgggccaccctctctacttctggttttactttgtcttcatgaatgccctgtggctggtgctgcctggagtccttgtgcttgatgctgtgaagcacctcactcatgcccagagcacgctggatgccaaggccacaaaagccaagagcaagaagaactgaggagtggtggaccaggctcgaacactggccgaggaggagctctctgcctgccagaagagtctagtcctgctcccacagtttggagggacaaagctaattgatctgtcacactcaggctcatgggcaggcacaagaaggggaataaaggggctgtgtgaaggcactgctgggagccattagaacacagatacaagagaagccaggaggtctatgatggtgacgatttttaaaatcaggaaataaaagatcttgactctaa

SEQ ID NO: 437880 - DNA, 2030 bp, Homo sapiens
ctatttatccttaggactgagggttgtgggttctaattggatgggaggtctgggatgggtctggattctgattgattgctccatctgggggcccactggtggttaggcgtttgattggctttttagaactggcatatggagattgagggtcttcatgccaattggtcagtaggactgagaggcctgggttctaactagttcttctgacttgaggtcgggagaagagagaatgaccgctgctattaggactgaggagttctgagcactgaagagctggggagggggtggttgcagtgtatagcgtgtgatctgcttgtaacagtttcgttgcattatactaagggttactctacctagaaaagggcggaggtgaaaggatgcaacgcaacgctaatttcaccagcggaagaagcgggtacagaccttaatgagtccccgttttgatcgactgataagggaatggggaaattgaagccaggactcgatgcagattggctacggatccaaaacgcccactaaccttggcgcgtcccagtctccaccccaaacctaactcaggtgaaaatggcgccacgcgcgggggcggggctagaggtacaaagagagtgtctattggttgggagcggcacgggccgccttcttcgcttcaccattggctcgctccgtaaggcaagagaacccactaggggatgagcccgaactagggatgtgacagagcgcgagacccagcctaaagagagcccggagccagcgtgggaggccgctgccgtcgcgcgccttggtttttctgttcctttttttttttttttttaacttcctgcctatacacacgcagccatcagcccacaaagacatgactaccaacgcgggccccttgcacccatactggcctcagcacctaagactggacaactttgtacctaatgaccgccccacctggcatatactggctggcctcttctctgtcacaggggtcttagtcgtgaccacatggctgttgtcaggtcgtgctgcggttgtcccattggggacttggcggcgactgtccctgtgctggtttgcagtgtgtgggttcattcacctggtgatcgagggctggttcgttctctactacgaagacctgcttggagaccaagccttcttatctcaactctggaaagagtatgccaagggagacagccgatacatcctgggtgacaacttcacagtgtgcatggaaaccatcacagcttgcctgtggggaccactcagcctgtgggtggtgatcgcctttctccgccagcatcccctccgcttcattctacagcttgtggtctctgtgggccagatctatggggatgtgctctacttcctgacagagcaccgcgacggattccagcacggagagctgggccaccctctctacttctggttttactttgtcttcatgaatgccctgtggctggtgctgcctggagtccttgtgcttgatgctgtgaagcacctcactcatgcccagagcacgctggatgccaaggccacaaaagccaagagcaagaagaactgaggagtggtggaccaggctcgaacactggccgaggaggagctctctgcctgccagaagagtctagtcctgctcccacagtttggagggacaaagctaattgatctgtcacactcaggctcatgggcaggcacaagaaggggaataaaggggctgtgtgaaggcactgctgggagccattagaacacagatacaagagaagccaggaggtctatgatggtgacgatttttaaaatcaggaaataaaagatcttgactctaaaaaaaaaaaaaaaaaaaaaaaaaaattggggggattataatgacggggtgcgggaaaacaagcgggtaactgaaagtgggcaacagggtcaataggctggtatccgtggacacaaagttttcttgggaacaaagggggtaagactttggccggagtatcccctaatatggggagcgacggaataaattccggataaggccagggttacccgtgggttaaatacga

SEQ ID NO: 437881 - DNA, 298 bp, Homo sapiens
ccgctgccgtcgcgcgccttggtgagtgccctccacccggcccctgctccctcccccagctctccccggctacgcggccagccctcggcgtgccagcgcgagaccctttgccacccgccccccccaccgcccttttgcgcctgcgcgagacccccagctaccgcacggttgtccagaggacagaagatccgtcttctcattgggcagcgggactggagggttctggttcggattgaccggctttgtgttccgttctagcgctgcacgccagacaccggcctttcaatatccgtctctt

SEQ ID NO: 437882 - DNA, 729 bp, Homo sapiens
gcgtgcgaggcgattggtttggggccagagtgggcgaggcgcggaggtctggcctataaagtagtcgcggagacggggtgctggtttgcgtcgtagtctcctgcagcgtctggggtttccgttgcagtcctcggaaccaggacctcggcgtggcctagcgagttatggcgacgaaggccgtgtgcgtgctgaagggcgacggcccagtgcagggcatcatcaatttcgagcagaaggaaagtaatggaccagtgaaggtgtggggaagcattaaaggactgactgaaggcctgcatggattccatgttcatgagtttggagataatacagcaggctgtaccagtgcaggtcctcactttaatcctctatccagaaaacacggtgggccaaaggatgaagagaggcatgttggagacttgggcaatgtgactgctgacaaagatggtgtggccgatgtgtctattgaagattctgtgatctcactctcaggagaccattgcatcattggccgcacactggtggtccatgaaaaagcagatgacttgggcaaaggtggaaatgaagaaagtacaaagacaggaaacgctggaagtcgtttggcttgtggtgtaattgggatcgcccaataaacattcccttggatgtagtctgaggccccttaactcatctgttatcctgctagctgtagaaatgtatcctgataaacattaaacactgtaatcttaaaag

SEQ ID NO: 437883 - DNA, 1006 bp, Homo sapiens
gcgtgcgaggcgattggtttggggccagagtgggcgaggcgcggaggtctggcctataaagtagtcgcggagacggggtgctggtttgcgtcgtagtctcctgcagcgtctggggtttccgttgcagtcctcggaaccaggacctcggcgtggcctagcgagttatggcgacgaaggccgtgtgcgtgctgaagggcgacggcccagtgcagggcatcatcaatttcgagcagaaggaaagtaatggaccagtgaaggtgtggggaagcattaaaggactgactgaaggcctgcatggattccatgttcatgagtttggagataatacagcaggctgtaccagtgcaggtcctcactttaatcctctatccagaaaacacggtgggccaaaggatgaagagaggcatgttggagacttgggcaatgtgactgctgacaaagatggtgtggccgatgtgtctattgaagattctgtgatctcactctcaggagaccattgcatcattggccgcacactggtggtccatgaaaaagcagatgacttgggcaaaggtggaaatgaagaaagtacaaagacaggaaacgctggaagtcgtttggcttgtggtgtaattgggatcgcccaataaacattcccttggatgtagtctgaggccccttaactcatctgttatcctgctagctgtagaaatgtatcctgataaacattaaacactgtaatcttaaaagtgtaattgtgtgactttttcagagttgctttaaagtacctgtagtgagaaactgatttatgatcacttggaagatttgtatagttttataaaactcagttaaaatgtctgtttcaatgacctgtattttgccagacttaaatcacagatgggtattaaacttgtcagaatttctttgtcattcaagcctgtgaataaaaaccctgtatggcacttattatgaggctattaaaagaatccaaattcaaactaaaaaaaaaaaaacttctccagggctg

SEQ ID NO: 437884 - DNA, 639 bp, Homo sapiens
aatttcgatttcaggggcggggttcgattttacttactggcctcggctccaataccaaggtggcctagcgagttatggcgacgaaggccgtgtgcgtgctgaagggcgacggcccagtgcagggcatcatcaatttcgagcagaaggaaagtaatggaccagtgaaggtgtggggaagcattaaaggactgactgaaggcctgcatggattccatgttcatgagtttggagataatacagcaggctgtaccagtgcaggtcctcactttaatcctctatccagaaaacacggtgggccaaaggatgaagagaggcatgttggagacttgggcaatgtgactgctgacaaagatggtgtggccgatgtgtctattgaagattctgtgatctcactctcaggagaccattgcatcattggccgcacactggtggtccatgaaaaagcagatgacttgggcaaaggtggaaatgaagaaagtacaaagacaggaaacgctggaagtcgtttggcttgtggtgtaattgggatcgcccaataaacattcccttggatgtagtctgaggccccttaactcatctgttatcctgctagctgtagaaatgtatcctgataaacattaaacactgtaatcttaaaag

SEQ ID NO: 437885 - DNA, 632 bp, Homo sapiens
gcgtgcgaggcgattggtttggggccagagtgggcgaggcgcggaggtctggcctataaagtagtcgcggagacggggtgctggtttgcgtcgtagtctcctgcagcgtctggggtttccgttgcagtcctcggaaccaggacctcggcgtggcctagcgagttatggcgacgaaggccgtgtgcgtgctgaagggcgacggcccagtgcagggcatcatcaatttcgagcagaaggctgtaccagtgcaggtcctcactttaatcctctatccagaaaacacggtgggccaaaggatgaagagaggcatgttggagacttgggcaatgtgactgctgacaaagatggtgtggccgatgtgtctattgaagattctgtgatctcactctcaggagaccattgcatcattggccgcacactggtggtccatgaaaaagcagatgacttgggcaaaggtggaaatgaagaaagtacaaagacaggaaacgctggaagtcgtttggcttgtggtgtaattgggatcgcccaataaacattcccttggatgtagtctgaggccccttaactcatctgttatcctgctagctgtagaaatgtatcctgataaacattaaacactgtaatcttaaaag

SEQ ID NO: 437886 - DNA, 509 bp, Homo sapiens
gcgtgcgaggcgattggtttggggccagagtgggcgaggcgcggaggtctggcctataaagtagtcgcggagacggggtgctggtttgcgtcgtagtctcctgcagcgtctggggtttccgttgcagtcctcggaaccaggacctcggcgtggcctagcgagttatggcgacgaaggccgtgtgcgtgctgaagggcgacggcccagtgcagggcatcatcaatttcgagcagaaggaaagtaatggaccagtgaaggtgtggggaagcattaaaggactgactgaaggcctgcatggattccatgttcatgagtttggagataatacagcaggctgtaccagtgcaggtcctcactttaatcctctatccagaaaacacggtgggccaaaggatgaagagagtgttgtgaacattttcattattcttccttcaaacaaggtgggggccgcccggtttttttaaaagaatttgctgtaacctccctggaacaatacttttttttggccg

SEQ ID NO: 437887 - DNA, 913 bp, Homo sapiens
gcgtgcgaggcgattggtttggggccagagtgggcgaggcgcggaggtctggcctataaagtagtcgcggagacggggtgctggtttgcgtcgtagtctcctgcagcgtctggggtttccgttgcagtcctcggaaccaggacctcggcgtggcctagcgagttatggcgacgaaggccgtgtgcgtgctgaagggcgacggcccagtgcagggcatcatcaatttcgagcagaaggcaagggctgggacggaggcttgtttgcgaggccgctcccacccgctcgtccccccgcgcacctttgctaggagcgggtcgcccgccaggcctcggggccgccctggtccagcgcccggtcccggcccgtgccgcccggtcggtgccttcgcccccagcggtgcggtgcccaagtgctgagtcaccgggcgggcccgggcgcggggcgtgggaccgaggccgccgcggggctgggcctgcgcgtggcgggagcgcggggagggattgccgcgggccggggaggggcgggggcgggcgtgctgccctctgtggtccttgggccgccgccgcgggtctgtcgtggtgcctggagcggctgtgctcgtcccttgcttggccgtgttctcgttcctgagggtcccgcggacaccgagtggcgcagtgccaggcccagcccggggatggcgactgcgcctgggcccgcctggtgtcttcgcatccctctccgctttccggcttcagcgctctaggtcagggagtcttcgcttttgtacagctctaaggctaggaatggtttttatatttttaaaaggctttggaaaacaaaaatacgcaacagagaccgtttgtgtgacactttgcagggaagtttgctggcctctgttctaggtcatgattgggctgcaagggcagagaag

SEQ ID NO: 437888 - DNA, 1108 bp, Homo sapiens
  misc_feature (985)..(985): n is a, c, g, or t
gcgtgcgaggcgattggtttggggccagagtgggcgaggcgcggaggtctggcctataaagtagtcgcggagacggggtgctggtttgcgtcgtagtctcctgcagcgtctggggtttccgttgcagtcctcggaaccaggacctcggcgtggcctagcgagttatggcgacgaaggccgtgtgcgtgctgaagggcgacggcccagtgcagggcatcatcaatttcgagcagaaggaaagtaatggaccagtgaaggtgtggggaagcattaaaggactgactgaaggcctgcatggattccatgttcatgagtttggagataatacagcaggctgtaccagtgcaggtcctcactttaatcctctatccagaaaacacggtgggccaaaggatgaagagaggcatgttggagacttgggcaatgtgactgctgacaaagatggtgtggccgatgtgtctattgaagattctgtgatctcactctcaggagaccattgcatcattggccgcacactggtggtccatgaaaaagcagatgacttgggcaaaggtggaaatgaagaaagtacaaagacaggaaacgctggaagtcgtttggcttgtggtgtaattgggatcgcccaataaacattcccttggatgtagtctgaggccccttaactcatctgttatcctgctagctgtagaaatgtatcctgataaacattaaacactgtaatcttaaaagtgtaattgtgtgactttttcagagttgctttaaagtacctgtagtgagaaactgatttatgatcacttggaagatttgtatagttttataaaactcagttaaaatgtctgtttcaatgacctgtattttgccagacttaaatcacagatgggtattaaacttgtcagaatttctttgtcattcaagcctgtgaataaaaaccctgtatggcacttattatgaggctattaaaagaatccaaattcaaactaaatanaaaaaaaaaaataaaactaaacataaaaattaaaaaaacattggccgcggtttacacgtgggaactggaaaaccttgctgtacccacttaatccgctggagcaaatccccttttgcacgtcgg

SEQ ID NO: 437889 - DNA, 1003 bp, Homo sapiens
gcacgacttagaggttgctcagacaactgctctcccggatgaggatgatgacctgtgagaacgaagctggagcccaggacagctgcctataaaactagacttctgacgctcccacgcgtcgcagcagcgtctggggtttccgttgcagtcctcggaaccaggacctcggcgtggcctagcgagttatggcgacgaaggccgtgtgcgtgctgaagggcgacggcccagtgcagggcatcatcaatttcgagcagaaggaaagtaatggaccagtgaaggtgtggggaagcattaaaggactgactgaaggcctgcatggattccatgttcatgagtttggagataatacagcaggctgtaccagtgcaggtcctcactttaatcctctatccagaaaacacggtgggccaaaggatgaagagaggcatgttggagacttgggcaatgtgactgctgacaaagatggtgtggccgatgtgtctattgaagattctgtgatctcactctcaggagaccattgcatcattggccgcacactggtggtccatgaaaaagcagatgacttgggcaaaggtggaaatgaagaaagtacaaagacaggaaacgctggaagtcgtttggcttgtggtgtaattgggatcgcccaataaacattcccttggatgtagtctgaggccccttaactcatctgttatcctgctagctgtagaaatgtatcctgataaacattaaacactgtaatcttaaaagtgtaattgtgtgactttttcagagttgctttaaagtacctgtagtgagaaactgatttatgatcacttggaagatttgtatagttttataaaactcagttaaaatgtctgtttcaatgacctgtattttgccagacttaaatcacagatgggtattaaacttgtcagaatttctttgtcattcaagcctgtgaataaaaaccctgtatggcacttattatgaggctattaaaagaatccaaattcaaactaaa

SEQ ID NO: 437890 - DNA, 895 bp, Homo sapiens
  misc_feature (746)..(747): n is a, c, g, or t
  misc_feature (752)..(753): n is a, c, g, or t
  misc_feature (759)..(759): n is a, c, g, or t
  misc_feature (768)..(768): n is a, c, g, or t
gcgtgcgaggcgattggtttggggccagagtgggcgaggcgcggaggtctggcctataaagtagtcgcggagacggggtgctggtttgcgtcgtagtctcctgcagcgtctggggtttccgttgcagtcctcggaaccaggacctcggcgtggcctagcgagttatggcgacgaaggccgtgtgcgtgctgaagggcgacggcccagtgcagggcatcatcaatttcgagcagaaggaaagtaatggaccagtgaaggtgtggggaagcattaaaggactgactgaaggcctgcatggattccatgttcatgagtttggagataatacagcaggctgtaccagtgcaggtcctcactttaatcctctatccagaaaacacggtgggccaaaggatgaagagaggcatgttggagacttgggcaatgtgactgctgacaaagatggtgtggccgatgtgtctattgaagattctgtgatctcactctcaggagaccattgcatcattggccgcacactggtggtccatgaaaaagcagatgacttgggcaaaggtggaaatgaagaaagtacaaagacaggaaacgctggaagtcgtttggcttgtggtgtaattgggatcgcccaataaacattcccttggatgtagtctgaggccccttaactcatctgttatcctgctagctgtagaaatgtatcctgataaacattaaacactgtaatcttaaaagaaaaaaataaaaaaaannttggnngcgggngcccggaangtttaaacacctgtggggcgggcccaggaggaaacgggcaagggcccaagaccggcgcaggggggtccacaaaaaagccgggcgggtggacaccaggggcgggtaggtcacaggccggacccccggg

SEQ ID NO: 437891 - DNA, 1122 bp, Homo sapiens
gcgtgcgaggcgattggtttggggccagagtgggcgaggcgcggaggtctggcctataaagtagtcgcggagacggggtgctggtttgcgtcgtagtctcctgcagcgtctggggtttccgttgcagtcctcggaaccaggacctcggcgtggcctagcgagttatggcgacgaaggccgtgtgcgtgctgaagggcgacggcccagtgcagggcatcatcaatttcgagcagaaggaaagtaatggaccagtgaaggtgtggggaagcattaaaggactgactgaaggcctgcatggattccatgttcatgagtttggagataatacagcaggctgtaccagtgcaggtcctcactttaatcctctatccagaaaacacggtgggccaaaggatgaagagaggcatgttggagacttgggcaatgtgactgctgacaaagatggtgtggccgatgtgtctattgaagattctgtgatctcactctcaggagaccattgcatcattggccgcacactggtggtccatgaaaaagcagatgacttgggcaaaggtggaaatgaagaaagtacaaagacaggaaacgctggaagtcgtttggcttgtggtgtaattgggatcgcccaataaacattcccttggatgtagtctgaggccccttaactcatctgttatcctgctagctgtagaaatgtatcctgataaacattaaacactgtaatcttaaaagaaacaaaaaaaaaaaaaaaaagaaaagaaaaaaaaaaaaaaaaaaagtcgagaactagtctctctcgtggctttaggaaaaccagcggaagctgaaggtctgggggtgggggcggaagttcgttacctttggtcgtcttttcacactaggttttggtttcaaggttcagttcggacgaaataggagcagtcccccatagttagtaagcttggcgggcccatgccattgaccgaggccatcacctgttgctctggggttgtcccggggaactgtcttttccatccttactgccacggtgtgcttggcatggcgcaaagggctctctgggaaggcctaagtgcgggatgagcacgggtgattgaatagttgccttgtaccagctgtgtgggggta

SEQ ID NO: 437892 - DNA, 1175 bp, Homo sapiens
gcgtgcgaggcgattggtttggggccagagtgggcgaggcgcggaggtctggcctataaagtagtcgcggagacggggtgctggtttgcgtcgtagtctcctgcagcgtctggggtttccgttgcagtcctcggaaccaggacctcggcgtggcctagcgagttatggcgacgaaggccgtgtgcgtgctgaagggcgacggcccagtgcagggcatcatcaatttcgagcagaaggaaagtaatggaccagtgaaggtgtggggaagcattaaaggactgactgaaggcctgcatggattccatgttcatgagtttggagataatacagcaggctgtaccagtgcaggtcctcactttaatcctctatccagaaaacacggtgggccaaaggatgaagagaggcatgttggagacttgggcaatgtgactgctgacaaagatggtgtggccgatgtgtctattgaagattctgtgatctcactctcaggagaccattgcatcattggccgcacactggtggtccatgaaaaagcagatgacttgggcaaaggtggaaatgaagaaagtacaaagacaggaaacgctggaagtcgtttggcttgtggtgtaattgggatcgcccaataaacattcccttggatgtagtctgaggccccttaactcatctgttatcctgctagctgtagaaatgtatcctgataaacattaaacactgtaatcttaaaagaaaaaaaaaaaaaaaaaaaaaaaaaaaaaaaaaagaaaaaaaaaaaaaacaaaaaaaaaaaaaaaaagaaaagaaaaaaagaaagaaaaaaaaaaaaaaaagggggggggggggggggaaaacatccccccggggaggaccgaaaaaaaaaatgccaacaccgataagtagaaaaaaaggggggacacaacaaaaggaggcgggcgataacaatcaaacacacgcagacgcggagcagggacaacaaaaaaaaacaaacacgacggcaggcagaacgcccagcagccagctaatagaagacacaacaagagagaaagcacacaacaataaggggggaggtagagaacaacaaagaggaaacaccaagaacacccacacagcagaagaatgaacacagcacaaagaagcagcaaacaacacaaaaacgacatcgagtgcatagaacg

SEQ ID NO: 437893 - DNA, 949 bp, Homo sapiens
gcgtgcgaggcgattggtttggggccagagtgggcgaggcgcggaggtctggcctataaagtagtcgcggagacggggtgctggtttgcgtcgtagtctcctgcagcgtctggggtttccgttgcagtcctcggaaccaggacctcggcgtggcctagcgagttatggcgacgaaggccgtgtgcgtgctgaagggcgacggcccagtgcagggcatcatcaatttcgagcagaaggaaagtaatggaccagtgaaggtgtggggaagcattaaaggactgactgaaggcctgcatggattccatgttcatgagtttggagataatacagcaggctgtaccagtgcaggtcctcactttaatcctctatccagaaaacacggtgggccaaaggatgaagagaggcatgttggagacttgggcaatgtgactgctgacaaagatggtgtggccgatgtgtctattgaagattctgtgatctcactctcaggagaccattgcatcattggccgcacactggtggtccatgaaaaagcagatgacttgggcaaaggtggaaatgaagaaagtacaaagacaggaaacgctggaagtcgtttggcttgtggtgtaattgggatcgcccaataaacattcccttggatgtagtctgaggccccttaactcatctgttatcctgctagctgtagaaatgtattgtaattgtgtgactttttcagagttgctttaaagtacctgtagtgagaaactgatttatgatcacttggaagatttgtatagttttataaaactcagttaaaatgtctgtttcaatgacctgtattttgccagacttaaatcacagatgggtattaaacttgtcagaatttctttgtcattcaagcctgtgaataaaaaccctgtatggcacttattatgaggctattaaaagaatccaaattcaaactaaa

SEQ ID NO: 437894 - DNA, 775 bp, Homo sapiens
gcgtgcgaggcgattggtttggggccagagtgggcgaggcgcggaggtctggcctataaagtagtcgcggagacggggtgctggtttgcgtcgtagtctcctgcagcgtctggggtttccgttgcagtcctcggaaccaggacctcggcgtggcctagcgagttatggcgacgaaggccgtgtgcgtgctgaagggcgacggcccagtgcagggcatcatcaatttcgagcagaaggaaagtaatggaccagtgaaggtgtggggaagcattaaaggactgactgaaggcctgcatggattccatgttcatgagtttggagataatacagcaggctgtaccagtgcaggtcctcactttaatcctctatccagaaaacacggtgggccaaaggatgaagagaggcatgttggagacttgggcaatgtgactgctgacaaagatggtgtggccgatgtgtctattgaagattctgtgatctcactctcaggagaccattgcatcattggccgcacactggtggtccatgaaaaagcagatgacttgggcaaaggtggaaatgaagaaagtacaaagacaggaaacgctggaagtcgtttggcttgtggtgtaattgggatcgcccaataaacattcccttggatgtagtctgaggccccttaactcatctgttatcctgctagctgtagaaatgtatttggctggcgacacgccagccaacaggatgtgactccagccagccaaatccatcctggtcttccatttcttccacgatg

SEQ ID NO: 437895 - DNA, 1081 bp, Homo sapiens
tacaactaaagcagcaaatcaaaacatctgctgaggttttctggtagaacaacaacaaaattagttggtgcccatgttcagtaagtcactaccattgacaaaactaaatccaaaataggaaattgaaaagtgcataatgaaattaaatcttgtatcaagtatttgtggaaaactggaaatgtttctctggtatggttggtgaatgatgatttggaggaggtattaaagtttatccgatccagctttggcctggtgttccacgtagaaaaggataggccgtgtgcgtgctgaagggcgacggcccagtgcagggcatcatcaatttcgagcagaaggaaagtaatggaccagtgaaggtgtggggaagcattaaaggactgactgaaggcctgcatggattccatgttcatgagtttggagataatacagcaggctgtaccagtgcaggtcctcactttaatcctctatccagaaaacacggtgggccaaaggatgaagagaggcatgttggagacttgggcaatgtgactgctgacaaagatggtgtggccgatgtgtctattgaagattctgtgatctcactctcaggagaccattgcatcattggccgcacactggtggtccatgaaaaagcagatgacttgggcaaaggtggaaatgaagaaagtacaaagacaggaaacgctggaagtcgtttggcttgtggtgtaattgggatcgcccaataaacattcccttggatgtagtctgaggccccttaactcatctgttatcctgctagctgtagaaatgtatcctgataaacattaaacactgtaatcttaaaagtgtaattgtgtgactttttcagagttgctttaaagtacctgtagtgagaaactgatttatgatcacttggaagatttgtatagttttataaaactcagttaaaatgtctgtttcaatgacctgtattttgccagacttaaatcacagatgggtattaaacttgtcagaatttctttgtcattcaagcctgtgaataaaaaccctgtatggcacttattatgaggctattaaaagaatccaaattcaaactaaa

SEQ ID NO: 437896 - DNA, 780 bp, Homo sapiens
gcgtgcgaggcgattggtttggggccagagtgggcgaggcgcggaggtctggcctataaagtagtcgcggagacggggtgctggtttgcgtcgtagtctcctgcagcgtctggggtttccgttgcagtcctcggaaccaggacctcggcgtggcctagcgagttatggcgacgaaggccgtgtgcgtgctgaagggcgacggcccagtgcagggcatcatcaatttcgagcagaaggaaagtaatggaccagtgaaggtgtggggaagcattaaaggactgactgaaggcctgcatggattccatgttcatgagtttggagataatacagcaggctgtaccagtgcaggtcctcactttaatcctctatccagaaaacacggtgggccaaaggatgaagagaggcatgttggagacttgggcaatgtgactgctgacaaagatggtgtggccgatgtgtctattgaagattctgtgatctcactctcaggagaccattgcatcattggccgcacactggtggtccatgaaaaagcagatgacttgggcaaaggtggaaatgaagaaagtacaaagacaggaaacgctggaagtcgtttggcttgtggtgtaattgggatcgcccaataaacattcccttggatgtagtctgaggccccttaactcatctgtcaatcataatgttgggggacgccgaccgatcggggtcgcgtaagctagttagcatcgaccaagagtctcgttcgttatctggaatgaaccacgacaaaatcgctccacg

SEQ ID NO: 437897 - DNA, 885 bp, Homo sapiens
gcgtgcgaggcgattggtttggggccagagtgggcgaggcgcggaggtctggcctataaagtagtcgcggagacggggtgctggtttgcgtcgtagtctcctgcagcgtctggggtttccgttgcagtcctcggaaccaggacctcggcgtggcctagcgagttatggcgacgaaggccgtgtgcgtgctgaagggcgacggcccagtgcagggcatcatcaatttcgagcagaaggctgtaccagtgcaggtcctcactttaatcctctatccagaaaacacggtgggccaaaggatgaagagaggcatgttggagacttgggcaatgtgactgctgacaaagatggtgtggccgatgtgtctattgaagattctgtgatctcactctcaggagaccattgcatcattggccgcacactggtggtccatgaaaaagcagatgacttgggcaaaggtggaaatgaagaaagtacaaagacaggaaacgctggaagtcgtttggcttgtggtgtaattgggatcgcccaataaacattcccttggatgtagtctgaggccccttaactcatctgttatcctgctagctgtagaaatgtatcctgataaacattaaacactgtaatcttaaaagtgtaattgtgtgactttttcagagttgctttaaagtacctgtagtgagaaactgatttatgatcacttggaagatttgtatagttttataaaactcagttaaaatgtctgtttcaatgacctgtattttgccagacttaaatcacagatgggtattaaacttgtcagaatttctttgtcattcaagcctgtgaataaaaaccctgtatggcacttattatgaggctattaaaagaatccaaattcaaactaaa

SEQ ID NO: 437898 - DNA, 1727 bp, Homo sapiens
gcgtgcgaggcgattggtttggggccagagtgggcgaggcgcggaggtctggcctataaagtagtcgcggagacggggtgctggtttgcgtcgtagtctcctgcagcgtctggggtttccgttgcagtcctcggaaccaggacctcggcgtggcctagcgagttatggcgacgaaggccgtgtgcgtgctgaagggcgacggcccagtgcagggcatcatcaatttcgagcagaaggaaagtaatggaccagtgaaggtgtggggaagcattaaaggactgactgaaggcctgcatggattccatgttcatgagtttggagataatacagcaggctgtaccagtgcaggtcctcactttaatcctctatccagaaaacacggtgggccaaaggatgaagagaggtaacaagatgcttaactcttgtaataatggcgatagctttctggagttcatatggtatactacttgtaaatatgtgctaagataattccgtgtttcccccacctttgcttttgaacttgctgactcatctaaacccctgctcccaaatgctggaatgcttttacttcctgggcttaaaggaattgacaaatggggacacttaaaacgatttggttttgtagcatttattgaatatagaactaatacaagtgccaaaggggaactaatacaggaaatgtcatgaacagtactgtcaaccactagcaaaatcaatcatcattgtgaaacataggaagcttctgtagataaaaaaaaaaattgatactgaaaactagtcgagactccatttatatgtgtatgttttctgaaagcctttcagaaaaatattaaatttaaggacaagatttttatatcagaggccttgggacatagctttgttagctatgccagtaattaacaggcataactcagtaactgagagtttaccctttggtacttctgaaatcaggtgcagccccatctttcttcccagagcattagtgtgtagacgtgaagccttgtttgaagagctgtatttagaatgcctagctacttgtttgcaaatttgtgtctactcagtcaagttttaatttagctcatgaactaccttgatgtttagtggcatcagccctaatccatctgatgctttttcattattaggcatgtgcatgttggagacttgggcaatgtgactgctgacaaagatggtgtggccgatgtgtctattgaagattctgtgatctcactctcaggagaccattgcatcattggccgcacactggtggtccatgaaaaagcagatgacttgggcaaaggtggaaatgaagaaagtacaaagacaggaaacgctggaagtcgtttggcttgtggtgtaattgggatcgcccaataaacattcccttggatgtagtctgaggccccttaactcatctgttatcctgctagctgtagaaatgtatcctgataaacattaaacactgtaatcttaaaagtgtaattgtgtgactttttcagagttgctttaaagtacctgtagtgagaaactgatttatgatcacttggaagatttgtatagttttataaaactcagttaaaatgtctgtttcaatgacctgtattttgccagacttaaatcacagatgggtattaaacttgtcagaatttctttgtcattcaagcctgtgaataaaaaccctgtatggcacttattatgaggctattaaaagaatccaaattcaaactaaa

SEQ ID NO: 437899 - DNA, 952 bp, Homo sapiens
gcgtgcgaggcgattggtttggggccagagtgggcgaggcgcggaggtctggcctataaagtagtcgcggagacggggtgctggtttgcgtcgtagtctcctgcagcgtctggggtttccgttgcagtcctcggaaccaggacctcggcgtggcctagcgagttatggcgacgaaggccgtgtgcgtgctgaagggcgacggcccagtgcagggcatcatcaatttcgagcagaaggaaagtaatggaccagtgaaggtgtggggaagcattaaaggactgactgaaggcctgcatggattccatgttcatgagtttggagataatacagcaggctgtaccagtgcaggtcctcactttaatcctctatccaggcatgttggagacttgggcaatgtgactgctgacaaagatggtgtggccgatgtgtctattgaagattctgtgatctcactctcaggagaccattgcatcattggccgcacactggtggtccatgaaaaagcagatgacttgggcaaaggtggaaatgaagaaagtacaaagacaggaaacgctggaagtcgtttggcttgtggtgtaattgggatcgcccaataaacattcccttggatgtagtctgaggccccttaactcatctgttatcctgctagctgtagaaatgtatcctgataaacattaaacactgtaatcttaaaagtgtaattgtgtgactttttcagagttgctttaaagtacctgtagtgagaaactgatttatgatcacttggaagatttgtatagttttataaaactcagttaaaatgtctgtttcaatgacctgtattttgccagacttaaatcacagatgggtattaaacttgtcagaatttctttgtcattcaagcctgtgaataaaaaccctgtatggcacttattatgaggctattaaaagaatccaaattcaaactaaa

SEQ ID NO: 437900 - DNA, 1868 bp, Homo sapiens
tggtggtgggcgcctgtagtcccagctactcaggaggctgaggctggagtgcagtggtgcgatctcagctcactgcaacctctgcctcccaggttcaagcgattctcctgcctcagcctactaagtagctgggactataggtgcgcaccaccacgcctagctaatttttgtattttttcagtagagacagggttttgctatgctggccaggctggtctcaaactcctgacctcagatgatccagccacctcagcttcccaaagtgctggggttccaggtgttagccaccatgcctggccatagacttgtttctgttcccttctcactgtggctgtaccaaggtgttgcttatcccagaagtcgtgatgcaggtcagcactttctccatgggaagttttagcagtgtttctttttagaatgtatttgggaactttaattcataatttagcttttttttcttcttcttataaataggctgtaccagtgcaggtcctcactttaatcctctatccagaaaacacggtgggccaaaggatgaagagaggtaacaagatgcttaactcttgtaataatggcgatagctttctggagttcatatggtatactacttgtaaatatgtgctaagataattccgtgtttcccccacctttgcttttgaacttgctgactcatctaaacccctgctcccaaatgctggaatgcttttacttcctgggcttaaaggaattgacaaatggggacacttaaaacgatttggttttgtagcatttattgaatatagaactaatacaagtgccaaaggggaactaatacaggaaatgtcatgaacagtactgtcaaccactagcaaaatcaatcatcattgtgaaacataggaagcttctgtagataaaaaaaaaaattgatactgaaaactagtcgagactccatttatatgtgtatgttttctgaaagcctttcagaaaaatattaaatttaaggacaagatttttatatcagaggccttgggacatagctttgttagctatgccagtaattaacaggcataactcagtaactgagagtttaccctttggtacttctgaaatcaggtgcagccccatctttcttcccagagcattagtgtgtagacgtgaagccttgtttgaagagctgtatttagaatgcctagctacttgtttgcaaatttgtgtctactcagtcaagttttaatttagctcatgaactaccttgatgtttagtggcatcagccctaatccatctgatgctttttcattattaggcatgtgcatgttggagacttgggcaatgtgactgctgacaaagatggtgtggccgatgtgtctattgaagattctgtgatctcactctcaggagaccattgcatcattggccgcacactggtggtccatgaaaaagcagatgacttgggcaaaggtggaaatgaagaaagtacaaagacaggaaacgctggaagtcgtttggcttgtggtgtaattgggatcgcccaataaacattcccttggatgtagtctgaggccccttaactcatctgttatcctgctagctgtagaaatgtatcctgataaacattaaacactgtaatcttaaaagtgtaattgtgtgactttttcagagttgctttaaagtacctgtagtgagaaactgatttatgatcacttggaagatttgtatagttttataaaactcagttaaaatgtctgtttcaatgacctgtattttgccagacttaaatcacagatgggtattaaacttgtcagaatttctttgtcattcaagcctgtgaataaaaaccctgtatggcacttattatgaggctattaaaagaatccaaattcaaactaaa

SEQ ID NO: 437901 - DNA, 928 bp, Homo sapiens
gcgtgcgaggcgattggtttggggccagagtgggcgaggcgcggaggtctggcctataaagtagtcgcggagacggggtgctggtttgcgtcgtagtctcctgcagcgtctggggtttccgttgcagtcctcggaaccaggacctcggcgtggcctagcgagttatggcgacgaaggccgtgtgcgtgctgaagggcgacggcccagtgcagggcatcatcaatttcgagcagaaggaaagtaatggaccagtgaaggtgtggggaagcattaaaggactgactgaaggcctgcatggattccatgttcatgagtttggagataatacagcaggctgtaccagtgcaggtcctcactttaatcctctatccagaaaacacggtgggccaaaggatgaagagaggcatgttggagacttgggcaatgtgactgctgacaaagatggtgtggccgatgtgtctattgaagattctgtgatctcactctcaggagaccattgcatcattggccgcacactggtgacaggaaacgctggaagtcgtttggcttgtggtgtaattgggatcgcccaataaacattcccttggatgtagtctgaggccccttaactcatctgttatcctgctagctgtagaaatgtatcctgataaacattaaacactgtaatcttaaaagtgtaattgtgtgactttttcagagttgctttaaagtacctgtagtgagaaactgatttatgatcacttggaagatttgtatagttttataaaactcagttaaaatgtctgtttcaatgacctgtattttgccagacttaaatcacagatgggtattaaacttgtcagaatttctttgtcattcaagcctgtgaataaaaaccctgtatggcacttattatgaggctattaaaagaatccaaattcaaactaaa

SEQ ID NO: 437902 - DNA, 623 bp, Homo sapiens
caccccaaccaccaccgccacaacccacaaactacggctaggtacgaggctgggtgtggcagcgtctggggtttccgttgcagtcctcggaaccaggacctcggcgtggcctagcgagttatggcgacgagaaagtaatggaccagtgaaggtgtggggaagcattaaaggactgactgaaggcctgcatggattccatgttcatgagtttggagataatacagcaggctgtaccagtgcaggtcctcactttaatcctctatccagaaaacacggtgggccaaaggatgaagagaggcatgttggagacttgggcaatgtgactgctgacaaagatggtgtggccgatgtgtctattgaagattctgtgatctcactctcaggagaccattgcatcattggccgcacactggtggtccatgaaaaagcagatgacttgggcaaaggtggaaatgaagaaagtacaaagacaggaaacgctggaagtcgtttggcttgtggtgtaattgggatcgcccaataaacattcccttggatgtagtctgaggccccttaactcatctgttatcctgctagctgtagaaatgtatcctgataaacattaaacactgtaatcttaaaag

SEQ ID NO: 437903 - DNA, 955 bp, Homo sapiens
gcgtgcgaggcgattggtttggggccagagtgggcgaggcgcggaggtctggcctataaagtagtcgcggagacggggtgctggtttgcgtcgtagtctcctgcagcgtctggggtttccgttgcagtcctcggaaccaggacctcggcgtggcctagcgagttatggcgacgaaggccgtgtgcgtgctgaagggcgacggcccagtgcagggcatcatcaatttcgagcagaaggaaagtaatggaccagtgaaggtgtggggaagcattaaaggactgactgaaggcctgcatggattccatgttcatgagtttggagataatacagcaggctgtaccagtgcaggtcctcactttaatcctctatccagaaaacacggtgggccaaaggatgaagagaggcatgttggagacttgggcaatgtgactgctgacaaagatggtgtggccgatgtgtctattgaagattctgtgatctcactctcaggagaccattgcatcattggccgcacactggtgccatgaaaaagcagatgacttgagcaaagaaaaaaaaagaaaaacaaaaaaaaaaaaaaaaagaaaagaaaaaaaaaaaaaaaaaaagtcgagaactagtctctctcgtggctttaggaaaaccagcggaagctgaaggtctgggggtgggggcggaagttcgttacctttggtcgtcttttcacactaggttttggtttcaaggttcagttcggacgaaataggagcagtcccccatagttagtaagcttggcgggcccatgccattgaccgaggccatcacctgttgctctggggttgtcccggggaactgtcttttccatccttactgccacggtgtgcttggcatggcgcaaagggctctctgggaaggcctaagtgcgggatgagcacgggtgattgaatagttgccttgtaccagctgtgtgggggta

SEQ ID NO: 437904 - DNA, 575 bp, Homo sapiens
gcgtgcgaggcgattggtttggggccagagtgggcgaggcgcggaggtctggcctataaagtagtcgcggagacggggtgctggtttgcgtcgtagtctcctgcagcgtctggggtttccgttgcagtcctcggaaccaggacctcggcgtggcctagcgagttatggcgacgaaggccgtgtgcgtgctgaagggcgacggcccagtgcagggcatcatcaatttcgagcagaaggaaagtaatggaccagtgaaggtgtggggaagcattaaaggactgactgaaggcctgcatggattccatgttcatgagtttggagataatacagcaggctgtaccagtgcaggtcctcactttaatcctctatccagaaaacacggtgggccaaaggatgaagagaggcatgttggagacttgggcaatgtgactgctgacaaagatggtgtggccgatgtgtctattgaagattctgtgatctcactctcaggagaccattgcatcattggccgcacactggtgccatgaaaaagcagatgacttgggccacattatggaggcgccgtcgcctacgca

SEQ ID NO: 437905 - DNA, 1474 bp, Homo sapiens
gcgtgcgaggcgattggtttggggccagagtgggcgaggcgcggaggtctggcctataaagtagtcgcggagacggggtgctggtttgcgtcgtagtctcctgcagcgtctggggtttccgttgcagtcctcggaaccaggacctcggcgtggcctagcgagttatggcgacgaaggccgtgtgcgtgctgaagggcgacggcccagtgcagggcatcatcaatttcgagcagaaggaaagtaatggaccagtgaaggtgtggggaagcattaaaggactgactgaaggcctgcatggattccatgttcatgagtttggagataatacagcaggctgtaccagtgcaggtcctcactttaatcctctatccagaaaacacggtgggccaaaggatgaagagaggtaacaagatgcttaactcttgtaataatggcgatagctttctggagttcatatggtatactacttgtaaatatgtgctaagataattccgtgtttcccccacctttgcttttgaacttgctgactcatctaaacccctgctcccaaatgctggaatgcttttacttcctgggcttaaaggaattgacaaatggggacacttaaaacgatttggttttgtagcatttattgaatatagaactaatacaagtgccaaaggggaactaatacaggaaatgtcatgaacagtactgtcaaccactagcaaaatcaatcatcattgtgaaacataggaagcttctgtagataaaaaaaaaaattgatactgaaaactagtcgagactccatttatatgtgtatgttttctgaaagcctttcagaaaaatattaaatttaaggacaagatttttatatcagaggccttgggacatagctttgttagctatgccagtaattaacaggcataactcagtaactgagagtttaccctttggtacttctgaaatcaggtgcagccccatctttcttcccagagcattagtgtgtagacgtgaagccttgtttgaagagctgtatttagaatgcctagctacttgtttgcaaatttgtgtctactcagtcaagttttaatttagctcatgaactaccttgatgtttagtggcatcagccctaatccatctgatgctttttcattattaggcatgtgcatgttggagacttgggcaatgtgactgctgacaaagatggtgtggccgatgtgtctattgaagattctgtgatctcactctcaggagaccattgcatcattggccgcacactggtggtccatgaaaaagcagatgacttgggcaaaggtggaaatgaagaaagtacaaagacaggaaacgctggaagtcgtttggcttgtggtgtaattgggatcgcccaataaacattcccttggatgtagtctgaggccccttaactcatctgttatcctgctagctgtagaaatgtatcctgataaacattaaacactgtaatcttaaaag

SEQ ID NO: 437906 - DNA, 1839 bp, Homo sapiens
gcgtgcgaggcgattggtttggggccagagtgggcgaggcgcggaggtctggcctataaagtagtcgcggagacggggtgctggtttgcgtcgtagtctcctgcagcgtctggggtttccgttgcagtcctcggaaccaggacctcggcgtggcctagcgagttatggcgacgaaggccgtgtgcgtgctgaagggcgacggcccagtgcagggcatcatcaatttcgagcagaaggaaagtaatggaccagtgaaggtgtggggaagcattaaaggactgactgaaggcctgcatggattccatgttcatgagtttggagataatacagcaggctgtaccagtgcaggtcctcactttaatcctctatccagaaaacacggtgggccaaaggatgaagagaggtaacaagatgcttaactcttgtaataatggcgatagctttctggagttcatatggtatactacttgtaaatatgtgctaagataattccgtgtttcccccacctttgcttttgaacttgctgactcatctaaacccctgctcccaaatgctggaatgcttttacttcctgggcttaaaggaattgacaaatggggacacttaaaacgatttggttttgtagcatttattgaatatagaactaatacaagtgccaaaggggaactaatacaggaaatgtcatgaacagtactgtcaaccactagcaaaatcaatcatcattgtgaaacataggaagcttctgtagataaaaaaaaaaattgatactgaaaactagtcgagactccatttatatgtgtatgttttctgaaagcctttcagaaaaatattaaatttaaggacaagatttttatatcagaggccttgggacatagctttgttagctatgccagtaattaacaggcataactcagtaactgagagtttaccctttggtacttctgaaatcaggtgcagccccatctttcttcccagagcattagtgtgtagacgtgaagccttgtttgaagagctgtatttagaatgcctagctacttgtttgcaaatttgtgtctactcagtcaagttttaatttagctcatgaactaccttgatgtttagtggcatcagccctaatccatctgatgctttttcattattaggcatgtgcatgttggagacttgggcaatgtgactgctgacaaagatggtgtggccgatgtgtctattgaagattctgtgatctcactctcaggagaccattgcatcattggccgcacactggtggtccatgaaaaagcagatgacttgggcaaaggtggaaatgaagaaagtacaaagacaggaaacgctggaagtcgtttggcttgtggtgtaattgggatcgcccaataaacattcccttggatgtagtctgaggccccttaactcatctgttatcctgctagctgtagaaatgtatcctgataaacattaaacactgtaatcttaaaagaaaaaaaaaaaaaaaaaagtcgagaactagtctctctcgtggctttaggaaaaccagcggaagctgaaggtctgggggtgggggcggaagttcgttacctttggtcgtcttttcacactaggttttggtttcaaggttcagttcggacgaaataggagcagtcccccatagttagtaagcttggcgggcccatgccattgaccgaggccatcacctgttgctctggggttgtcccggggaactgtcttttccatccttactgccacggtgtgcttggcatggcgcaaagggctctctgggaaggcctaagtgcgggatgagcacgggtgattgaatagttgccttgtaccagctgtgtgggggta

SEQ ID NO: 437907 - DNA, 900 bp, Homo sapiens
ctctctctctctctctctctctctctctctctctctctctctctctcgcagcgtctggggtttccgttgcagtcctcggaaccaggacctcggcgtggcctagcgagttatggcgacgaaggccgtgtgcgtgctgaagggcgacggcccagtgcagggcatcatcaatttcgagcagaaggaaagtaatggaccagtgaaggtgtggggaagcattaaaggactgactgaaggcctgcatggattccatgttcatgagtttggagataatacagcaggctgtaccagtgcaggtcctcactttaatcctctatccagaaaacacggtgggccaaaggatgaagagaggcatgttggagacttgggcaatgtgactgctgacaaagatggtgtggccgatgtgtctattgaagattctgtgatctcactctcaggagaccattgcatcattggccgcacactggtgccatgaaaaagcagatgacttgagcaaagaaaaaaaaagaaaaacaaaaaaaaaaaaaaaaagaaaagaaaaaaaaaaaaaaaaaaagtcgagaactagtctctctcgtggctttaggaaaaccagcggaagctgaaggtctgggggtgggggcggaagttcgttacctttggtcgtcttttcacactaggttttggtttcaaggttcagttcggacgaaataggagcagtcccccatagttagtaagcttggcgggcccatgccattgaccgaggccatcacctgttgctctggggttgtcccggggaactgtcttttccatccttactgccacggtgtgcttggcatggcgcaaagggctctctgggaaggcctaagtgcgggatgagcacgggtgattgaatagttgccttgtaccagctgtgtgggggta

SEQ ID NO: 437908 - DNA, 887 bp, Homo sapiens
cttttgaggacacaggcctagagcagttaagcagcttgctggaggttcactggctagaaagtggtcagcctgggatttggacacagatttttccactcccaagtctggctgctttttacttcactgtgaggggtaaaggtaaatcagctgttttctttgttcagaaactctctccaactttgcacttttcttaaagaaagtaatggaccagtgaaggtgtggggaagcattaaaggactgactgaaggcctgcatggattccatgttcatgagtttggagataatacagcaggctgtaccagtgcaggtcctcactttaatcctctatccagaaaacacggtgggccaaaggatgaagagaggcatgttggagacttgggcaatgtgactgctgacaaagatggtgtggccgatgtgtctattgaagattctgtgatctcactctcaggagaccattgcatcattggccgcacactggtgacaggaaacgctggaagtcgtttggcttgtggtgtaattgggatcgcccaataaacattcccttggatgtagtctgaggccccttaactcatctgttatcctgctagctgtagaaatgtatcctgataaacattaaacactgtaatcttaaaagtgtaattgtgtgactttttcagagttgctttaaagtacctgtagtgagaaactgatttatgatcacttggaagatttgtatagttttataaaactcagttaaaatgtctgtttcaatgacctgtattttgccagacttaaatcacagatgggtattaaacttgtcagaatttctttgtcattcaagcctgtgaataaaaaccctgtatggcacttattatgaggctattaaaagaatccaaattcaaactaaa

SEQ ID NO: 437909 - DNA, 1296 bp, Homo sapiens
gcgtgcgaggcgattggtttggggccagagtgggcgaggcgcggaggtctggcctataaagtagtcgcggagacggggtgctggtttgcgtcgtagtctcctgcagcgtctggggtttccgttgcagtcctcggaaccaggacctcggcgtggcctagcgagttatggcgacgaaggccgtgtgcgtgctgaagggcgacggcccagtgcagggcatcatcaatttcgagcagaaggaaagtaatggaccagtgaaggtgtggggaagcattaaaggactgactgaaggcctgcatggattccatgttcatgagtttggagataatacagcaggctgtaccagtgcaggtcctcactttaatcctctatccagaaaacacggtgggccaaaggatgaagagaggtaacaagatgcttaactcttgtaataatggcgatagctttctggagttcatatggtatactacttgtaaatatgtgctaagataattccgtgtttcccccacctttgcttttgaacttgctgactcatctaaacccctgctcccaaatgctggaatgcttttacttcctgggcttaaaggaattgacaaatggggacacttaaaacgatttggttttgtagcatttattgaatatagaactaatacaagtgccaaaggggaactaatacaggaaatgtcatgaacagtactgtcaaccactagcaaaatcaatcatcattgtgaaacataggaagcttctgtagataaaaaaaaaaattgatactgaaaactagtcgagactccatttatatgtgtatgttttctgaaagcctttcagaaaaatattaaatttaaggacaagatttttatatcagaggccttgggacatagctttgttagctatgccagtaattaacaggcataactcagtaactgagagtttaccctttggtacttctgaaatcaggtgcagccccatctttcttcccagagcattagtgtgtagacgtgaagccttgtttgaagagctgtatttagaatgcctagctacttgtttgcaaatttgtgtctactcagtcaagttttaatttagctcatgaactaccttgatgtttagtggcatcagccctaatccatctgatgctttttcattattaggcatgtgcatgttggagacttgggcaatgtgactgctgacaaagatggtgtggccgatgtgtctattgaagattctgtgatctcactctcaggagaccattgcatcattggccgcacactggtggtaagttttcataaaaggatatgcataaaa

SEQ ID NO: 437910 - DNA, 590 bp, Homo sapiens
tgatgtgatcccatttgtccatttttgctttgattgcttgtgcttttggggtattactcaagaaatctttgccaagatcaatgtcttggagggtttccccaaggttttctttcattagtttcatagtttgaggtctcagatgtaagtctttaatctattttgatttgatttttatatatggcaacaggaaacgctggaagtcgtttggcttgtggtgtaattgggatcgcccaataaacattcccttggatgtagtctgaggccccttaactcatctgttatcctgctagctgtagaaatgtatcctgataaacattaaacactgtaatcttaaaagtgtaattgtgtgactttttcagagttgctttaaagtacctgtagtgagaaactgatttatgatcacttggaagatttgtatagttttataaaactcagttaaaatgtctgtttcaatgacctgtattttgccagacttaaatcacagatgggtattaaacttgtcagaatttctttgtcattcaagcctgtgaataaaaaccctgtatggcacttattatgaggctattaaaagaatccaaattcaaactaaa

SEQ ID NO: 437911 - DNA, 419 bp, Homo sapiens
gcgtgcgaggcgattggtttggggccagagtgggcgaggcgcggaggtctggcctataaagtagtcgcggagacggggtgctggtttgcgtcgtagtctcctgcagcgtctggggtttccgttgcagtcctcggaaccaggacctcggcgtggcctagcgagttatggcgacgaaggccgtgtgcgtgctgaagggcgacggcccagtgcagggcatcatcaatttcgagcagaaggaaagtaatggaccagtgaaggtgtggggaagcattaaaggactgactgaaggcctgcatggattccatgttcatgagtttggagataatacagcaggtatcagagcttacactcagtctacttatcttttcgaaacggtggcaaggtaggagatttggacttgattactctacagtgttgct

SEQ ID NO: 437912 - DNA, 291 bp, Homo sapiens
gcgtgcgaggcgattggtttggggccagagtgggcgaggcgcggaggtctggcctataaagtagtcgcggagacggggtgctggtttgcgtcgtagtctcctgcagcgtctggggtttccgttgcagtcctcggaaccaggacctcggcgtggcctagcgagttatggcgacgaaggccgtgtgcgtgctgaagggcgacggcccagtgcagggcatcatcaatttcgagcagaagtaatggaccagtgaagtgccgatgatagcgagtactcgatgatacggtaccgacc

SEQ ID NO: 437913 - DNA, 685 bp, Homo sapiens
caccccaaccaccaccgccacaacccacaaactacggctaggtacgaggctgggtgtggcagcgtctggggtttccgttgcagtcctcggaaccaggacctcggcgtggcctagcgagttatggcgacgaaggccgtgtgcgtgctgaagggcgacggcccagtgcagggcatcatcaatttcgagcagaaggaaagtaatggaccagtgaaggtgtggggaagcattaaaggactgactgaaggcctgcatggattccatgttcatgagtttggagataatacagcaggctgtaccagtgcaggtcctcactttaatcctctatccagaaaacacggtgggccaaaggatgaagagaggcatgttggagacttgggcaatgtgactgctgacaaagatggtgtggccgatgtgtctattgaagattctgtgatctcactctcaggagaccattgcatcattggccgcacactggtggtccatgaaaaagcagatgacttgggcaaaggtggaaatgaagaaagtacaaagacaggaaacgctggaagtcgtttggcttgtggtgtaattgggatcgcccaataaacattcccttggatgtagtctgaggccccttaactcatctgttatcctgctagctgtagaaatgtatcctgataaacattaaacactgtaatcttaaaag

SEQ ID NO: 437914 - DNA, 938 bp, Homo sapiens
caccccaaccaccaccgccacaacccacaaactacggctaggtacgaggctgggtgtggcagcgtctggggtttccgttgcagtcctcggaaccaggacctcggcgtggcctagcgagttatggcgacgaaggccgtgtgcgtgctgaagggcgacggcccagtgcagggcatcatcaatttcgagcagaaggaaagtaatggaccagtgaaggtgtggggaagcattaaaggactgactgaaggcctgcatggattccatgttcatgagtttggagataatacagcaggctgtaccagtgcaggtcctcactttaatcctctatccagaaaacacggtgggccaaaggatgaagagaggcatgttggagacttgggcaatgtgactgctgacaaagatggtgtggccgatgtgtctattgaagattctgtgatctcactctcaggagaccattgcatcattggccgcacactggtggtccatgaaaaagcagatgacttgggcaaaggtggaaatgaagaaagtacaaagacaggaaacgctggaagtcgtttggcttgtggtgtaattgggatcgcccaataaacattcccttggatgtagtctgaggccccttaactcatctgttatcctgctagctgtagaaatgtatcctgataaacattaaacactgtaatcttaaaagtgtaattgtgtgactttttcagagttgctttaaagtacctgtagtgagaaactgatttatgatcacttggaagatttgtatagttttataaaactcagttaaaatgtctgtttcaatgacctgtattttgccagacttaaatcacagatgggtattaaacttgtcagaatttctttgtcattcaagcctgtgaataaaaaccctgtatggcacttattatgaggctattaaaagaatccaaattcaaactaaa

SEQ ID NO: 437915 - DNA, 1070 bp, Homo sapiens
gcgtgcgaggcgattggtttggggccagagtgggcgaggcgcggaggtctggcctataaagtagtcgcggagacggggtgctggtttgcgtcgtagtctcctgcagcgtctggggtttccgttgcagtcctcggaaccaggacctcggcgtggcctagcgagttatggcgacgaaggccgtgtgcgtgctgaagggcgacggcccagtgcagggcatcatcaatttcgagcagaaggaaagtaatggaccagtgaaggtgtggggaagcattaaaggactgactgaaggcctgcatggattccatgttcatgagtttggagataatacagcaggctgtaccagtgcaggtcctcactttaatcctctatccagaaaacacggtgggccaaaggatgaagagaggcatgttggagacttgggcaatgtgactgctgacaaagatggtgtggccgatgtgtctattgaagattctgtgatctcactctcaggagaccattgcatcattggccgcacactggtggtccatgaaaaagcagatgacttgggcaaaggtggaaatgaagaaagtacaaagacaggaaacgctggaagtcgtttggcttgtggtgtaattgggatcgcccaataaacattcccttggatgtagtctgaggccccttaactcatctgttatcctgctagctgtagaaatgtatcctgataaacattaaacactgtaatcttaaaagaaaaacaaaaaaaacacaacaaaaaaccttttttggggcggccctgggaccccgagaaaaaggtttttaaagaaacccatctgtcgggtgtgtgacgccgcccgccccccaagtaggggctcgcttgggaaccacggggccccgaggccatggtccccccaaggaaaaaacgcgtgcgcacagtcaaacaagtggcttgggattctctccccgaataaaaaaagacgcccgggggggaacgaccagatggcgtttggaaacaatcccccggatggaagctcgggaggccacagacaggggcactctccaaagagggtccacacggaacgcaatataatagc

SEQ ID NO: 437916 - DNA, 964 bp, Homo sapiens
caccccaaccaccaccgccacaacccacaaactacggctaggtacgaggctgggtgtggcagcgtctggggtttccgttgcagtcctcggaaccaggacctcggcgtggcctagcgagttatggcgacgagaaagtaatggaccagtgaaggtgtggggaagcattaaaggactgactgaaggcctgcatggattccatgttcatgagtttggagataatacagcaggctgtaccagtgcaggtcctcactttaatcctctatccagaaaacacggtgggccaaaggatgaagagaggcatgttggagacttgggcaatgtgactgctgacaaagatggtgtggccgatgtgtctattgaagattctgtgatctcactctcaggagaccattgcatcattggccgcacactggtggtccatgaaaaagcagatgacttgggcaaaggtggaaatgaagaaagtacaaagacaggaaacgctggaagtcgtttggcttgtggtgtaattgggatcgcccaataaacattcccttggatgtagtctgaggccccttaactcatctgttatcctgctagctgtagaaatgtatcctgataaacattaaacactgtaatcttaaaagaaaaacaaaaaaaacacaacaaaaaaccttttttggggcggccctgggaccccgagaaaaaggtttttaaagaaacccatctgtcgggtgtgtgacgccgcccgccccccaagtaggggctcgcttgggaaccacggggccccgaggccatggtccccccaaggaaaaaacgcgtgcgcacagtcaaacaagtggcttgggattctctccccgaataaaaaaagacgcccgggggggaacgaccagatggcgtttggaaacaatcccccggatggaagctcgggaggccacagacaggggcactctccaaagagggtccacacggaacgcaatataatagc

SEQ ID NO: 437917 - DNA, 784 bp, Homo sapiens
gcgtgcgaggcgattggtttggggccagagtgggcgaggcgcggaggtctggcctataaagtagtcgcggagacggggtgctggtttgcgtcgtagtctcctgcagcgtctggggtttccgttgcagtcctcggaaccaggacctcggcgtggcctagcgagttatggcgacgaaggccgtgtgcgtgctgaagggcgacggcccagtgcagggcatcatcaatttcgagcagaaggaaagtaatggaccagtgaaggtgtggggaagcattaaaggactgactgaaggcctgcatggattccatgttcatgagtttggagataatacagcaggctgtaccagtgcaggtcctcactttaatcctctatccagaaaacacggtgggccaaaggatgaagagaggcatgttggagacttgggcaatgtgactgctgacaaagatggtgtggccgatgtgtctattgaagattctgtgatctcactctcaggagaccattgcatcattggccgcacactggtggtccatgaaaaagcagatgacttgggcaaaggtggaaatgaagaaagtacaaagacaggaaacgctggaagtcgtttggcttgtggtgtaattgggatcgcccaataaacattcccttggatgtagtctgaggccccttaactcatctgttatcctgctagctgtagaaatgtatcctgataaacattaaacactgtaatcttaaaagatacttaacaaaaaaaaaacaagacaggaggaaaaaagaaaggaggaggaaaaag

SEQ ID NO: 437918 - DNA, 890 bp, Homo sapiens
gcgtgcgaggcgattggtttggggccagagtgggcgaggcgcggaggtctggcctataaagtagtcgcggagacggggtgctggtttgcgtcgtagtctcctgcagcgtctggggtttccgttgcagtcctcggaaccaggacctcggcgtggcctagcgagttatggcgacgaaggccgtgtgcgtgctgaagggcgacggcccagtgcagggcatcatcaatttcgagcagaaggaaagtaatggaccagtgaaggtgtggggaagcattaaaggactgactgaaggcctgcatggattccatgttcatgagtttggagataatacagcaggctgtaccagtgcaggtcctcactttaatcctctatccagaaaacacggtgggccaaaggatgaagagaggcatgttggagacttgggcaatgtgactgctgacaaagatggtgtggccgatgtgtctattgaagattctgtgatctcactctcaggagaccattgcatcattggccgcacactggtggtccatgaaaaagcagatgacttgggcaaaggtggaaatgaagaaagtacaaagacaggaaacgctggaagtcgtttggcttgtggtgtaattgggatcgcccaataaacattcccttggatgtagtctgaggccccttaactcatctgttatcctgctagctgtagaaatgtatcctgataaacattaaacactgtaatcttaaaagaaaaacaccacccacaaataaacaaaagaaaaaaaaaaccgggggttttttgggggggggggaaaaaggggttataaagggccgggtcaggtttccggcccctttttttttccaccaggggaaaaccgggggccccagggggggtaaattaacgggtacta

SEQ ID NO: 437919 - DNA, 927 bp, Homo sapiens
ctctctctctctctctctctctctctctctctctctctctctctctcgcagcgtctggggtttccgttgcagtcctcggaaccaggacctcggcgtggcctagcgagttatggcgacgaaggccgtgtgcgtgctgaagggcgacggcccagtgcagggcatcatcaatttcgagcagaaggaaagtaatggaccagtgaaggtgtggggaagcattaaaggactgactgaaggcctgcatggattccatgttcatgagtttggagataatacagcaggctgtaccagtgcaggtcctcactttaatcctctatccagaaaacacggtgggccaaaggatgaagagaggcatgttggagacttgggcaatgtgactgctgacaaagatggtgtggccgatgtgtctattgaagattctgtgatctcactctcaggagaccattgcatcattggccgcacactggtggtccatgaaaaagcagatgacttgggcaaaggtggaaatgaagaaagtacaaagacaggaaacgctggaagtcgtttggcttgtggtgtaattgggatcgcccaataaacattcccttggatgtagtctgaggccccttaactcatctgttatcctgctagctgtagaaatgtatcctgataaacattaaacactgtaatcttaaaagtgtaattgtgtgactttttcagagttgctttaaagtacctgtagtgagaaactgatttatgatcacttggaagatttgtatagttttataaaactcagttaaaatgtctgtttcaatgacctgtattttgccagacttaaatcacagatgggtattaaacttgtcagaatttctttgtcattcaagcctgtgaataaaaaccctgtatggcacttattatgaggctattaaaagaatccaaattcaaactaaa

SEQ ID NO: 437920 - DNA, 1076 bp, Homo sapiens
gcgtgcgaggcgattggtttggggccagagtgggcgaggcgcggaggtctggcctataaagtagtcgcggagacggggtgctggtttgcgtcgtagtctcctgcagcgtctggggtttccgttgcagtcctcggaaccaggacctcggcgtggcctagcgagttatggcgacgaaggccgtgtgcgtgctgaagggcgacggcccagtgcagggcatcatcaatttcgagcagaaggaaagtaatggaccagtgaaggtgtggggaagcattaaaggactgactgaaggcctgcatggattccatgttcatgagtttggagataatacagcaggctgtaccagtgcaggtcctcactttaatcctctatccagaaaacacggtgggccaaaggatgaagagaggcatgttggagacttgggcaatgtgactgctgacaaagatggtgtggccgatgtgtctattgaagattctgtgatctcactctcaggagaccattgcatcattggccgcacactggtggtccatgaaaaagcagatgacttgggcaaaggtggaaatgaagaaagtacaaagacaggaaacgctggaagtcgtttggcttgtggtgtaattgggatcgcccaataaacattcccttggatgtagtctgaggccccttaactcatctgttatcctgctagctgtagaaatgtatcctgataaacattaaacactgtaatcttaaaagtgtaattgtgtgactttttcagagttgctttaaagtacctgtagtgagaaactgatttatgatcacttggaagatttgtatagttttataaaactcagttaaaatgtctgtttcaatgacctgtattttgccagacttaaatcacagatgggtattaaacttgtcagaatttctttgtcattcaagcctgtgaataaaaaccctgtatggcacttattatgaggctattaaaagaatccaaattcaaactaaaaaaaacaaacaacaaaacaacaacataggtacacaaacaacaacatacaaacaaagcaaaaaagaacagaacagcaacaacactataacacagc

SEQ ID NO: 437921 - DNA, 1018 bp, Homo sapiens
gcgtgcgaggcgattggtttggggccagagtgggcgaggcgcggaggtctggcctataaagtagtcgcggagacggggtgctggtttgcgtcgtagtctcctgcagcgtctggggtttccgttgcagtcctcggaaccaggacctcggcgtggcctagcgagttatggcgacgaaggccgtgtgcgtgctgaagggcgacggcccagtgcagggcatcatcaatttcgagcagaaggaaagtaatggaccagtgaaggtgtggggaagcattaaaggactgactgaaggcctgcatggattccatgttcatgagtttggagataatacagcaggctgtaccagtgcaggtcctcactttaatcctctatccagaaaacacggtgggccaaaggatgaagagaggcatgttggagacttgggcaatgtgactgctgacaaagatggtgtggccgatgtgtctattgaagattctgtgatctcactctcaggagaccattgcatcattggccgcacactggtggtccatgaaaaagcagatgacttgggcaaaggtggaaatgaagaaagtacaaagacaggaaacgctggaagtcgtttggcttgtggtgtaattgggatcgcccaataaacattcccttggatgtagtctgaggccccttaactcatctgttatcctgctagctgtagaaatgtatcctgataaacattaaacactgtaatcttaaaagtgtaattgtgtgactttttcagagttgctttaaagtacctgtagtgagaaactgatttatgatcacttggaagatttgtatagttttataaaactcagttaaaatgtctgtttcaatgacctgtattttgccagacttaaatcacagatgggtattaaacttgtcagaatttctttgtcattcaagcctgtgaataaaaaccgttgggctttttggggttaaagatccattcttaaaaaaaaaagggggggggaaaattcttcggggtatggccacttttaaaggcgtt

SEQ ID NO: 437922 - DNA, 982 bp, Homo sapiens
gcgtgcgaggcgattggtttggggccagagtgggcgaggcgcggaggtctggcctataaagtagtcgcggagacggggtgctggtttgcgtcgtagtctcctgcagcgtctggggtttccgttgcagtcctcggaaccaggacctcggcgtggcctagcgagttatggcgacgaaggccgtgtgcgtgctgaagggcgacggcccagtgcagggcatcatcaatttcgagcagaaggaaagtaatggaccagtgaaggtgtggggaagcattaaaggactgactgaaggcctgcatggattccatgttcatgagtttggagataatacagcaggctgtaccagtgcaggtcctcactttaatcctctatccagaaaacacggtgggccaaaggatgaagagaggcatgttggagacttgggcaatgtgactgctgacaaagatggtgtggccgatgtgtctattgaagattctgtgatctcactctcaggagaccattgcatcattggccgcacactggtggtccatgaaaaagcagatgacttgggcaaaggtggaaatgaagaaagtacaaagacaggaaacgctggaagtcgtttggcttgtggtgtaattgggatcgcccaataaacattcccttggatgtagtctgaggccccttaactcatctgttatcctgctagctgtagaaatgtatcctgataaacattaaacactgtaatcttaaaagtgtaattgtgtgactttttcagagttgctttaaagtacctgtagtgagaaactgatttatgatcacttggaagatttgtatagttttataaaactcagttaaaatgtctgtttcaatgacctgtattttgccagacttaaatcacagatgggtattaaacttgtcagaatttctttgtcattcaagcctgtgaataaaaaccctgtatggcacttattatgaggctattaaaagaatccaaattcaaactaaa

SEQ ID NO: 437923 - DNA, 3223 bp, Homo sapiens
ggcgaccgtggggaggtgccgccggggtcgcaggtgagcggttctatgctggaggaggcggccagggaagcggcggctccgtgaccagtgggtgccctcgcagtgggtagggtcccggaggggtcagcggcaattggcgcaacgcttgctgccgggtttggtccaagggctgcgacgtagcgggactgcacgctcgggagaagtgccacgcgcgtctgtcgcctgaccggggaggctggggagggcccaggccacggaaacaagactgcagaagtttctgggcactcagtcgggactctcatttaatacccagagagaggagatcttccaggttgccccgactcccaccgggactcctaccagcagcaacctcatcattgtggccgaggcaggaattatccagactgccttgccactagatgaatggaagacaatgatttgaactaagggccagcaaagaattatccctggtttttgtgctttgcagcattcctcaaattgttttcacatctcttaccataaaaactgcattgaaattgaaaatgaagcagttgaaaagaaaaaggaaaagcaattttagtgttcaagaaactcagacccttttgaaagaaattacgaaaaggaaagaagtcattttttccaagcagctcaatacaacaattaatgtgatgaagcgaatggcttgggaagagattgcacagtgtgtgaatgctgtaggagaaggagaacagaggacagggacagaggtgaaaagaaggtaccttgactggcgagcacttatgaagagaaagaggatgaaggccaacattaagctggttggttcaggatttccccttccctcctctgatttggatgactctctcactgaagagatagatgaaaagattggattccgaaatgatgcaaattttgactggcaaaatgtggcagatttcagggatgcaggtggatccttaactgaggtcaaggtggaagaggaagaaagggatccgcagagtcctgaatttgaaattgaggaggaggaagaaatgttgtcatccgtcataccagattccaggagagaaaatgaacttcccgatttcccccacattgatgagttttttacccttaactcaacaccatctagatctgcatatgatgagcctcatttgctcgtaaatattgagaaacagaaactagagttggaaaaacgacgactggatatcgaggccgaaaggctgcaggtagaaaaggaacgcctacaaatcgagaaagagaggctgcggcatttagacatggaacatgagcggcttcagctagagaaggagcggctgcagattgaaagagaaaagttgaggttacagatagtcaattcagagaaaccgtccttggaaaatgaacttggtcaaggagaaaaatccatgcttcaaccacaggacatagaaacagagaagttaaaacttgagcgagaacgcttgcaactggaaaaggataggctgcagtttttgaagtttgaatctgagaagctgcagattgaaaaggaacgcttacaggtagagaaagacagacttcgaattcagaaagaaggacacttgcagtgatttttccaggcttccatttagcaaatgtttgaaaactctagatttttctcatatcaggtgatataatgatggttgctggattagctgtggtttcttgtctaatgtcagtgttcagtaggaaaaagttatatgtggataactgtatgcctaagtagtatataaaagctgtgccctagcgtaaacagtatagcagaaacttactgtgctggactctttaccttataatattacatagagtcttgtattgtctgtgtacccagagtttacaattatgtccatataaaattctagcccagaagttctcatctggggtagattttggccttcagaagaccaatttggtgatgtctggagacatgttgggttgtcaaaactggggtggggaaaaggttgctactgtgcaatgcatacctcctcaacacccccccacactcagtaaagaattttccaacccaaaatatcattagtcctgaggttgagaaaccctgtcctagcctaactgtgtacctctatagctatgttttatagttttagaatattaaaacctcagatatttatgtgggtaggtacttaaatggccaaaaactttaactatgaaatgttactgtgtagtatattgaatataggaagtgatgaagattataggtattttattcccatgtttccatctataaatagccttctcagattcagaaaacaatacagagaacatcagaaattttctaaaatgggtcactttgaaaagaattctttttctcactattaatgctttagaagcaagacgcaattttaaagctttagttccttttctttcagtcattgtcttagtttgggtacaaaaatgtcatttcagtaatgtactgaaatcttataagtgaatagttgaagctagtaaaaatgataccagtataaaaatggtacttgtagtccatgagcttgaacccaatgactgattgtttgacttttaaaataagtaatagcagccatttgggagtagggggtaggtggggaagatgtactccgtatcaaataataatgatgttgaaataatgatagtaggtatgtattatggattggagaagcacttattacactatctaacctaatatgtagaacaattcttgagagttgtatctgtcgttatttctgaatgtgaagctcagagaagtgacacagagtaaatggctgatcttctatattgtagtatattttgtccttccctcttccctgaggaacaaagcacgtatctttagtctctttgatatttattctgagaccaagggcttgcttgacctgatgattttccttcagctctctgaaggtgctttttccacaatccaagtgattctgatacacactaaagttgagaatcactgcactagatcactttgtgttttctgattttcaaggttgatacatagctttaatacagctcttctgttgacagttattactttaattttgcatttgttccttgtaagaatggctggaaactgtgtgttgacatttgaggatgggtatgcaaggaaaaaatatacttctgtttacttactctgactttgaaatagtgttatttttctatatctgaaataaatgcttctaccatagaaataaatttgcctatactatctgagaatttgtaa

SEQ ID NO: 437924 - DNA, 1713 bp, Homo sapiens
  misc_feature (804)..(804): n is a, c, g, or t
ggcgaccgtggggaggtgccgccggggtcgcaggtgagcggttctatgctggaggaggcggccagggaagcggcggctccgtgaccagtgggtgccctcgcagtgggtagggtcccggaggggtcagcggcaattggcgcaacgcttgctgccgggtttggtccaagggctgcgacgtagcgggactgcacgctcgggagaagtgccacgcgcgtctgtcgcctgaccggggaggctggggagggcccaggccacggaaacaagactgcagaagtttctgggcactcagtcgggactctcatttaatacccagagagaggagatcttccaggttgccccgactcccaccgggactcctaccagcagcaacctcatcattgtggccgaggcaggtgcgcgcccctgctcccctgggtggccttccgggagcccagtctaactcgattcttcccaggggctctttttggacggtcccaaaggaggcagcgggagggaggtgaaagatactttgataaccgtcgacccataagtatacttgttatgcacctaccacgagttttagagaagaacatactttttggcagggaagtgaatcccctataagaatataggggaggggaaagccacactttaaagagaatttgggtagggtttgatattgtagatttgtgatgcttttcttcttgaactgcttaactaatttaccctcaaatttttttgatccggaacttgccgtctggtttttctcagacttcttaattctgacttatcatgaagtatctaggaacttcattctcaagtttnagtgcttgtaaaaagttgcctggttatattatgccattggcagtacatcatcttcacaaggattacgtaagtgaactacatctcattcctgtttccaactagtgaagaacgattgtgaaatgggattttagaaaatggctgttctctgtgattgggcatagaaggtttgtaagttttagagactgcagctgttgaatcctttctgctaagagagcgatgacaggcaatagaaaagggatagtgtttgacatctaaaatgacatattttcacattttatgaggtgttatatccccagcaccaaaaatagtgcctttcacacagtaggagctcagtaagtattttttgaggaaattattggggaatgaatggatggtagaaaacccaagcttctgttacttggataccggcatataaaggagaggacaggaagacaaacatttctggaaatggcttttatccaggaattatccagactgccttgccactagatgaatggaagacaatgatttgaactaagggccagcaaagaattatccctggtttttgtgctttgcagcattcctcaaattgttttcacatctcttaccataaaaactgcattgaaattgaaaatgaagcagttgaaaagaaaaaggaaaagcaattttagtgttcaagaaactcagacccttttgaaagaaattacgaaaaggaaagaagtcattttttccaagcagctcaatacacactcatgtgcggaggaaggttgggacagatgcccgcgtggactccgtagcaacgggaacgagccgggcccagggaaacagtcctgatgggaccctgaaaaaaggtaggccctaccgggggcggaaaccccccccgatggagaacacccacggggcccaacaataccggagccaccggccccg

SEQ ID NO: 437925 - DNA, 4097 bp, Homo sapiens
  misc_feature (804)..(804): n is a, c, g, or t
ggcgaccgtggggaggtgccgccggggtcgcaggtgagcggttctatgctggaggaggcggccagggaagcggcggctccgtgaccagtgggtgccctcgcagtgggtagggtcccggaggggtcagcggcaattggcgcaacgcttgctgccgggtttggtccaagggctgcgacgtagcgggactgcacgctcgggagaagtgccacgcgcgtctgtcgcctgaccggggaggctggggagggcccaggccacggaaacaagactgcagaagtttctgggcactcagtcgggactctcatttaatacccagagagaggagatcttccaggttgccccgactcccaccgggactcctaccagcagcaacctcatcattgtggccgaggcaggtgcgcgcccctgctcccctgggtggccttccgggagcccagtctaactcgattcttcccaggggctctttttggacggtcccaaaggaggcagcgggagggaggtgaaagatactttgataaccgtcgacccataagtatacttgttatgcacctaccacgagttttagagaagaacatactttttggcagggaagtgaatcccctataagaatataggggaggggaaagccacactttaaagagaatttgggtagggtttgatattgtagatttgtgatgcttttcttcttgaactgcttaactaatttaccctcaaatttttttgatccggaacttgccgtctggtttttctcagacttcttaattctgacttatcatgaagtatctaggaacttcattctcaagtttnagtgcttgtaaaaagttgcctggttatattatgccattggcagtacatcatcttcacaaggattacgtaagtgaactacatctcattcctgtttccaactagtgaagaacgattgtgaaatgggattttagaaaatggctgttctctgtgattgggcatagaaggtttgtaagttttagagactgcagctgttgaatcctttctgctaagagagcgatgacaggcaatagaaaagggatagtgtttgacatctaaaatgacatattttcacattttatgaggtgttatatccccagcaccaaaaatagtgcctttcacacagtaggagctcagtaagtattttttgaggaaattattggggaatgaatggatggtagaaaacccaagcttctgttacttggataccggcatataaaggagaggacaggaagacaaacatttctggaaatggcttttatccaggaattatccagactgccttgccactagatgaatggaagacaatgatttgaactaagggccagcaaagaattatccctggtttttgtgctttgcagcattcctcaaattgttttcacatctcttaccataaaaactgcattgaaattgaaaatgaagcagttgaaaagaaaaaggaaaagcaattttagtgttcaagaaactcagacccttttgaaagaaattacgaaaaggaaagaagtcattttttccaagcagctcaatacaacaattaatgtgatgaagcgaatggcttgggaagagattgcacagtgtgtgaatgctgtaggagaaggagaacagaggacagggacagaggtgaaaagaaggtaccttgactggcgagcacttatgaagagaaagaggatgaaggccaacattaagctggttggttcaggatttccccttccctcctctgatttggatgactctctcactgaagagatagatgaaaagattggattccgaaatgatgcaaattttgactggcaaaatgtggcagatttcagggatgcaggtggatccttaactgaggtcaaggtggaagaggaagaaagggatccgcagagtcctgaatttgaaattgaggaggaggaagaaatgttgtcatccgtcataccagattccaggagagaaaatgaacttcccgatttcccccacattgatgagttttttacccttaactcaacaccatctagatctgcatatgatgagcctcatttgctcgtaaatattgagaaacagaaactagagttggaaaaacgacgactggatatcgaggccgaaaggctgcaggtagaaaaggaacgcctacaaatcgagaaagagaggctgcggcatttagacatggaacatgagcggcttcagctagagaaggagcggctgcagattgaaagagaaaagttgaggttacagatagtcaattcagagaaaccgtccttggaaaatgaacttggtcaaggagaaaaatccatgcttcaaccacaggacatagaaacagagaagttaaaacttgagcgagaacgcttgcaactggaaaaggataggctgcagtttttgaagtttgaatctgagaagctgcagattgaaaaggaacgcttacaggtagagaaagacagacttcgaattcagaaagaaggacacttgcagtgatttttccaggcttccatttagcaaatgtttgaaaactctagatttttctcatatcaggtgatataatgatggttgctggattagctgtggtttcttgtctaatgtcagtgttcagtaggaaaaagttatatgtggataactgtatgcctaagtagtatataaaagctgtgccctagcgtaaacagtatagcagaaacttactgtgctggactctttaccttataatattacatagagtcttgtattgtctgtgtacccagagtttacaattatgtccatataaaattctagcccagaagttctcatctggggtagattttggccttcagaagaccaatttggtgatgtctggagacatgttgggttgtcaaaactggggtggggaaaaggttgctactgtgcaatgcatacctcctcaacacccccccacactcagtaaagaattttccaacccaaaatatcattagtcctgaggttgagaaaccctgtcctagcctaactgtgtacctctatagctatgttttatagttttagaatattaaaacctcagatatttatgtgggtaggtacttaaatggccaaaaactttaactatgaaatgttactgtgtagtatattgaatataggaagtgatgaagattataggtattttattcccatgtttccatctataaatagccttctcagattcagaaaacaatacagagaacatcagaaattttctaaaatgggtcactttgaaaagaattctttttctcactattaatgctttagaagcaagacgcaattttaaagctttagttccttttctttcagtcattgtcttagtttgggtacaaaaatgtcatttcagtaatgtactgaaatcttataagtgaatagttgaagctagtaaaaatgataccagtataaaaatggtacttgtagtccatgagcttgaacccaatgactgattgtttgacttttaaaataagtaatagcagccatttgggagtagggggtaggtggggaagatgtactccgtatcaaataataatgatgttgaaataatgatagtaggtatgtattatggattggagaagcacttattacactatctaacctaatatgtagaacaattcttgagagttgtatctgtcgttatttctgaatgtgaagctcagagaagtgacacagagtaaatggctgatcttctatattgtagtatattttgtccttccctcttccctgaggaacaaagcacgtatctttagtctctttgatatttattctgagaccaagggcttgcttgacctgatgattttccttcagctctctgaaggtgctttttccacaatccaagtgattctgatacacactaaagttgagaatcactgcactagatcactttgtgttttctgattttcaaggttgatacatagctttaatacagctcttctgttgacagttattactttaattttgcatttgttccttgtaagaatggctggaaactgtgtgttgacatttgaggatgggtatgcaaggaaaaaatatacttctgtttacttactctgactttgaaatagtgttatttttctatatctgaaataaatgcttctaccatagaaataaatttgcctatactatctgagaatttgtaa

SEQ ID NO: 437926 - DNA, 3582 bp, Homo sapiens
ggcgaccgtggggaggtgccgccggggtcgcaggtgagcggttctatgctggaggaggcggccagggaagcggcggctccgtgaccagtgggtgccctcgcagtgggtagggtcccggaggggtcagcggcaattggcgcaacgcttgctgccgggtttggtccaagggctgcgacgtagcgggactgcacgctcgggagaagtgccacgcgcgtctgtcgcctgaccggggaggctggggagggcccaggccacggaaacaagactgcagaagtttctgggcactcagtcgggactctcatttaatacccagagagaggagatcttccaggttgccccgactcccaccgggactcctaccagcagcaacctcatcattgtggccgaggcaggaattatccagactgccttgccactagatgaatggaagacaatgatttgaactaagggccagcaaagaattatccctggtttttgtgctttgcagcattcctcaaattgttttcacatctcttaccataaaaactgcattgaaattgaaaatgaagcagttgaaaagaaaaaggaaaagcaattttagtgttcaagaaactcagacccttttgaaagaaattacgaaaaggaaagaagtcattttttccaagcagctcaatacaacaattaatgtgatgaagcgaatggcttgggaagagattgcacagtgtgtgaatgctgtaggagaaggagaacagaggacagggacagaggtgaaaagaaggtaccttgactggcgagcacttatgaagagaaagaggatgaaggccaacattaagctggttggttcaggatttccccttccctcctctgatttggatgactctctcactgaagagatagatgaaaagattggattccgaaatgatgcaaattttgactggcaaaatgtggcagatttcagggatgcaggtggatccttaactgaggtcaaggtggaagaggaagaaagggatccgcagagtcctgaatttgaaattgaggaggaggaagaaatgttgtcatccgtcataccagattccaggagagaaaatgaacttcccgatttcccccacattgatgagttttttacccttaactcaacaccatctagatctgcatatgatgagcctcatttgctcgtaaatattgagaaacagaaactagagttggaaaaacgacgactggatatcgaggccgaaaggctgcaggtagaaaaggaacgcctacaaatcgagaaagagaggctgcggcatttagacatggaacatgagcggcttcagctagagaaggagcggctgcagattgaaagagaaaagttgaggttacagatagtcaattcagagaaaccgtccttggaaaatgaacttggtcaaggagaaaaatccatgcttcaaccacaggacatagaaacagagaagttaaaacttgagcgagaacgcttgcaactggaaaaggataggctgcagtttttgaagtttgaatctgagaagctgcagattgaaaaggaacgcttacaggtagagaaagacagacttcgaattcagaaagaaggacacttgcagtgatttttccaggcttccatttagcaaatgtttgaaaactctagatttttctcatatcaggtgatataatgatggttgctggattagctgtggtttcttgtctaatgtcagtgttcagtaggaaaaagttatatgtggataactgtatgcctaagtagtatataaaagctgtgccctagcgtaaacagtatagcagaaacttactgtgctggactctttaccttataatattacatagagtcttgtattgtctgtgtacccagagtttacaattatgtccatataaaattctagcccagaagttctcatctggggtagattttggccttcagaagaccaatttggtgatgtctggagacatgttgggttgtcaaaactggggtggggaaaaggttgctactgtgcaatgcatacctcctcaacacccccccacactcagtaaagaattttccaacccaaaatatcattagtcctgaggttgagaaaccctgtcctagcctaactgtgtacctctatagctatgttttatagttttagaatattaaaacctcagatatttatgtgggtaggtacttaaatggccaaaaactttaactatgaaatgttactgtgtagtatattgaatataggaagtgatgaagattataggtattttattcccatgtttccatctataaatagccttctcagattcagaaaacaatacagagaacatcagaaattttctaaaatgggtcactttgaaaagaattctttttctcactattaatgctttagaagcaagacgcaattttaaagctttagttccttttctttcagtcattgtcttagtttgggtacaaaaatgtcatttcagtaatgtactgaaatcttataagtgaatagttgaagctagtaaaaatgataccagtataaaaatggtacttgtagtccatgagcttgaacccaatgactgattgtttgacttttaaaataagtaatagcagccatttgggagtagggggtaggtggggaagatgtactccgtatcaaataataatgatgttgaaataatgatagtaggtatgtattatggattggagaagcacttattacactatctaacctaatatgtagaacaattcttgagagttgtatctgtcgttatttctgaatgtgaagctcagagaagtgacacagagtaaatggctgatcttctatattgtagtatattttgtccttccctcttccctgaggaacaaagcacgtatctttagtctctttgatatttattctgagaccaagggcttgcttgacctgatgattttccttcagctctctgaaggtgctttttccacaatccaagtgattctgatacacactaaagttgagaatcactgcactagatcactttgtgttttctgattttcaaggttgatacatagctttaatacagctcttctgttgacagttattactttaattttgcatttgttccttgtaagaatggctggaaactgtgtgttgacatttgaggatgggtatgcaaggaaaaaatatacttctgtttacttactctgactttgaaatagtgtagtatattttgtccttccctcttccctgaggaacaaagcacgtatctttagtctctttgatatttattctgagaccaagggcttgcttgacctgatgattttccttcagctctctgaaggtgctttttccacaatccaagtgattctgatacacactaaagttgagaatcactgcactagatcactttgtgtcttctgattttcaaggttgatacatagctttaatgcagctcttctgttgacagttattactttaatttttgcacagtttccgccgcgcggtgaggtcgtctagtccacagctccggaagccatgccgtccaagggcccgatgcagtccgtcgcaggacttacggacgcaagacgacaggaccagctgtggcgcactgccaacgcggcaatggctcatcaaggtagaacgggcggccctg

SEQ ID NO: 437927 - DNA, 1516 bp, Homo sapiens
cctgcgacaggtggagcgcacggggcgggcgcacggccatgtccgccgagggcgcggagccggggccggggtccgggtccgggcccgggccggggccactctgccccgaacacggccaggctctgagctggttctgcggctccgagcgacggcccgtgtgcgccgcctgcgcggggttgggcggtcgctgccgggggcaccgcatccgccgggcggaggagcgcgccgaggagctgcggaacaagattgtggaccagtgtgagaggctgcagttacagagtgctgccatcaccaagtatgtggcggacgtcctgccggggaagaatcaaagagcagtgagcatggccagtgcagcgagggaactggttatccagcggttgagtctggtgaggagtctttgcgagagcgaggagcagcggttactggaacaggtgcatggcgaagaggagcgggcccaccagagcatcctgacacagcgggtgcactgggccgaggcgctgcagaaacttgacaccatccgcactggcctggtgggcatgcttactcacctggatgacctccagctgattcagaaggagcaagagattttcgagaggaccgaagaagcagagggcattttggatccccaggagtcggaaatgttaaactttaatgagaagtgcactcggagcccactactgacccaactctgggcaacggcggttcttgggtctctctcaggcacagaggacatacggatcgatgagaggacagtcagccccttcctgcaattgtcagatgatcgaaagaccctgaccttcagcaccaagaagtcaaaggcctgtgcagatggcccggagcgcttcgaccactggcccaatgccctggctgccacctccttccagaatgggctccatgcctggatggtgaatgtccagaacagttgtgcctataaggtgggcgtggcttcaggccacctgccccgcaagggttctggcagtgactgccgtctgggccacaatgccttctcctgggtcttctctcgctatgatcaggagtttcgtttctcacacaatgggcagcacgagcccctggggctgctgcggggcccagcccagctgggtgtagtgctggacttgcaggttcaggagctgctcttctatgagccagcctccggcacagtgctctgtgcccatcatgtgtccttcccggggcccctcttcccagtctttgctgtggccgatcagaccatttctatcgtccgctgacctctggccacaggaagccaggtccaccgcccaccaccctttcaggccatgtttctactcagtgtgcttttcccaaatgatgtgtgtggtgtttctaagagaaacagggcccataaccagtgggcagctttaggagggatggggatctgtttcagatctaggcataacctgtaaatcacaggtgtccaaacttttggcttccctgggccacatttgaagaagaattttcttgggccacataaaatacactaacgatagctgatgagcta

SEQ ID NO: 437928 - DNA, 2328 bp, Homo sapiens
cctgcgacaggtggagcgcacggggcgggcgcacggccatgtccgccgagggcgcggagccggggccggggtccgggtccgggcccgggccggggccactctgccccgaacacggccaggctctgagctggttctgcggctccgagcgacggcccgtgtgcgccgcctgcgcggggttgggcggtcgctgccgggggcaccgcatccgccgggcggaggagcgcgccgaggagctgcggaacaagattgtggaccagtgtgagaggctgcagttacagagtgctgccatcaccaagtatgtggcggacgtcctgccggggaagaatcaaagagcagtgagcatggccagtgcagcgagggaactggttatccagcggttgagtctggtgaggagtctttgcgagagcgaggagcagcggttactggaacaggtgcatggcgaagaggagcgggcccaccagagcatcctgacacagcgggtgcactgggccgaggcgctgcagaaacttgacaccatccgcactggcctggtgggcatgcttactcacctggatgacctccagctgattcagaaggagcaagagattttcgagaggaccgaagaagcagagggcattttggatccccaggagtcggaaatgttaaactttaatgagaagtgcactcggagcccactactgacccaactctgggcaacggcggttcttgggtctctctcaggcacagaggacatacggatcgatgagaggacagtcagccccttcctgcaattgtcagatgatcgaaagaccctgaccttcagcaccaagaagtcaaaggcctgtgcagatggcccggagcgcttcgaccactggcccaatgccctggctgccacctccttccagaatgggctccatgcctggatggtgaatgtccagaacagttgtgcctataaggtgggcgtggcttcaggccacctgccccgcaagggttctggcagtgactgccgtctgggccacaatgccttctcctgggtcttctctcgctatgatcaggagtttcgtttctcacacaatgggcagcacgagcccctggggctgctgcggggcccagcccagctgggtgtagtgctggacttgcaggttcaggagctgctcttctatgagccagcctccggcacagtgctctgtgcccatcatgtgtccttcccggggcccctcttcccagtctttgctgtggccgatcagaccatttctatcgtccgctgacctctggccacaggaagccaggtccaccgcccaccaccctttcaggccatgtttctactcagtgtgcttttcccaaatgatgtgtgtggtgtttctaagagaaacagggcccataaccagtgggcagctttaggagggatggggatctgtttcagatctaggcataacctgtaaatcacaggtgtccaaacttttggcttccctgggccacatttgaagaagaattttcttgggccacataaaatacactaacgatagctgatgagctaaaaaaaaaaaaaaaagtctgtgtataatttttgtgatatctgccaccacagataagcaaaaaagtccttgcattcaaagggttggagattgctgctttgagtgctgggtacctgtggggaacctactactccctgggccttagtctcccaaatccaccatgcatctgcccctctgagggtgtcttcactttgtctctggcatctagcatggtgcctggtgcatagtgagcatgcaataaatatttggcaggtgagtggatggatagatggataggtgaatgtaggtggacaggtgactgggtggatgttgtggtctctggagaagcactgccattcagcctcctgctccagctgttcacatgcagaaatgctctcttcacaggcagagaagcctgtggctaaagtttccacatcccattaactcagtgcttttgtctttttcatgacatggcacatagagaaaatatttttttctagcacacaagagcaacctgaaaggctgctcctggccagaggactctgtcccgggggaccgtgtcctcccccatgtcctgcctaggccctcagaggaccaggggatcatgtctccaggtaacccgactgtagcccctgctggctgagctccagcctgtgcccactgataatagcagggacggccttttctcttagagcagctgataagtttccctacctgatggccccctctgacataaactgcacacctggggtgatggcttaaagccagaaagagctgagggagttaagagggccaaccttagggcacgtgggcattattaaaggtcttaaaagca

SEQ ID NO: 437929 - DNA, 2177 bp, Homo sapiens
cctgcgacaggtggagcgcacggggcgggcgcacggccatgtccgccgagggcgcggagccggggccggggtccgggtccgggcccgggccggggccactctgccccgaacacggccaggctctgagctggttctgcggctccgagcgacggcccgtgtgcgccgcctgcgcggggttgggcggtcgctgccgggggcaccgcatccgccgggcggaggagcgcgccgaggagctgcggaacaagattgtggaccagtgtgagaggctgcagttacagagtgctgccatcaccaagtatgtggcggacgtcctgccggggaagaatcaaagagcagtgagcatggccagtgcagcgagggaactggttatccagcggttgagtctggtgaggagtctttgcgagagcgaggagcagcggttactggaacaggtgcatggcgaagaggagcgggcccaccagagcatcctgacacagcgggtgcactgggccgaggcgctgcagaaacttgacaccatccgcactggcctggtgggcatgcttactcacctggatgacctccagctgattgcacagaggacatacggatcgatgagaggacagtcagccccttcctgcaattgtcagatgatcgaaagaccctgaccttcagcaccaagaagtcaaaggcctgtgcagatggcccggagcgcttcgaccactggcccaatgccctggctgccacctccttccagaatgggctccatgcctggatggtgaatgtccagaacagttgtgcctataaggtgggcgtggcttcaggccacctgccccgcaagggttctggcagtgactgccgtctgggccacaatgccttctcctgggtcttctctcgctatgatcaggagtttcgtttctcacacaatgggcagcacgagcccctggggctgctgcggggcccagcccagctgggtgtagtgctggacttgcaggttcaggagctgctcttctatgagccagcctccggcacagtgctctgtgcccatcatgtgtccttcccggggcccctcttcccagtctttgctgtggccgatcagaccatttctatcgtccgctgacctctggccacaggaagccaggtccaccgcccaccaccctttcaggccatgtttctactcagtgtgcttttcccaaatgatgtgtgtggtgtttctaagagaaacagggcccataaccagtgggcagctttaggagggatggggatctgtttcagatctaggcataacctgtaaatcacaggtgtccaaacttttggcttccctgggccacatttgaagaagaattttcttgggccacataaaatacactaacgatagctgatgagctaaaaaaaaaaaaaaaagtctgtgtataatttttgtgatatctgccaccacagataagcaaaaaagtccttgcattcaaagggttggagattgctgctttgagtgctgggtacctgtggggaacctactactccctgggccttagtctcccaaatccaccatgcatctgcccctctgagggtgtcttcactttgtctctggcatctagcatggtgcctggtgcatagtgagcatgcaataaatatttggcaggtgagtggatggatagatggataggtgaatgtaggtggacaggtgactgggtggatgttgtggtctctggagaagcactgccattcagcctcctgctccagctgttcacatgcagaaatgctctcttcacaggcagagaagcctgtggctaaagtttccacatcccattaactcagtgcttttgtctttttcatgacatggcacatagagaaaatatttttttctagcacacaagagcaacctgaaaggctgctcctggccagaggactctgtcccgggggaccgtgtcctcccccatgtcctgcctaggccctcagaggaccaggggatcatgtctccaggtaacccgactgtagcccctgctggctgagctccagcctgtgcccactgataatagcagggacggccttttctcttagagcagctgataagtttccctacctgatggccccctctgacataaactgcacacctggggtgatggcttaaagccagaaagagctgagggagttaagagggccaaccttagggcacgtgggcattattaaaggtcttaaaagca

SEQ ID NO: 437930 - DNA, 1922 bp, Homo sapiens
cctgcgacaggtggagcgcacggggcgggcgcacggccatgtccgccgagggcgcggagccggggccggggtccgggtccgggcccgggccggggccactctgccccgaacacggccaggctctgagctggttctgcggctccgagcgacggcccgtgtgcgccgcctgcgcggggttgggcggtcgctgccgggggcaccgcatccgccgggcggaggagcgcgccgaggagctgcggaacaagattgtggaccagtgtgagaggctgcagttacagagtgctgccatcaccaagtatgtggcggacgtcctgccggggaagaatcaaagagcagtgagcatggccagtgcagcgagggaactggttatccagcggttgagtctggtgaggagtctttgcgagagcgaggagcagcggttactggaacaggtgcatggcgaagaggagcgggcccaccagagcatcctgacacagcgggtgcactgggccgaggcgctgcagaaacttgacaccatccgcactggcctggtgggcatgcttactcacctggatgacctccagctgattcagaaggagcaagagattttcgagaggaccgaagaagcagagggcattttggatccccaggatttcgtttctcacacaatgggcagcacgagcccctggggctgctgcggggcccagcccagctgggtgtagtgctggacttgcaggttcaggagctgctcttctatgagccagcctccggcacagtgctctgtgcccatcatgtgtccttcccggggcccctcttcccagtctttgctgtggccgatcagaccatttctatcgtccgctgacctctggccacaggaagccaggtccaccgcccaccaccctttcaggccatgtttctactcagtgtgcttttcccaaatgatgtgtgtggtgtttctaagagaaacagggcccataaccagtgggcagctttaggagggatggggatctgtttcagatctaggcataacctgtaaatcacaggtgtccaaacttttggcttccctgggccacatttgaagaagaattttcttgggccacataaaatacactaacgatagctgatgagctaaaaaaaaaaaaaaaagtctgtgtataatttttgtgatatctgccaccacagataagcaaaaaagtccttgcattcaaagggttggagattgctgctttgagtgctgggtacctgtggggaacctactactccctgggccttagtctcccaaatccaccatgcatctgcccctctgagggtgtcttcactttgtctctggcatctagcatggtgcctggtgcatagtgagcatgcaataaatatttggcaggtgagtggatggatagatggataggtgaatgtaggtggacaggtgactgggtggatgttgtggtctctggagaagcactgccattcagcctcctgctccagctgttcacatgcagaaatgctctcttcacaggcagagaagcctgtggctaaagtttccacatcccattaactcagtgcttttgtctttttcatgacatggcacatagagaaaatatttttttctagcacacaagagcaacctgaaaggctgctcctggccagaggactctgtcccgggggaccgtgtcctcccccatgtcctgcctaggccctcagaggaccaggggatcatgtctccaggtaacccgactgtagcccctgctggctgagctccagcctgtgcccactgataatagcagggacggccttttctcttagagcagctgataagtttccctacctgatggccccctctgacataaactgcacacctggggtgatggcttaaagccagaaagagctgagggagttaagagggccaaccttagggcacgtgggcattattaaaggtcttaaaagca

SEQ ID NO: 437931 - DNA, 583 bp, Homo sapiens
ctctagattctggtatcaaatgatgcctgatttaccagcagtttagatatttgctagaaattgcttatctcatgcttcctagctcccagaggctgtgtttctaggacacgtccaatctggaggccacagatatgaccaagtagaaagagtataatcagtgctacgtataggaacaaaatgttttgtcttcattttgcccctcccaccaagtcagtgtgtaaacttgggcaactccctttttctctctgggccttatttctatcagagtttacagttgagggtcttgactgatagtaactattgttatgaaggctacagtttatagagcacttacatgctgggcactttacatgtatgattctgtttaattctcgtgatcacccagtgagaagtcctattttgacccccgttttgcagacaaggctcagagagagtaaatggcttatatgaggtcaccatgctagtgagtggtgaggaaccttttgctacctggcaggaccaggttagggcaggggtgggccctcggcaactctgagaattctttctggcacagaggacatacggatcgatgagaggacagtca

SEQ ID NO: 437932 - DNA, 802 bp, Homo sapiens
ctgggctgcggaagagggacagaaggaaatccatagcgctctcttgctggactggggaagaggagcgggcccaccagagcatcctgacacagcgggtgcactgggccgaggcgctgcagaaacttgacaccatccgcactggcctggtgggcatgcttactcacctggatgacctccagctgattagtcaggcaagggtgagggcatgaccagttggccaggctccccaaaagcctgaaaatatcgagaatgtttgtcggtatgaggagggtggaaatgagaatttggagcagggatgagtgacaaagattctttgcttggccaaactttagtcaggcttctgagccttctcccaggcccatctgtgcacttcattataaaatccagtttttgcaaaataaccctgctaagtcagtgtagccagaaacccccatccttgatatctgatcatccttgatatctgatccggttcctcatccaccaccatcccctaggtgatgtctgatcactgtgttctgtctgcagcaagaatcctgttaggtaggtttagccataatcccccttacccccaatgtttcctcttagtaattttccatccactaacccccaaccctgctccttagctataaattcctacctgcccacgctgtattcagagttgaacccagtctctctcccattgcaagaccccattgcaatgaggtcttgaataaagtctgccttactgtgctctaacaggtatcattgaataatttcttctctgacatgaggcaagggaataaaactatgattctttggcact

SEQ ID NO: 437933 - DNA, 1767 bp, Homo sapiens
  misc_feature (69)..(69): n is a, c, g, or t
aaacccgcgggaataacctggacccctttcaaaggcaaaatttcaagccaaaacagggcattgatcccnggtcggaaatgttaaactttaatgagaagtgcactcggagcccactactgacccaactctgggcaacggcggttcttgggtctctctcaggcacagaggacatacggatcgatgagaggacagtcagccccttcctgcaattgtcagatgatcgaaagaccctgaccttcagcaccaagaagtcaaaggcctgtgcagatggcccggagcgcttcgaccactggcccaatgccctggctgccacctccttccagaatgggctccatgcctggatggtgaatgtccagaacagttgtgcctataaggtgggcgtggcttcaggccacctgccccgcaagggttctggcagtgactgccgtctgggccacaatgccttctcctgggtcttctctcgctatgatcaggagtttcgtttctcacacaatgggcagcacgagcccctggggctgctgcggggcccagcccagctgggtgtagtgctggacttgcaggttcaggagctgctcttctatgagccagcctccggcacagtgctctgtgcccatcatgtgtccttcccggggcccctcttcccagtctttgctgtggccgatcagaccatttctatcgtccgctgacctctggccacaggaagccaggtccaccgcccaccaccctttcaggccatgtttctactcagtgtgcttttcccaaatgatgtgtgtggtgtttctaagagaaacagggcccataaccagtgggcagctttaggagggatggggatctgtttcagatctaggcataacctgtaaatcacaggtgtccaaacttttggcttccctgggccacatttgaagaagaattttcttgggccacataaaatacactaacgatagctgatgagctaaaaaaaaaaaaaaaagtctgtgtataatttttgtgatatctgccaccacagataagcaaaaaagtccttgcattcaaagggttggagattgctgctttgagtgctgggtacctgtggggaacctactactccctgggccttagtctcccaaatccaccatgcatctgcccctctgagggtgtcttcactttgtctctggcatctagcatggtgcctggtgcatagtgagcatgcaataaatatttggcaggtgagtggatggatagatggataggtgaatgtaggtggacaggtgactgggtggatgttgtggtctctggagaagcactgccattcagcctcctgctccagctgttcacatgcagaaatgctctcttcacaggcagagaagcctgtggctaaagtttccacatcccattaactcagtgcttttgtctttttcatgacatggcacatagagaaaatatttttttctagcacacaagagcaacctgaaaggctgctcctggccagaggactctgtcccgggggaccgtgtcctcccccatgtcctgcctaggccctcagaggaccaggggatcatgtctccaggtaacccgactgtagcccctgctggctgagctccagcctgtgcccactgataatagcagggacggccttttctcttagagcagctgataagtttccctacctgatggccccctctgacataaactgcacacctggggtgatggcttaaagccagaaagagctgagggagttaagagggccaaccttagggcacgtgggcattattaaaggtcttaaaagca

SEQ ID NO: 437934 - DNA, 2345 bp, Homo sapiens
cctgcgacaggtggagcgcacggggcgggcgcacggccatgtccgccgagggcgcggagccggggccggggtccgggtccgggcccgggccggggccactctgccccgaacacggccaggctctgagctggttctgcggctccgagcgacggcccgtgtgcgccgcctgcgcggggttgggcggtcgctgccgggggcaccgcatccgccgggcggaggagcgcgccgaggagctgcggaacaagattgtggaccagtgtgagaggctgcagttacagagtgctgccatcaccaagtatgtggcggacgtcctgccggggaagaatcaaagagcagtgagcatggccagtgcagcgagggaactggttatccagcggttgagtctggtgaggagtctttgcgagagcgaggagcagcggttactggaacaggtgcatggcgaagaggagcgggcccaccagagcatcctgacacagcgggtgcactgggccgaggcgctgcagaaacttgacaccatccgcactggcctggtgggcatgcttactcacctggatgacctccagctgattcagaaggagcaagagattttcgagaggaccgaagaagcagagggcattttggatccccaggagtcggaaatgttaaactttaatgagaagtgcactcggagcccactactgacccaactctgggcaacggcggttcttgggtctctctcaggcacagaggacatacggatcgatgagaggacagtcagccccttcctgcaattgtcagatgatcgaaagaccctgaccttcagcaccaagaagtcaaaggcctgtgcagatggcccggagcgcttcgaccactggcccaatgccctggctgccacctccttccagaatgggctccatgcctggatggtgaatgtccagaacagttgtgcctataaggtgggcgtggcttcaggccacctgccccgcaagggttctggcagtgactgccgtctgggccacaatgccttctcctgggtcttctctcgctatgatcaggagtttcgtttctcacacaatgggcagcacgagcccctggggctgctgcggggcccagcccagctgggtgtagtgctggacttgcaggttcaggagctgctcttctatgagccagcctccggcacagtgctctgtgcccatcatgtgtccttcccggggcccctcttcccagtctttgctgtggccgatcagaccatttctatcgtccgctgacctctggccacaggaagccaggtccaccgcccaccaccctttcaggccatgtttctactcagtgtgcttttcccaaatgatgtgtgtggtgtttctaagagaaacagggcccataaccagtgggcagctttaggagggatggggatctgtttcagatctaggcataacctgtaaatcacaggtgtccaaacttttggcttccctgggccacatttgaagaagaattttcttgggccacataaaatacactaacgatagctgatgagctaaaaaaaaaaaaaaaagtctgtgtataatttttgtgatatctgccaccacagataagcaaaaaagtccttgcattcaaagggttggagattgctgctttgagtgctgggtacctgtggggaacctactactccctgggccttagtctcccaaatccaccatgcatctgcccctctgagggtgtcttcactttgtctctggcatctagcatggtgcctggtgcatagtgagcatgcaataaatatttggcaggtgagtggatggatagatggataggtgaatgtaggtggacaggtgactgggtggatgttgtggtctctggagaagcactgccattcagcctcctgctccagctgttcacatgcagaaatgctctcttcacaggcagagaagcctgtggctaaagtttccacatcccattaactcagtgcttttgtctttttcatgacatggcacatagagaaaatatttttttctagcacacaagagcaacctgaaaggctgctcctggccagaggactctgtcccgggggaccgtgtcctcccccatgtcctgcctaggccctcagaggaccaggggatcatgtctccaggtaacccgactgtagcccctgctggctgagctccagcctgtgcccactgataatagcagggacggccttttctcttagagcagctgataagtttccctacctgatggccccctctgacataaactgcacacctggggtgatggcttaaagccagaaagagctgaggtacctcataagggcttgccttagcggaacgttcgcgccctctctgacgggctgatgggaacccgccataaga

SEQ ID NO: 437935 - DNA, 1802 bp, Homo sapiens
gtagggccccagcgcccgggccatggcggcggcggtggcgggagctgctgtctgagcagcggttgcggaccgagcgaacttggcccaggagcccgggcctagggagaggcgcggcggcggcgggagcgcgaacggctggagctggccttcttcgccttctcctcggctgtggagccctggtggggggtctgcgcccggtcaccatgacgacgccggcgaatgcccagaatgccagcaaaacgtgggaactgagtctgtatgagctgcaccggaccccgcaggaagccataatggatggcacagagattgctgtttcccctcggtcactgcattcagaactcatgtgccctatctgcctggacatgctgaagaatacgatgaccaccaaggagtgcctccacagattctgctctgactgcattgtcacagccctacggagcgggaacaaggagtgtcctacctgccgaaagaagctggtgtccaagcgatccctacggccagaccccaactttgatgccctgatctctaagatctatcctagccgggaggaatacgaggcccatcaagaccgagtgcttatccgcctgagccgcctgcacaaccagcaggcattgagctccagcattgaggaggggctacgcatgcaggccatgcacagggcccagcgtgtgaggcggccgataccagggtcagatcagaccacaacgatgagtgggggggaaggagagcccggggagggagaaggggatggagaagatgtgagctcagactccgcccctgactctgccccaggccctgctcccaagcgaccccgtggagggggcgcaggggggagcagtgtagggacagggggaggcggcactggtggggtgggtgggggtgccggttcggaagactctggtgaccggggagggactctgggagggggaacgctgggccccccaagccctcctggggcccccagccccccagagccaggtggagaaattgagctcgtgttccggccccaccccctgctcgtggagaagggagaatactgccagacgaggtatgtgaagacaactgggaatgccacagtggaccacctctccaagtacttggccctgcgcattgccctcgagcggaggcaacagcaggaagcaggggagccaggagggcctggagggggcgcctctgacaccggaggacctgatgggtgtggcggggagggtgggggtgccggaggaggtgacggtcctgaggagcctgctttgcccagcctggagggcgtcagtgaaaagcagtacaccatctacatcgcacctggaggcggggcgttcacgacgttgaatggctcgctgaccctggagctggtgaatgagaaattctggaaggtgtcccggccactggagctgtgctatgctcccaccaaggatccaaagtgaccccaccaggggacagccagaggaaggggaccatggggtatccctgtgtcctggtctatcaccccagcttctttgtcccccagtacccccagcccagccagccaataagaggacacaaatgaggacacgtggcttttatacaaagtatctatatgagattcttctatattgtacagagtggggcaaaacacgcccccatctgctgccttttctattgccctgcaacgtcccatctatacgaggtgttggagaaggtgaagaaccctcccattcacgcccgcctaccaacaacaaacgtgcttttttcctctttgaaaaaaaaaaagcaacacgaaaactagaagaaccagcagacagccaacaaccacaaacgtgggg

SEQ ID NO: 437936 - DNA, 1983 bp, Homo sapiens
gtagggccccagcgcccgggccatggcggcggcggtggcgggagctgctgtctgagcagcggttgcggaccgagcgaacttggcccaggagcccgggcctagggagaggcgcggcggcggcgggagcgcgaacggctggagctggccttcttcgccttctcctcggctgtggagccctggtggggggtctgcgcccggtcaccatgacgacgccggcgaatgcccagaatgccagcaaaacgtgggaactgagtctgtatgagctgcaccggaccccgcaggaagccataatggatggcacagagattgctgtttcccctcggtcactgcattcagaactcatgtgccctatctgcctggacatgctgaagaatacgatgaccaccaaggagtgcctccacagattctgctctgactgcattgtcacagccctacggagcgggaacaaggagtgtcctacctgccgaaagaagctggtgtccaagcgatccctacggccagaccccaactttgatgccctgatctctaagatctatcctagccgggaggaatacgaggcccatcaagaccgagtgcttatccgcctgagccgcctgcacaaccagcaggcattgagctccagcattgaggaggggctacgcatgcaggccatgcacagggcccagcgtgtgaggcggccgataccagggtcagatcagaccacaacgatgagtgggggggaaggagagcccggggagggagaaggggatggagaagatgtgagctcagactccgcccctgactctgccccaggccctgctcccaagcgaccccgtggagggggcgcaggggggagcagtgtagggacagggggaggcggcactggtggggtgggtgggggtgccggttcggaagactctggtgaccggggagggactctgggagggggaacgctgggccccccaagccctcctggggcccccagccccccagagccaggtggagaaattgagctcgtgttccggccccaccccctgctcgtggagaagggagaatactgccagacgaggtgaggagccctgtctttccccagccactgagaaaccaaagatcacctagatttccatcagaagtgggctttgcccaaacccaaaataccaccccaacccagaatccattttggaaagcccctacctccagtcctcatctgaggcgctctggctctaagcctgtcctccctcccattccaggtatgtgaagacaactgggaatgccacagtggaccacctctccaagtacttggccctgcgcattgccctcgagcggaggcaacagcaggaagcaggggagccaggagggcctggagggggcgcctctgacaccggaggacctgatgggtgtggcggggagggtgggggtgccggaggaggtgacggtcctgaggagcctgctttgcccagcctggagggcgtcagtgaaaagcagtacaccatctacatcgcacctggaggcggggcgttcacgacgttgaatggctcgctgaccctggagctggtgaatgagaaattctggaaggtgtcccggccactggagctgtgctatgctcccaccaaggatccaaagtgaccccaccaggggacagccagaggaaggggaccatggggtatccctgtgtcctggtctatcaccccagcttctttgtcccccagtacccccagcccagccagccaataagaggacacaaatgaggacacgtggcttttatacaaagtatctatatgagattcttctatattgtacagagtggggcaaaacacgcccccatctgctgccttttctattgccctgcaacgtcccatctatacgaggtgttggagaaggtgaagaaccctcccattcacgcccgcctaccaacaacaaacgtgcttttttcctctttgaaaaaaaaaaagcaacacgaaaactagaagaaccagcagacagccaacaaccacaaacgtgggg

SEQ ID NO: 437937 - DNA, 2957 bp, Homo sapiens
gtagggccccagcgcccgggccatggcggcggcggtggcgggagctgctgtctgagcagcggttgcggaccgagcgaacttggcccaggagcccgggcctagggagaggcgcggcggcggcgggagcgcgaacggctggagctggccttcttcgccttctcctcggctgtggagccctggtggggggtctgcgcccggtcaccatgacgacgccggcgaatgcccagaatgccagcaaaacgtgggaactgagtctgtatgagctgcaccggaccccgcaggaagccataatggatggcacagagattgctgtttcccctcggtcactgcattcagaactcatgtgccctatctgcctggacatgctgaagaatacgatgaccaccaaggagtgcctccacagattctgctctgactgcattgtcacagccctacggagcgggtaataggagagacatgtttgagatgagatgaaggggtacaaagttagggccctctcactggtcttggttcagcctaggcttcagttcccttgactgaccactcagggcttcccttctcctaccccaggaacaaggagtgtcctacctgccgaaagaagctggtgtccaagcgatccctacggccagaccccaactttgatgccctgatctctaagatctatcctagccgggaggaatacgaggcccatcaagaccgagtgcttatccgcctgagccgcctgcacaaccagcaggcattgagctccagcattgaggaggggctacgcatgcaggccatgcacaggtgtgagggtcaggagagaagcagaactgatgggatgggtccgtgggtcagtccttgttgcctgctagcttctaagcctcagcatcctaggagctgaccacagactgatcattagggctggaaatcatgggtgtaaattgcagtttcttagtaaacaactggccctgctcttcttaagaaaaatatagggctgggcacagtgactcacatctgtaatcccagcactttgggaggtgaggatgggaggatcacttgagcccaggagtttgagaccaccttgaataacatagggaaatctcatctctacaacaaattaaacatttagctgggcatggtggcacatgcctgtagtcctaccttcttgggaggctgaggtaataggatcacttgagcctgggaagaaagtggatgttgcagtgaaccatgatcacaccactgcacactgcactccagcctgctgggcgacagaacaaggccctgtcacaaaaaaaaaaaaaggaaaaatgtagtttaccccatgactttctagaagttagaacagtagagcgattttgagaataagccccggattcatactgctggaagttaaatcacctcctaggccagcatctctcagtctttcatgtgtatccagattacctgtagatcttcagatgcaaactgtgattcagtaggtctagagttgggcccgagagtctgcatttcacaagctcacaggggatgtgtatgctgctaccgcactttgagaggtgacagcctatgatcactaacaagttacttaacctctctaagcctcagtttcctcagccataaaatagaggtaatataattacctgtgtcataggattcattgtattaggtaaggggattggtgcaaaacacttagtatactgagtgcttagcacattgtgtttaataaatattaggtatcgtcattaggatttttcttatctcttaattctctgaagtttaaagtctaagccctttatcctggatgccttctaaccttaaccacttgcttctacagggcccagcgtgtgaggcggccgataccagggtcagatcagaccacaacgatgagtgggggggaaggagagcccggggagggagaaggggatggagaagatgtgagctcagactccgcccctgactctgccccaggccctgctcccaagcgaccccgtggagggggcgcaggggggagcagtgtagggacagggggaggcggcactggtggggtgggtgggggtgccggttcggaagactctggtgaccggggagggactctgggagggggaacgctgggccccccaagccctcctggggcccccagccccccagagccaggtggagaaattgagctcgtgttccggccccaccccctgctcgtggagaagggagaatactgccagacgaggtatgtgaagacaactgggaatgccacagtggaccacctctccaagtacttggccctgcgcattgccctcgagcggaggcaacagcaggaagcaggggagccaggagggcctggagggggcgcctctgacaccggaggacctgatgggtgtggcggggagggtgggggtgccggaggaggtgacggtcctgaggagcctgctttgcccagcctggagggcgtcagtgaaaagcagtacaccatctacatcgcacctggaggcggggcgttcacgacgttgaatggctcgctgaccctggagctggtgaatgagaaattctggaaggtgtcccggccactggagctgtgctatgctcccaccaaggatccaaagtgaccccaccaggggacagccagaggaaggggaccatggggtatccctgtgtcctggtctatcaccccagcttctttgtcccccagtacccccagcccagccagccaataagaggacacaaatgaggacacgtggcttttatacaaagtatctatatgagattcttctatattgtacagagtggggcaaaacacgcccccatctgctgccttttctattgccctgcaacgtcccatctatacgaggtgttggagaaggtgaagaaccctcccattcacgcccgcctaccaacaacaaacgtgcttttttcctctttgaaaaaaaaaaagcaacacgaaaactagaagaaccagcagacagccaacaaccacaaacgtgggg

SEQ ID NO: 437938 - DNA, 1587 bp, Homo sapiens
ggctgctgtttctaaaacccctttccctctaacccacaccacctttctactcactgatgccttcaggaagccataatggatggcacagagattgctgtttcccctcggtcactgcattcagaactcatgtgccctatctgcctggacatgctgaagaatacgatgaccaccaaggagtgcctccacagattctgctctgactgcattgtcacagccctacggagcgggaacaaggagtgtcctacctgccgaaagaagctggtgtccaagcgatccctacggccagaccccaactttgatgccctgatctctaagatctatcctagccgggaggaatacgaggcccatcaagaccgagtgcttatccgcctgagccgcctgcacaaccagcaggcattgagctccagcattgaggaggggctacgcatgcaggccatgcacagggcccagcgtgtgaggcggccgataccagggtcagatcagaccacaacgatgagtgggggggaaggagagcccggggagggagaaggggatggagaagatgtgagctcagactccgcccctgactctgccccaggccctgctcccaagcgaccccgtggagggggcgcaggggggagcagtgtagggacagggggaggcggcactggtggggtgggtgggggtgccggttcggaagactctggtgaccggggagggactctgggagggggaacgctgggccccccaagccctcctggggcccccagccccccagagccaggtggagaaattgagctcgtgttccggccccaccccctgctcgtggagaagggagaatactgccagacgaggtatgtgaagacaactgggaatgccacagtggaccacctctccaagtacttggccctgcgcattgccctcgagcggaggcaacagcaggaagcaggggagccaggagggcctggagggggcgcctctgacaccggaggacctgatgggtgtggcggggagggtgggggtgccggaggaggtgacggtcctgaggagcctgctttgcccagcctggagggcgtcagtgaaaagcagtacaccatctacatcgcacctggaggcggggcgttcacgacgttgaatggctcgctgaccctggagctggtgaatgagaaattctggaaggtgtcccggccactggagctgtgctatgctcccaccaaggatccaaagtgaccccaccaggggacagccagaggaaggggaccatggggtatccctgtgtcctggtctatcaccccagcttctttgtcccccagtacccccagcccagccagccaataagaggacacaaatgaggacacgtggcttttatacaaagtatctatatgagattcttctatattgtacagagtggggcaaaacacgcccccatctgctgccttttctattgccctgcaacgtcccatctatacgaggtgttggagaaggtgaagaaccctcccattcacgcccgcctaccaacaacaaacgtgcttttttcctctttgaaaaaaaaaaagcaacacgaaaactagaagaaccagcagacagccaacaaccacaaacgtgggg

SEQ ID NO: 437939 - DNA, 2829 bp, Homo sapiens
gtagggccccagcgcccgggccatggcggcggcggtggcgggagctgctgtctgagcagcggttgcggaccgagcgaacttggcccaggagcccgggcctagggagaggcgcggcggcggcgggagcgcgaacggctggagctggccttcttcgccttctcctcggctgtggagccctggtggggggtctgcgcccggtcaccatgacgacgccggcgaatgcccagaatgccagcaaaacgtgggaactgagtctgtatgagctgcaccggaccccgcaggaagccataatggatggcacagagattgctgtttcccctcggtcactgcattcagaactcatgtgccctatctgcctggacatgctgaagaatacgatgaccaccaaggagtgcctccacagattctgctctgactgcattgtcacagccctacggagcgggaacaaggagtgtcctacctgccgaaagaagctggtgtccaagcgatccctacggccagaccccaactttgatgccctgatctctaagatctatcctagccgggaggaatacgaggcccatcaagaccgagtgcttatccgcctgagccgcctgcacaaccagcaggcattgagctccagcattgaggaggggctacgcatgcaggccatgcacaggtgtgagggtcaggagagaagcagaactgatgggatgggtccgtgggtcagtccttgttgcctgctagcttctaagcctcagcatcctaggagctgaccacagactgatcattagggctggaaatcatgggtgtaaattgcagtttcttagtaaacaactggccctgctcttcttaagaaaaatatagggctgggcacagtgactcacatctgtaatcccagcactttgggaggtgaggatgggaggatcacttgagcccaggagtttgagaccaccttgaataacatagggaaatctcatctctacaacaaattaaacatttagctgggcatggtggcacatgcctgtagtcctaccttcttgggaggctgaggtaataggatcacttgagcctgggaagaaagtggatgttgcagtgaaccatgatcacaccactgcacactgcactccagcctgctgggcgacagaacaaggccctgtcacaaaaaaaaaaaaaggaaaaatgtagtttaccccatgactttctagaagttagaacagtagagcgattttgagaataagccccggattcatactgctggaagttaaatcacctcctaggccagcatctctcagtctttcatgtgtatccagattacctgtagatcttcagatgcaaactgtgattcagtaggtctagagttgggcccgagagtctgcatttcacaagctcacaggggatgtgtatgctgctaccgcactttgagaggtgacagcctatgatcactaacaagttacttaacctctctaagcctcagtttcctcagccataaaatagaggtaatataattacctgtgtcataggattcattgtattaggtaaggggattggtgcaaaacacttagtatactgagtgcttagcacattgtgtttaataaatattaggtatcgtcattaggatttttcttatctcttaattctctgaagtttaaagtctaagccctttatcctggatgccttctaaccttaaccacttgcttctacagggcccagcgtgtgaggcggccgataccagggtcagatcagaccacaacgatgagtgggggggaaggagagcccggggagggagaaggggatggagaagatgtgagctcagactccgcccctgactctgccccaggccctgctcccaagcgaccccgtggagggggcgcaggggggagcagtgtagggacagggggaggcggcactggtggggtgggtgggggtgccggttcggaagactctggtgaccggggagggactctgggagggggaacgctgggccccccaagccctcctggggcccccagccccccagagccaggtggagaaattgagctcgtgttccggccccaccccctgctcgtggagaagggagaatactgccagacgaggtatgtgaagacaactgggaatgccacagtggaccacctctccaagtacttggccctgcgcattgccctcgagcggaggcaacagcaggaagcaggggagccaggagggcctggagggggcgcctctgacaccggaggacctgatgggtgtggcggggagggtgggggtgccggaggaggtgacggtcctgaggagcctgctttgcccagcctggagggcgtcagtgaaaagcagtacaccatctacatcgcacctggaggcggggcgttcacgacgttgaatggctcgctgaccctggagctggtgaatgagaaattctggaaggtgtcccggccactggagctgtgctatgctcccaccaaggatccaaagtgaccccaccaggggacagccagaggaaggggaccatggggtatccctgtgtcctggtctatcaccccagcttctttgtcccccagtacccccagcccagccagccaataagaggacacaaatgaggacacgtggcttttatacaaagtatctatatgagattcttctatattgtacagagtggggcaaaacacgcccccatctgctgccttttctattgccctgcaacgtcccatctatacgaggtgttggagaaggtgaagaaccctcccattcacgcccgcctaccaacaacaaacgtgcttttttcctctttgaaaaaaaaaaagcaacacgaaaactagaagaaccagcagacagccaacaaccacaaacgtgggg

SEQ ID NO: 437940 - DNA, 360 bp, Homo sapiens
gtcgacgggggacaaagaagctggggtgatagaccaggacacagggataccccatggtcccccagtacccccagcccagccagccaataagaggacacaaatgaggacacgtggcttttatacaaagtatctatatgagattcttctatattgtacagagtggggcaaaacacgcccccatctgctgccttttctattgccctgcaacgtcccatctatacgaggtgttggagaaggtgaagaaccctcccattcacgcccgcctaccaacaacaaacgtgcttttttcctctttgaaaaaaaaaaagcaacacgaaaactagaagaaccagcagacagccaacaaccacaaacgtgggg

SEQ ID NO: 437941 - DNA, 614 bp, Homo sapiens
ggccgggctgaaccatggcgggcggcggcatgggggcggtggggctccgcgggcagcctggttgcgctgcacccggacggggccgaggggacctgaaagctgcggcagagcctgaccgcgccgttctccagaagagccccggccgcggctgagtcgcgctccgggtgtggacggagccggagcctccccggggctcggtgaggacacagggcccaagccccgggccttcaagtcttgaccgagcgcatccccggcccttctgcgcccacacctgagtttttgtctgtaggagtttccgcagtttgctaagaatcgacatctagaggagtactcaccacttaattgatgatcaatacacgttccttgaaagaaccgatagcatgcgatcgatacagagcatctgcactgggattgtccgccccgcctgtcagggaggcctcgggggctaatggagctgagggtatagtcggccttggaccctcgcttttttcctttcctgtactatgaagataactgccttatctccccctcaggactgttttggggattaaataggacgtttaaattaccaacgctctttgaaataaacatttcaaaattattataacccttta

SEQ ID NO: 437942 - DNA, 455 bp, Homo sapiens
catgttgagctgcaccttgtccccttccgccccagctaactcggtgaccagtggaggccacacccacgtgacacctgctgtccttgacagcagctccgacggcacctctgtggctctgcaggagccgcctccccgcctcgtgggcacacagaatcgacatctagaggagtactcaccacttaattgatgatcaatacacgttccttgaaagaaccgatagcatgcgatcgatacagagcatctgcactgggattgtccgccccgcctgtcagggaggcctcgggggctaatggagctgagggtatagtcggccttggaccctcgcttttttcctttcctgtactatgaagataactgccttatctccccctcaggactgttttggggattaaataggacgtttaaattaccaacgctctttgaaataaacatttcaaaattattataacccttta

SEQ ID NO: 437943 - DNA, 1816 bp, Homo sapiens
catgttgagctgcaccttgtccccttccgccccagctaactcggtgaccagtggaggccacacccacgtgacacctgctgtccttgacagcagctccgacggcacctctgtggctctgcaggagccgcctccccgcctcgtgggcacacagaatcgacatctagaggagtactcaccacttaattgatgatcaatacacgttccttgaaagaaccgatagcatgcgatcgatacagagcatctgcactgggattgtccgccccgcctgtcagggaggcctcgggggctaatggagctgagggtatagtcggccttggaccctcgcttttttcctttcctgtactatgaagataactgccttatctccccctcaggactgttttggggattaaataggacgtttaaattaccaacgctctttgaaataaacatttcaaaattattataaccctttagtacatgtgggaaaacgttgacattcatgttcaagtttatttttctgctggctcatttaggtttgttgaagccttgagtccctaggattgtctaagaacatgggtaaatgtgtgtggaggcctccctggaggccagagaactgccagcagccttcatggtgttaggggaacaggaacctaggagagccagggtgacatcgttttaaaatcaacaacccatcttggcgggcgcggtggctcaagcctgtaatcccagcagtttgggagaaaaaaattagccgggtgtggtggtgggcacctgtaatctcagctactcaggaggctgaagcagaattgcttgaacccaggaggcagaggttgcagtgagctgagatcacgccatggcagtctagcctgggcaacaagaatgaaactctgtctcaaaaaaataaaaataaaataaaataaactccatcttaaaaccagtgaaaccaccattgcaaaattataactgagacagtgagagatctgacctaaccaactccatcctacttttaacctccaaactgtccttgttcattcctgggtgtaggccaaactaactttggaagaaacttagtttatggtttcccgaaacaaatccttttcttgtctggagactagactgcctttgtaggactaacaaattagccacaagattagaaattatggtttagaattcatgcagctggagattacaagattctgaccctccctaaattgctcctggggataacatcactattgaaaaacctaacaacagtgcttgagatattttgcagaccttgcacttgctgaatcagctgggaccatccagatggataaactggctcatctgatcttgtggcccgcacccagcaaccggctcaggccaagaggacagctttgatccatacgatttcatctctgatctgacccctcagtgctcccagcttactggccccctacctaccaaattatccttaaaaactctgaactccagggctgggcacggtggctcacacctgtaatcccaggactctgggaggccgaggcaggcggatcacttgaggtcagaagttcaagaccagcctggccaacatggcaaaaccccgtctctactaaaaatacaaaaattagccaggcgtggtggtgcacgcctgtaatgccaactacttgggagcctgaggcaggagaattccttgaaccctgaaggcggaggttgcagtgtgctgaaatcgcaccactgcactccagcctgggcaacagagcaagactccatctcaaaaacaacagcaaaaactctgaactccgaattcttggggaaattgatttgagtaataataaaactctggtctcccgca

SEQ ID NO: 437944 - DNA, 514 bp, Homo sapiens
agtcagagtagagacagaagaaaaattgatcagcacacattactccaaagcattgtaaacagaactgacttagatccacgtgtcctgtccaactctggttggggacagactcctattaagcagaatactgcctgggatacagaaacatcacctagaggggaacgaaagactgacaatgggacagaggcctggggaagctctgcaacacagaatcgacatctagaggagtactcaccacttaattgatgatcaatacacgttccttgaaagaaccgatagcatgcgatcgatacagagcatctgcactgggattgtccgccccgcctgtcagggaggcctcgggggctaatggagctgagggtatagtcggccttggaccctcgcttttttcctttcctgtactatgaagataactgccttatctccccctcaggactgttttggggattaaataggacgtttaaattaccaacgctctttgaaataaacatttcaaaattattataacccttta

SEQ ID NO: 437945 - DNA, 1955 bp, Homo sapiens
catgttgagctgcaccttgtccccttccgccccagctaactcggtgaccagtggaggccacacccacgtgacacctgctgtccttgacagcagctccgacggcacctctgtggctctgcaggagccgcctccccgcctcgtgggcacacaggtgagctgaccgtacttgcccagccggtctgagggaagcgaggtcaggggcgacggcgccgcctccgcctccgcctccgcctgtcccctccctccgtccggcatccgcgccgctcaaggactccaaagtcagcgtcgcgaatcgacatctagaggagtactcaccacttaattgatgatcaatacacgttccttgaaagaaccgatagcatgcgatcgatacagagcatctgcactgggattgtccgccccgcctgtcagggaggcctcgggggctaatggagctgagggtatagtcggccttggaccctcgcttttttcctttcctgtactatgaagataactgccttatctccccctcaggactgttttggggattaaataggacgtttaaattaccaacgctctttgaaataaacatttcaaaattattataaccctttagtacatgtgggaaaacgttgacattcatgttcaagtttatttttctgctggctcatttaggtttgttgaagccttgagtccctaggattgtctaagaacatgggtaaatgtgtgtggaggcctccctggaggccagagaactgccagcagccttcatggtgttaggggaacaggaacctaggagagccagggtgacatcgttttaaaatcaacaacccatcttggcgggcgcggtggctcaagcctgtaatcccagcagtttgggagaaaaaaattagccgggtgtggtggtgggcacctgtaatctcagctactcaggaggctgaagcagaattgcttgaacccaggaggcagaggttgcagtgagctgagatcacgccatggcagtctagcctgggcaacaagaatgaaactctgtctcaaaaaaataaaaataaaataaaataaactccatcttaaaaccagtgaaaccaccattgcaaaattataactgagacagtgagagatctgacctaaccaactccatcctacttttaacctccaaactgtccttgttcattcctgggtgtaggccaaactaactttggaagaaacttagtttatggtttcccgaaacaaatccttttcttgtctggagactagactgcctttgtaggactaacaaattagccacaagattagaaattatggtttagaattcatgcagctggagattacaagattctgaccctccctaaattgctcctggggataacatcactattgaaaaacctaacaacagtgcttgagatattttgcagaccttgcacttgctgaatcagctgggaccatccagatggataaactggctcatctgatcttgtggcccgcacccagcaaccggctcaggccaagaggacagctttgatccatacgatttcatctctgatctgacccctcagtgctcccagcttactggccccctacctaccaaattatccttaaaaactctgaactccagggctgggcacggtggctcacacctgtaatcccaggactctgggaggccgaggcaggcggatcacttgaggtcagaagttcaagaccagcctggccaacatggcaaaaccccgtctctactaaaaatacaaaaattagccaggcgtggtggtgcacgcctgtaatgccaactacttgggagcctgaggcaggagaattccttgaaccctgaaggcggaggttgcagtgtgctgaaatcgcaccactgcactccagcctgggcaacagagcaagactccatctcaaaaacaacagcaaaaactctgaactccgaattcttggggaaattgatttgagtaataataaaactctggtctcccgca

SEQ ID NO: 437946 - DNA, 1922 bp, Homo sapiens
catgttgagctgcaccttgtccccttccgccccagctaactcggtgaccagtggaggccacacccacgtgacacctgctgtccttgacagcagctccgacggcacctctgtggctctgcaggagccgcctccccgcctcgtgggcacacaggtgagctgaccgtacttgcccagccggtctgagggaagcgaggtcaggggcgacggcgccgcctccgcctccgcctccgcctgtcccctccctccgtccggcatccgcgccgctcaaggactccaaagtcagcgtcgcgaatcgacatctagaggagtactcaccacttaattgatgatcaatacacgttccttgaaagaaccgatagcatgcgatcgatacagagcatctgcactgggattgtccgccccgcctgtcagggaggcctcgggggctaatggagctgagggtatagtcggccttggaccctcgcttttttcctttcctgtactatgaagataactgccttatctccccctcaggactgttttggggattaaataggacgtttaaattaccaacgctctttgaaataaacatttcaaaattattataaccctttagtacatgtgggaaaacgttgacattcatgttcaagtttatttttctgctggctcatttaggtttgttgaagccttgagtccctaggattgtctaagaacatgggtaaatgtgtgtggaggcctccctggaggccagagaactgccagcagccttcatggtgttaggggaacaggaacctaggagagccagggtgacatcgttttaaaatcaacaacccatcttggcgggcgcggtggctcaagcctgtaatcccagcagtttgggagaaaaaaattagccgggtgtggtggtgggcacctgtaatctcagctactcaggaggctgaagcagaattgcttgaacccaggaggcagaggttgcagtgagctgagatcacgccatggcagtctagcctgggcaacaagaatgaaactctgtctcaaaaaaataaaaataaaataaaataaactccatcttaaaaccaagtgagagatctgacctaaccaactccatcctacttttaacctccaaactgtccttgttcattcctgggtgtaggccaaactaactttggaagaaacttagtttatggtttcccgaaacaaatccttttcttgtctggagactagactgcctttgtaggactaacaaattagccacaagattagaaattatggtttagaattcatgcagctggagattacaagattctgaccctccctaaattgctcctggggataacatcactattgaaaaacctaacaacagtgcttgagatattttgcagaccttgcacttgctgaatcagctgggaccatccagatggataaactggctcatctgatcttgtggcccgcacccagcaaccggctcaggccaagaggacagctttgatccatacgatttcatctctgatctgacccctcagtgctcccagcttactggccccctacctaccaaattatccttaaaaactctgaactccagggctgggcacggtggctcacacctgtaatcccaggactctgggaggccgaggcaggcggatcacttgaggtcagaagttcaagaccagcctggccaacatggcaaaaccccgtctctactaaaaatacaaaaattagccaggcgtggtggtgcacgcctgtaatgccaactacttgggagcctgaggcaggagaattccttgaaccctgaaggcggaggttgcagtgtgctgaaatcgcaccactgcactccagcctgggcaacagagcaagactccatctcaaaaacaacagcaaaaactctgaactccgaattcttggggaaattgatttgagtaataataaaactctggtctcccgca

SEQ ID NO: 437947 - DNA, 1168 bp, Homo sapiens
catgttgagctgcaccttgtccccttccgccccagctaactcggtgaccagtggaggccacacccacgtgacacctgctgtccttgacagcagctccgacggcacctctgtggctctgcaggagccgcctccccgcctcgtgggcacacaggtgagctgaccgtacttgcccagccggtctgagggaagcgaggtcaggggcgacggcgccgcctccgcctccgcctccgcctgtcccctccctccgtccggcatccgcgccgctcaaggactccaaagtcagcgtcgcgaatcgacatctagaggagtactcaccacttaattgatgatcaatacacgttccttgaaagaaccgatagcatgcgatcgatacagagcatctgcactgggattgtccgccccgcctgtcagggaggcctcgggggctaatggagctgagggtatagtcggccttggaccctcgcttttttcctttcctgtactatgaagataactgccttatctccccctcaggactgttttggggattaaataggacgtttaaattaccaacgctctttgaaataaacatttcaaaattattataaccctttagtacatgtgggaaaacgttgacattcatgttcaagtttatttttctgctggctcatttaggtttgttgaagccttgagtccctaggattgtctaagaacatgggtaaatgtgtgtggaggcctccctggaggccagagaactgccagcagccttcatggtgttaggggaacaggaacctaggagagccagggtgacatcgttttaaaatcaacaacccatcttggcgggcgcggtggctcaagcctgtaatcccagcagtttgggagaaaaaaattagccgggtgtggtggtgggcacctgtaatctcagctactcaggaggctgaagcagaattgcttgaacccaggaggcagaggttgcagtgagctgagatcacgccatggcagtctagcctgggcaacaagaatgaaactctgtctcaaaaaaataaaaataaaataaaataaactccatcttaaaaccagtgaaactggcatccgggctctggaaattgccttgagcagaggaaacactctactcccgctcggcatcaaggcctgggtgatggagagtcaggcgtggtgcccctggggc

SEQ ID NO: 437948 - DNA, 952 bp, Homo sapiens
accacaccctgctaagtttttgtatttttttttagagacagggtttcaccttgttagccaggctggttttgaactcctgacctcaagtgatccgcccaccttggcctccgaaagtgctaaaattacaggcgtgagccactgcacctggccgatattcctgttcttaatggaaatttgataattgtactgtgggttattagcacatcaaaacaatgttgtagggaattagaacacaaagcgttagtatattgagtcttgttcttaaagttaactgtaggacgttgaattttttttataaagtacaattttgctgaactaaaactctaataatggcacctaaactgaatatttgaaaatgtcttggtaggcttaggacttatttttaatgtaaggatagcagcgtgccttagttttgagtaggtattcattacccccctaaaatagtggattttacttttcagtttcttgagttgtgtcttgaaattattgtttgtaaaaatgtttcttttgattttggagggaaaaaaatcaaaaagttttagtgcttctgtctacttgtagatataaaacagatggaaaagaaaaggaggccatccttgaagaagaagatgacctctgggttagaattcgacatcgacatattgcggttgtgttagaggaaattcccaagcttatgaaagaaatttcatcaacaaagaaagcaacagaaggaaagacatcacttagtgctcttacccagctgatgaaaaagatgccccatttccgaaaacagattactaagcaagttgtccatcttaacttagcagaagattgcatgaataagttcaagcttaatatagaaaagctctgcaaaactgaacagacctgacttggaactgtgcccaggacgacggggatcctggagtcccttccgtctatcacttctgtctgtgtcatagagctcccttatctc

SEQ ID NO: 437949 - DNA, 1000 bp, Homo sapiens
caccccaacgccgcttctgcggccaaagtaggttgggagtggaaggtggtggctgctgctccgcagtgtggggaagatggcgccgccggtggcagagagggggctaaagagcgtcgtgtggcagaagataaaagcaacagtgtttgatgactgcaagaaagaaggcgaatggaagataatgcttttagatgaatttaccactaagcttttggcatcgtgttgcaaaatgacagatcttctagaagaaggtattactgtcacagatgaagacatcaggaaacaggaagagcgagtacagcaagtacgcaagaaattggaagaagcactgatggcagacatcttgtcgcgagctgctgatacagaagagctggatattgaaatggacagtggagatgaagcctaagaatatgatcaggtaactttcgaccgactttccccaagagaaaattcctagaaattgaacaaaaatgtttccactggcttttgcctgtaagaaaaaaaatgtacccgagcacatagagctttttaatagcactaaccaatgcctttttagatgtatttaggatgtatatatctataattcaaaaaatcatgtaataaagagtcctaggacttaaaaattagtcttaagtaaatatcaagcaggaccctaagatgaagctgaagcttaagatgcaggtgaatctactggaatgtagattacgtaaaacatttgttacacaaagttaaataggaacagatcaggaatcttaatacataccagttaacgatactgggaatcaataatataacaatattaaaacaattgaagggacgccgtagtactaacaaaaagtaagcaataagaaatataagaaaacaaacaagggcgctgaaaccgaggaaaatagaaccaaataaaagacaagacacaaaaaaaccacacacgaggcaaagaaagaaatcaaaagcacagaacaaagaaaaaaagcactaaacacaaaaaaaagaaaaaacaaaa

SEQ ID NO: 437950 - DNA, 2509 bp, Homo sapiens
caccccaacgccgcttctgcggccaaagtaggttgggagtggaaggtggtggctgctgctccgcagtgtggggaagatggcgccgccggtggcagagagggggctaaagagcgtcgtgtggcagaagataaaagcaacagtgtttgatgactgcaagaaagaaggcgaatggaagataatgcttttagatgaatttaccactaagcttttggcatcgtgttgcaaaatgacagatcttctagaagaaggtattactgttgtagagaatatttataagaaccgtgaacctgtcagacaaatgaaagctctttatttcatcactccgacatcaaagtctgtagattgtttcttacatgattttgcaagtaaatcggagaacaagtataaagcagcatatatttacttcactgacttttgccctgataatctctttaacaaaattaaggcttcttgctccaagtcaataagaagatgtaaagaaataaatatttccttcattccacatgaatctcaggtgtatactcttgatgtaccagatgcattctattactgttatagtccagaccctggtaatgcaaagggaaaagatgccattatggaaacaatggctgaccagatagttacagtgtgtgccaccttggatgaaaatcccggagtaagatataaaagtaaacctctagataatgccagtaagcttgcacagcttgttgaaaaaaagcttgaagactactacaagattgatgaaaagagcctaataaagggtaaaactcattcacagctcttaataattgatcgtggctttgatcctgtgtccactgtcctgcatgaactgacctttcaggcaatggcatatgatctactaccaattgagaatgatacatacaaatataaaacagatggaaaagaaaaggaggccatccttgaagaagaagatgacctctgggttagaattcgacatcgacatattgcggttgtgttagaggaaattcccaagcttatgaaagaaatttcatcaacaaagaaagcaacagaaggaaagacatcacttagtgctcttacccagctgatgaaaaagatgccccatttccgaaaacagattactaagcaagttgtccatcttaacttagcagaagattgcatgaataagttcaagcttaatatagaaaagctctgcaaaactgaacaggacctggcacttggaactgatgcagaaggacagaaggtgaaagattccatgcgagtactccttccagttctactcaacaaaaatcatgataattgtgataaaataagagcaattctactttatatcttcagtattaatggaactacggaagaaaatttggacaggttgatccagaatgtaaagatagaaaatgagagtgacatgattcgtaactggagttaccttggtgttcccattgttccccaatctcaacaaggcaaaccgttaagaaaggatcggtctgcagaagaaacttttcagctctctcggtggacaccttttatcaaagatattatggaggatgctattgataatagattagattcaaaagaatggccatattgttcccagtgtccagcagtatggaatggttcaggagctgtaagtgctcgccagaaacccagagctaattatttagaagaccgaaaaaatgggtcaaagctgattgtttttgtaattggagggatcacatactctgaagtgcgttgtgcttatgaagtttctcaggcacataaatcctgtgaagttattattggttctacacatgttttaacacccaaaaagctgttggatgatataaagatgctgaataaacccaaggataaagtctccttaattaaagatgaatagcatttctttttggagggtttagagattcttactaatatgttgaactaaaatagaaagaaaatgttgctgtcatgtaatttaaacaatgtaaatattttatggaataatggcttttcaaatacatttcttaaggaactgtttatgattattactggatttgtcatttttgataatttaaatattgctgctgctttgtagatgatgagaagaaatgttaaagtgctttctaaaaggaaattttttcacctttggaggagaatatattagagttgtgggtaatttttcacagccacctatgtacatactaattacccattggatacttatatctaaaagtctcatgctgaagtatagtttttgggaaagaatgattttaaataaagagattgtaaaagtaaaaaactgtaaatgtatatgtatgatagaattgtttcctctaagtgtagtttttctttcaactaaaattcagtttatgtgtaaaataattcagtcattaatagaaatggagtgatttcacagtgtgtactgttttgccacatacttctaaagaacacaattttatataattttgaaatcatgtatgtttaaattagaaaaccaaaaatcatgaacattctaagagaaaataaatatagaatttaaaaaataaaaatg

SEQ ID NO: 437951 - DNA, 2185 bp, Homo sapiens
accacaccctgctaagtttttgtatttttttttagagacagggtttcaccttgttagccaggctggttttgaactcctgacctcaagtgatccgcccaccttggcctccgaaagtgctaaaattacaggcgtgagccactgcacctggccgatattcctgttcttaatggaaatttgataattgtactgtgggttattagcacatcaaaacaatgttgtagggaattagaacacaaagcgttagtatattgagtcttgttcttaaagttaactgtaggacgttgaattttttttataaagtacaattttgctgaactaaaactctaataatggcacctaaactgaatatttgaaaatgtcttggtaggcttaggacttatttttaatgtaaggatagcagcgtgccttagttttgagtaggtattcattacccccctaaaatagtggattttacttttcagtttcttgagttgtgtcttgaaattattgtttgtaaaaatgtttcttttgattttggagggaaaaaaatcaaaaagttttagtgcttctgtctacttgtagatataaaacagatggaaaagaaaaggaggccatccttgaagaagaagatgacctctgggttagaattcgacatcgacatattgcggttgtgttagaggaaattcccaagcttatgaaagaaatttcatcaacaaagaaagcaacagaaggaaagacatcacttagtgctcttacccagctgatgaaaaagatgccccatttccgaaaacagattactaagcaagttgtccatcttaacttagcagaagattgcatgaataagttcaagcttaatatagaaaagctctgcaaaactgaacaggacctggcacttggaactgatgcagaaggacagaaggtgaaagattccatgcgagtactccttccagttctactcaacaaaaatcatgataattgtgataaaataagagcaattctactttatatcttcagtattaatggaactacggaagaaaatttggacaggttgatccagaatgtaaagatagaaaatgagagtgacatgattcgtaactggagttaccttggtgttcccattgttccccaatctcaacaaggcaaaccgttaagaaaggatcggtctgcagaagaaacttttcagctctctcggtggacaccttttatcaaagatattatggaggatgctattgataatagattagattcaaaagaatggccatattgttcccagtgtccagcagtatggaatggttcaggagctgtaagtgctcgccagaaacccagagctaattatttagaagaccgaaaaaatgggtcaaagctgattgtttttgtaattggagggatcacatactctgaagtgcgttgtgcttatgaagtttctcaggcacataaatcctgtgaagttattattggttctacacatgttttaacacccaaaaagctgttggatgatataaagatgctgaataaacccaaggataaagtctccttaattaaagatgaatagcatttctttttggagggtttagagattcttactaatatgttgaactaaaatagaaagaaaatgttgctgtcatgtaatttaaacaatgtaaatattttatggaataatggcttttcaaatacatttcttaaggaactgtttatgattattactggatttgtcatttttgataatttaaatattgctgctgctttgtagatgatgagaagaaatgttaaagtgctttctaaaaggaaattttttcacctttggaggagaatatattagagttgtgggtaatttttcacagccacctatgtacatactaattacccattggatacttatatctaaaagtctcatgctgaagtatagtttttgggaaagaatgattttaaataaagagattgtaaaagtaaaaaactgtaaatgtatatgtatgatagaattgtttcctctaagtgtagtttttctttcaactaaaattcagtttatgtgtaaaataattcagtcattaatagaaatggagtgatttcacagtgtgtactgttttgccacatacttctaaagaacacaattttatataattttgaaatcatgtatgtttaaattagaaaaccaaaaatcatgaacattctaagagaaaataaatatagaatttaaaaaataaaaatg

SEQ ID NO: 437952 - DNA, 1629 bp, Homo sapiens
cctatcagctgttcttgataaccaacaagaggcgcagtctgctcccatcaggatgacctctgggttagaattcgacatcgacatattgcggttgtgttagaggaaattcccaagcttatgaaagaaatttcatcaacaaagaaagcaacagaaggaaagacatcacttagtgctcttacccagctgatgaaaaagatgccccatttccgaaaacagattactaagcaagttgtccatcttaacttagcagaagattgcatgaataagttcaagcttaatatagaaaagctctgcaaaactgaacaggacctggcacttggaactgatgcagaaggacagaaggtgaaagattccatgcgagtactccttccagttctactcaacaaaaatcatgataattgtgataaaataagagcaattctactttatatcttcagtattaatggaactacggaagaaaatttggacaggttgatccagaatgtaaagatagaaaatgagagtgacatgattcgtaactggagttaccttggtgttcccattgttccccaatctcaacaaggcaaaccgttaagaaaggatcggtctgcagaagaaacttttcagctctctcggtggacaccttttatcaaagatattatggaggatgctattgataatagattagattcaaaagaatggccatattgttcccagtgtccagcagtatggaatggttcaggagctgtaagtgctcgccagaaacccagagctaattatttagaagaccgaaaaaatgggtcaaagctgattgtttttgtaattggagggatcacatactctgaagtgcgttgtgcttatgaagtttctcaggcacataaatcctgtgaagttattattggttctacacatgttttaacacccaaaaagctgttggatgatataaagatgctgaataaacccaaggataaagtctccttaattaaagatgaatagcatttctttttggagggtttagagattcttactaatatgttgaactaaaatagaaagaaaatgttgctgtcatgtaatttaaacaatgtaaatattttatggaataatggcttttcaaatacatttcttaaggaactgtttatgattattactggatttgtcatttttgataatttaaatattgctgctgctttgtagatgatgagaagaaatgttaaagtgctttctaaaaggaaattttttcacctttggaggagaatatattagagttgtgggtaatttttcacagccacctatgtacatactaattacccattggatacttatatctaaaagtctcatgctgaagtatagtttttgggaaagaatgattttaaataaagagattgtaaaagtaaaaaactgtaaatgtatatgtatgatagaattgtttcctctaagtgtagtttttctttcaactaaaattcagtttatgtgtaaaataattcagtcattaatagaaatggagtgatttcacagtgtgtactgttttgccacatacttctaaagaacacaattttatataattttgaaatcatgtatgtttaaattagaaaaccaaaaatcatgaacattctaagagaaaataaatatagaatttaaaaaataaaaatg

SEQ ID NO: 437953 - DNA, 180 bp, Homo sapiens
tggtgaagaaggattgaaatattgcagcataggcagatttcaggaagatgtcttacagaaattttgttacattaccccaggctactgcactttacatatttgaaggacaacacattatattaagcgaaggaaaattgatttaactgctggcctctgaaaaattctcttttctcctaccag

SEQ ID NO: 437954 - DNA, 474 bp, Homo sapiens
ttgtagagaatatttataagaaccgtgaacctgtcagacaaatgaaagctctttatttcatcactccgacatcaaaggtgagtattttgagaccttaaaaagcaggttcatcaatatttcaccattgttatggtttactaacagaaaattcaaagtaataaagtacactttagtagaaaaatattgccataaactagtttgcttaggaaagtttttttctgtgttagaagattatttgcattcttccgaatgagaatgtataagtaaaaggattccttttttccccatatatgaaagcagaattaaattgtataaaataacatttctttgcatgttttgtttttcatgcagttcctattgaactataccttttggggggatggtaatgtaggtaaaagaaataatctatagtcttggattacttctttatctcagtgactttcctgtagcatatttgtatgtatatatgaagat

SEQ ID NO: 437955 - DNA, 2756 bp, Homo sapiens
caccccaacgccgcttctgcggccaaagtaggttgggagtggaaggtggtggctgctgctccgcagtgtggggaagatggcgccgccggtggcagagagggggctaaagagcgtcgtgtggcagaagataaaagcaacagtgtttgatgactgcaagaaagaaggcgaatggaagataatgcttttagatgaatttaccactaagcttttggcatcgtgttgcaaaatgacagatcttctagaagaaggtattactgttgtagagaatatttataagaaccgtgaacctgtcagacaaatgaaagctctttatttcatcactccgacatcaaagtctgtagattgtttcttacatgattttgcaagtaaatcggagaacaagtataaagcagcatatatttacttcactgacttttgccctgataatctctttaacaaaattaaggcttcttgctccaagtcaataagaagatgtaaagaaataaatatttccttcattccacatgaatctcaggtgtatactcttgatgtaccagatgcattctattactgttatagtccagaccctggtaatgcaaagggaaaagatgccattatggaaacaatggctgaccagatagttacagtgtgtgccaccttggatgaaaatcccggagtaagatataaaagtaaacctctagataatgccagtaagcttgcacagcttgttgaaaaaaagcttgaagactactacaagattgatgaaaagagcctaataaagggtaaaactcattcacagctcttaataattgatcgtggctttgatcctgtgtccactgtcctgcatgaactgacctttcaggcaatggcatatgatctactaccaattgagaatgatacatacaaatataaaacagatggaaaagaaaaggaggccatccttgaagaagaagatgacctctgggttagaattcgacatcgacatattgcggttgtgttagaggaaattcccaagcttatgaaagaaatttcatcaacaaagaaagcaacagaaggaaagacatcacttagtgctcttacccagctgatgaaaaagatgccccatttccgaaaacagattactaagcaagttgtccatcttaacttagcagaagattgcatgaataagttcaagcttaatatagaaaagctctgcaaaactgaacaggacctggcacttggaactgatgcagaaggacagaaggtgaaagattccatgcgagtactccttccagttctactcaacaaaaatcatgataattgtgataaaataagagcaattctactttatatcttcagtattaatggtaatggagataatcactttttaataagtattttactattgatcataaaagaatctttgaaaactgaaagatagttgctgaacttggttaagataaaagggaaaatatgaaatcgagagaagactgaaggagatataatttgactgttttttattttaaaagcttcattcatgggtactacctaaagccttgaaattattttggtagcaattgtgtgattgtgcactcatatttttacctatttaaggaactacggaagaaaatttggacaggttgatccagaatgtaaagatagaaaatgagagtgacatgattcgtaactggagttaccttggtgttcccattgttccccaatctcaacaaggcaaaccgttaagaaaggatcggtctgcagaagaaacttttcagctctctcggtggacaccttttatcaaagatattatggaggatgctattgataatagattagattcaaaagaatggccatattgttcccagtgtccagcagtatggaatggttcaggagctgtaagtgctcgccagaaacccagagctaattatttagaagaccgaaaaaatgggtcaaagctgattgtttttgtaattggagggatcacatactctgaagtgcgttgtgcttatgaagtttctcaggcacataaatcctgtgaagttattattggttctacacatgttttaacacccaaaaagctgttggatgatataaagatgctgaataaacccaaggataaagtctccttaattaaagatgaatagcatttctttttggagggtttagagattcttactaatatgttgaactaaaatagaaagaaaatgttgctgtcatgtaatttaaacaatgtaaatattttatggaataatggcttttcaaatacatttcttaaggaactgtttatgattattactggatttgtcatttttgataatttaaatattgctgctgctttgtagatgatgagaagaaatgttaaagtgctttctaaaaggaaattttttcacctttggaggagaatatattagagttgtgggtaatttttcacagccacctatgtacatactaattacccattggatacttatatctaaaagtctcatgctgaagtatagtttttgggaaagaatgattttaaataaagagattgtaaaagtaaaaaactgtaaatgtatatgtatgatagaattgtttcctctaagtgtagtttttctttcaactaaaattcagtttatgtgtaaaataattcagtcattaatagaaatggagtgatttcacagtgtgtactgttttgccacatacttctaaagaacacaattttatataattttgaaatcatgtatgtttaaattagaaaaccaaaaatcatgaacattctaagagaaaataaatatagaatttaaaaaataaaaatg

SEQ ID NO: 437956 - DNA, 1089 bp, Homo sapiens
caccccaacgccgcttctgcggccaaagtaggttgggagtggaaggtggtggctgctgctccgcagtgtggggaagatggcgccgccggtggcagagagggggctaaagagcgtcgtgtggcagaagataaaagcaacagtgtttgatgactgcaagaaagaaggcgaatggaagataatgcttttagatgaatttaccactaagcttttggcatcgtgttgcaaaatgacagatcttctagaagaaggtattactgttgtagagaatatttataagaaccgtgaacctgtcagacaaatgaaagctctttatttcatcactccgacatcaaagtctgtagattgtttcttacatgattttgcaagtaaatcggagaacaagtataaagcagcatatatttacttcactgacttttgccctgataatctctttaacaaaattaaggcttcttgctccaagtcaataagaagatgtaaagaaataaatatttccttcattccacatgaatctcaggtgtatactcttgatgtaccagatgcattctattactgttatagtccagaccctggtaatgcaaagggaaaagatgccattatggaaacaatggctgaccagatagttacagtgtgtgccaccttggatgaaaatcccggagtaagatataaaagtaaacctctagataatgccagtaagcttgcacagcttgttgaaaaaaagcttgaagactactacaagattgatgaaaagagcctaataaagggtaaaactcattcacagctcttaataattgatcgtggctttgatcctgtgtccactgtcctgcatgaactgacctttcaggcaatggcatatgatctactaccaattgagaatgatacatacaagcaagtataacttgaagggcatataaagggcatatacaaacaggatagaatatgagcatttaatgatttatataggcaccagaaatctgaaagcccctataaccttttctattcagagactttatccttctcttattcctacagttatagtctttgacagataatgttgaccttgtaaattaaagtgtaatttgattgctttgg

SEQ ID NO: 437957 - DNA, 3286 bp, Homo sapiens
aagcgcaacgtagccggaagctggtggcggctggtgggcgaccgggcgcatcctcattgcagtgcggcggccctacctcggccctggcctgaccccggcggccctgcccgcccctccctccagcatcatggccagcccaagaaccaggaaggttcttaaagaagtcagggtgcaggatgagaacaacgtttgttttgagtgtggcgcgttcaatcctcagtgggtcagtgtgacctacggcatctggatctgcctggagtgctcggggagacaccgcgggcttggggttcacctcagctttgtgcgctctgttactatggacaagtggaaggacattgagcttgagaagatgaaagctggtgggaatgctaagttccgagagttcctggagtctcaggaggattacgatccttgctggtccttgcaggagaagtacaacagcagagccgcggccctctttagggataaggtggtcgctctggccgaaggcagagagtggtctctggagtcatcacctgcccagaactggaccccacctcagcccaggacgctgccgtccatggtgcaccgagtctctggccagccgcagagtgtgaccgcctcctcggacaaggcttttgaagactggctgaatgatgacctcggctcctatcaaggggcccaggggaatcgctacgtggggtttgggaacacgccaccgcctcagaagaaagaagatgacttcctcaacaacgccatgtcctccctgtactcgggctggagcagcttcaccactggagccagccggtttgcctcggcagccaaggagggcgctacaaagtttggatcccaagcgagtcagaaggcgtccgagctgggccacagcctgaacgagaacgtcctcaagcctgcgcaggagaaggtgaaggagggaaagatttttgatgatgtctccagtggggtctctcagttggcgtccaaggtccagggagtcggtagtaagggatggcgggacgtcaccacctttttttcggggaaagcagagggccccttggacagcccctcggagggccacagttatcagaacagcggtctggaccacttccaaaacagcaacatagaccagagcttctgggagacctttggaagtgctgagcccaccaagacccgcaagtccccgagcagcgacagctggacgtgcgcggacacctccaccgagaggaggagctcggacagctgggaggtgtggggctcggcctccaccaacaggaacagcaacagcgacggcggggagggcggggagggcaccaagaaggcagtgccgccggccgtgcccactgatgatggctgggacaaccagaactggtagggcccactgcgcccccgtccccagcgcccccgggcgacttcgtgtttgcactctgccctcgtcgttcctcctccttccatttgacccaagaatcagcaactgcagtgtgaggacagcgtctcgggaggcaggaccctagggagacccgggtgtgcgccgcctgcgcgtggggagtcttcggtgcgtgggggcggcttgctgtccagcctgtgtgggggccgtcccgtcccacactcccctgggcattcttggactcaaggccggggctctgcgtggcttgctgggaggtgggctgcagcacagaggcctgtgactgcgttccagcggccagttcactacgcagtatctctggggcctgggaccagccacgtgccgagctgtcagcgacgtgaggtgtcccttctcgttgagatatttaactttggttttgctctagttctttctttttgaagagagtgactggagtggtaaagatggaaatgctggaaatgatactggcgctcacgctgccatccgaccaccctcggctcccgagtccacgcctgcctgggcctgtgctgtcagacccgcgtcggtcgtaaccctctgtggctcccctgcatcagcaccgtcccaccaccaagttcaccaggttcaccagacacggcctccacaatagccacacccacacctgagctgttctcagtgctggaacttgaccatcctggaacaccctggaagaaaaaggagcgcagggtgggccctcggccctgatgcaggagggtgcgatagcggacgtggccaggcaggaggggccgggttcaggagctgagcaggggatgcctgtgcgtggtgcctgggtctagggaagctccagccccaggatggggctgccctgcacaccggtgcccgccacatgccaaccctcacctccccgaggactggatgatgtgctgccacgtgtgactcgtctcccttgtctgccctgtgtgaccctcagtcttggccagccatgcatgcgcccgaagctcgtgcagtttgtacgtgaggtgctctcctccctgccaccatgctcatcactctggccttggccatgctccctggtcaccccacttcccggtcgccgtctgcagcactcctggagcagcctgggcccttcagcccctgtgctcgtcccaccctagggactcagccacttgcagaacaggatgggaccgagatttcagcgagccctcctggcgcccggtcctccctgtgggcaccagccctcttggtagctggtgtggagggccggtgtccttggctgccacggagggatttgatcaccgaagcagccacctgctgtagttggacctgaggtcagaggcggggcatcagaggctcaaggtgctgagaagccaccgggaaagcagccagcacaaagggcccaggaagccagcccccgagagctgagcgtgggggtctttgagtgtctttctccaagctgagacgtgggcggccgcgtggtatctcccgagggctgcttggaccctggtgggctgagtgctccgaggaggggtggactccaccttggacagtgggatgtggtgttccacatgtgcctgtttccacgccagcaccttgacttggcagcatggagccaaggtctgtccccgcccaggagggtgccttcctcgggggtagggggacggcccactctgccccagggagtcccttttgatgggaagtgcagtcagcagcgtggaggtgtctgggccaccttcagaaggtggatgtggtggccgagaccccgtccacggagggtgatggcctttcccttctgcaggtgcgggcaggtgggcctgggaccggtgctggggcctctccttgctgtgtgtgagggcccaggtggaaggcgcggacctgacagcattccaataaagcatacgggaacatgcaaaaaaaagtctggatgcatcc

SEQ ID NO: 437958 - DNA, 860 bp, Homo sapiens
aagcgcaacgtagccggaagctggtggcggctggtgggcgaccgggcgcatcctcattgcagtgcggcggccctacctcggccctggcctgaccccggcggccctgcccgcccctccctccagcatcatggccagcccaagaaccaggaaggttcttaaagaagtcagggtgcaggatgagaacaacgtttgttttgagtgtggcgcgttcaatcctcagtgggtcagtgtgacctacggcatctggatctgcctggagtgctcggggagacaccgcgggcttggggttcacctcagctttgtgcgctctgttactatggacaagtggaaggacattgagcttgagaagatgaaagctggtgggaatgctaagttccgagagttcctggagtctcaggaggattacgatccttgctggtccttgcaggagaagtacaacagcagagccgcggccctctttagggataaggtggtcgctctggccgaaggcagagagtggtctctggagtcatcacctgcccagaactggaccccacctcagcccaggacgctgccgtccatggtgcaccgagtctctggccagccgcagagtgtgaccgcctcctcggacaaggcttttgaagactggctgaatgatgacctcggctcctatcaaggggcccaggggaatcgctacgtggggtttgggaacacgccaccgcctcagaagaaagaagatgacttcctcaacaacgccatgtcctccctgtactcgggctggagcagcttcaccactggagccagccggtttgcctcggcagccaaggagggccgcgcacctgtcacatgcccctgtggtcactctggccccgtgtcttccc

SEQ ID NO: 437959 - DNA, 586 bp, Homo sapiens
ctacccccccccccccggggggtttcccaaattctcccgggggttcttttaaaaggggccctcaaaaaagttcaccttctttcccttattccggaaaccttttccccccaggtttaaatggggccccctttttaaccccggatttttttttttttttttttgtaaaaccctgacccgtttgcaaaatttttttttctaggaaaattgtgaatggcaataaattcttctgggctaaaaaaaaaaaaaaaaaaaaaaaaaaaaaaaaaaaaaaaaaaaaaaaaaaaaaaaaaaaaaaaaggtgggcggccgcgtggtatctcccgagggctgcttggaccctggtgggctgagtgctccgaggaggggtggactccaccttggacagtgggatgtggtgttccacatgtgcctgtttccacgccagcaccttgacttggcagcatggagccaaggtgcgggcaggtgggcctgggaccggtgctggggcctctccttgctgtgtgtgagggcccaggtggaaggcgcggacctgacagcattccaataaagcatacgggaacatgcaaaaaaaagtctggatgcatcc

SEQ ID NO: 437960 - DNA, 3176 bp, Homo sapiens
aagcgcaacgtagccggaagctggtggcggctggtgggcgaccgggcgcatcctcattgcagtgcggcggccctacctcggccctggcctgaccccggcggccctgcccgcccctccctccagcatcatggccagcccaagaaccaggaaggttcttaaagaagtcagggtgcaggatgagaacaacctttgtgcgctctgttactatggacaagtggaaggacattgagcttgagaagatgaaagctggtgggaatgctaagttccgagagttcctggagtctcaggaggattacgatccttgctggtccttgcaggagaagtacaacagcagagccgcggccctctttagggataaggtggtcgctctggccgaaggcagagagtggtctctggagtcatcacctgcccagaactggaccccacctcagcccaggacgctgccgtccatggtgcaccgagtctctggccagccgcagagtgtgaccgcctcctcggacaaggcttttgaagactggctgaatgatgacctcggctcctatcaaggggcccaggggaatcgctacgtggggtttgggaacacgccaccgcctcagaagaaagaagatgacttcctcaacaacgccatgtcctccctgtactcgggctggagcagcttcaccactggagccagccggtttgcctcggcagccaaggagggcgctacaaagtttggatcccaagcgagtcagaaggcgtccgagctgggccacagcctgaacgagaacgtcctcaagcctgcgcaggagaaggtgaaggagggaaagatttttgatgatgtctccagtggggtctctcagttggcgtccaaggtccagggagtcggtagtaagggatggcgggacgtcaccacctttttttcggggaaagcagagggccccttggacagcccctcggagggccacagttatcagaacagcggtctggaccacttccaaaacagcaacatagaccagagcttctgggagacctttggaagtgctgagcccaccaagacccgcaagtccccgagcagcgacagctggacgtgcgcggacacctccaccgagaggaggagctcggacagctgggaggtgtggggctcggcctccaccaacaggaacagcaacagcgacggcggggagggcggggagggcaccaagaaggcagtgccgccggccgtgcccactgatgatggctgggacaaccagaactggtagggcccactgcgcccccgtccccagcgcccccgggcgacttcgtgtttgcactctgccctcgtcgttcctcctccttccatttgacccaagaatcagcaactgcagtgtgaggacagcgtctcgggaggcaggaccctagggagacccgggtgtgcgccgcctgcgcgtggggagtcttcggtgcgtgggggcggcttgctgtccagcctgtgtgggggccgtcccgtcccacactcccctgggcattcttggactcaaggccggggctctgcgtggcttgctgggaggtgggctgcagcacagaggcctgtgactgcgttccagcggccagttcactacgcagtatctctggggcctgggaccagccacgtgccgagctgtcagcgacgtgaggtgtcccttctcgttgagatatttaactttggttttgctctagttctttctttttgaagagagtgactggagtggtaaagatggaaatgctggaaatgatactggcgctcacgctgccatccgaccaccctcggctcccgagtccacgcctgcctgggcctgtgctgtcagacccgcgtcggtcgtaaccctctgtggctcccctgcatcagcaccgtcccaccaccaagttcaccaggttcaccagacacggcctccacaatagccacacccacacctgagctgttctcagtgctggaacttgaccatcctggaacaccctggaagaaaaaggagcgcagggtgggccctcggccctgatgcaggagggtgcgatagcggacgtggccaggcaggaggggccgggttcaggagctgagcaggggatgcctgtgcgtggtgcctgggtctagggaagctccagccccaggatggggctgccctgcacaccggtgcccgccacatgccaaccctcacctccccgaggactggatgatgtgctgccacgtgtgactcgtctcccttgtctgccctgtgtgaccctcagtcttggccagccatgcatgcgcccgaagctcgtgcagtttgtacgtgaggtgctctcctccctgccaccatgctcatcactctggccttggccatgctccctggtcaccccacttcccggtcgccgtctgcagcactcctggagcagcctgggcccttcagcccctgtgctcgtcccaccctagggactcagccacttgcagaacaggatgggaccgagatttcagcgagccctcctggcgcccggtcctccctgtgggcaccagccctcttggtagctggtgtggagggccggtgtccttggctgccacggagggatttgatcaccgaagcagccacctgctgtagttggacctgaggtcagaggcggggcatcagaggctcaaggtgctgagaagccaccgggaaagcagccagcacaaagggcccaggaagccagcccccgagagctgagcgtgggggtctttgagtgtctttctccaagctgagacgtgggcggccgcgtggtatctcccgagggctgcttggaccctggtgggctgagtgctccgaggaggggtggactccaccttggacagtgggatgtggtgttccacatgtgcctgtttccacgccagcaccttgacttggcagcatggagccaaggtctgtccccgcccaggagggtgccttcctcgggggtagggggacggcccactctgccccagggagtcccttttgatgggaagtgcagtcagcagcgtggaggtgtctgggccaccttcagaaggtggatgtggtggccgagaccccgtccacggagggtgatggcctttcccttctgcaggtgcgggcaggtgggcctgggaccggtgctggggcctctccttgctgtgtgtgagggcccaggtggaaggcgcggacctgacagcattccaataaagcatacgggaacatgcaaaaaaaagtctggatgcatcc

SEQ ID NO: 437961 - DNA, 3368 bp, Homo sapiens
tgggtcctgaacttagtagattgggtttcccacagaattctccccttctttgctgttgtgacagctcttttcccagaagtcagtgggaaaaacagctttttaaaattgccaaaacaatacaagcttttagtaaatttagacacccatagagctgtctcagatagcgccccaggtaagctccgcacgccttccaggtgtgcacacagccgtgtctgccgtggcgctgtgggagttcacatctccatctgctcacgggggtgttgtctgcccttccccagagttgcccatctgcctgtggcactggccctggcacccttgaactgaccccgtcatggatgcgtcccacatcccactgcaggaacgtcccgggtggggtgactgggtagcacgaggcctccccacctcatctggagccctgtagtcctgccacatccacgtgcttctgacggaaggctttgcactgcgggcaactccggcttgattccaggccctcggccctcttgcctcacctctccccgctgcctcctgccaacagggagagtgcagagcccactgtggaggcctctcgtgttgcccatgaggctggcattgctggggtttcagcacctgagcccgagcagccactcagagctgaaggccaccctggcctcagagtctctggccagccgcagagtgtgaccgcctcctcggacaaggcttttgaagactggctgaatgatgacctcggctcctatcaaggggcccaggggaatcgctacgtggggtttgggaacacgccaccgcctcagaagaaagaagatgacttcctcaacaacgccatgtcctccctgtactcgggctggagcagcttcaccactggagccagccggtttgcctcggcagccaaggagggcgctacaaagtttggatcccaagcgagtcagaaggcgtccgagctgggccacagcctgaacgagaacgtcctcaagcctgcgcaggagaaggtgaaggagggaaagatttttgatgatgtctccagtggggtctctcagttggcgtccaaggtccagggagtcggtagtaagggatggcgggacgtcaccacctttttttcggggaaagcagagggccccttggacagcccctcggagggccacagttatcagaacagcggtctggaccacttccaaaacagcaacatagaccagagcttctgggagacctttggaagtgctgagcccaccaagacccgcaagtccccgagcagcgacagctggacgtgcgcggacacctccaccgagaggaggagctcggacagctgggaggtgtggggctcggcctccaccaacaggaacagcaacagcgacggcggggagggcggggagggcaccaagaaggcagtgccgccggccgtgcccactgatgatggctgggacaaccagaactggtagggcccactgcgcccccgtccccagcgcccccgggcgacttcgtgtttgcactctgccctcgtcgttcctcctccttccatttgacccaagaatcagcaactgcagtgtgaggacagcgtctcgggaggcaggaccctagggagacccgggtgtgcgccgcctgcgcgtggggagtcttcggtgcgtgggggcggcttgctgtccagcctgtgtgggggccgtcccgtcccacactcccctgggcattcttggactcaaggccggggctctgcgtggcttgctgggaggtgggctgcagcacagaggcctgtgactgcgttccagcggccagttcactacgcagtatctctggggcctgggaccagccacgtgccgagctgtcagcgacgtgaggtgtcccttctcgttgagatatttaactttggttttgctctagttctttctttttgaagagagtgactggagtggtaaagatggaaatgctggaaatgatactggcgctcacgctgccatccgaccaccctcggctcccgagtccacgcctgcctgggcctgtgctgtcagacccgcgtcggtcgtaaccctctgtggctcccctgcatcagcaccgtcccaccaccaagttcaccaggttcaccagacacggcctccacaatagccacacccacacctgagctgttctcagtgctggaacttgaccatcctggaacaccctggaagaaaaaggagcgcagggtgggccctcggccctgatgcaggagggtgcgatagcggacgtggccaggcaggaggggccgggttcaggagctgagcaggggatgcctgtgcgtggtgcctgggtctagggaagctccagccccaggatggggctgccctgcacaccggtgcccgccacatgccaaccctcacctccccgaggactggatgatgtgctgccacgtgtgactcgtctcccttgtctgccctgtgtgaccctcagtcttggccagccatgcatgcgcccgaagctcgtgcagtttgtacgtgaggtgctctcctccctgccaccatgctcatcactctggccttggccatgctccctggtcaccccacttcccggtcgccgtctgcagcactcctggagcagcctgggcccttcagcccctgtgctcgtcccaccctagggactcagccacttgcagaacaggatgggaccgagatttcagcgagccctcctggcgcccggtcctccctgtgggcaccagccctcttggtagctggtgtggagggccggtgtccttggctgccacggagggatttgatcaccgaagcagccacctgctgtagttggacctgaggtcagaggcggggcatcagaggctcaaggtgctgagaagccaccgggaaagcagccagcacaaagggcccaggaagccagcccccgagagctgagcgtgggggtctttgagtgtctttctccaagctgagacgtgggcggccgcgtggtatctcccgagggctgcttggaccctggtgggctgagtgctccgaggaggggtggactccaccttggacagtgggatgtggtgttccacatgtgcctgtttccacgccagcaccttgacttggcagcatggagccaaggtctgtccccgcccaggagggtgccttcctcgggggtagggggacggcccactctgccccagggagtcccttttgatgggaagtgcagtcagcagcgtggaggtgtctgggccaccttcagaaggtggatgtggtggccgagaccccgtccacggagggtgatggcctttcccttctgcaggtgcgggcaggtgggcctgggaccggtgctggggcctctccttgctgtgtgtgagggcccaggtggaaggcgcggacctgacagcattccaataaagcatacgggaacatgcaaaaaaaagtctggatgcatcc

SEQ ID NO: 437962 - DNA, 3316 bp, Homo sapiens
aagcgcaacgtagccggaagctggtggcggctggtgggcgaccgggcgcatcctcattgcagtgcggcggccctacctcggccctggcctgaccccggcggccctgcccgcccctccctccagcatcatggccagcccaagaaccaggaaggttcttaaagaagtcagggtgcaggatgagaacaacgtttgttttgagtgtggcgcgttcaatcctcagtgggtcagtgtgacctacggcatctggatctgcctggagtgctcggggagacaccgcgggcttggggttcacctcagctttgtgcgctctgttactatggacaagtggaaggacattgagcttgagaagatgaaagctggtgggaatgctaagttccgagagttcctggagtctcaggaggattacgatccttgctggtccttgcaggagaagtacaacagcagagccgcggccctctttagggataaggtggtcgctctggccgaaggcagagagtggtctctggagtcatcacctgcccagaactggaccccacctcagcccaggacgctgccgtccatggtgcaccgagtctctggccagccgcagagtgtgaccgcctcctcggacaaggcttttgaagactggctgaatgatgacctcggctcctatcaaggggcccaggggaatcgctacgtggggtttgggaacacgccaccgcctcagaagaaagaagatgacttcctcaacaacgccatgtcctccctgtactcgggctggagcagcttcaccactggagccagccggtttgcctcggcagccaaggagggcgctacaaagtttggatcccaagcgagtcagaagttttggggtcacaagcagcagccggagccggcgtccgagctgggccacagcctgaacgagaacgtcctcaagcctgcgcaggagaaggtgaaggagggaaagatttttgatgatgtctccagtggggtctctcagttggcgtccaaggtccagggagtcggtagtaagggatggcgggacgtcaccacctttttttcggggaaagcagagggccccttggacagcccctcggagggccacagttatcagaacagcggtctggaccacttccaaaacagcaacatagaccagagcttctgggagacctttggaagtgctgagcccaccaagacccgcaagtccccgagcagcgacagctggacgtgcgcggacacctccaccgagaggaggagctcggacagctgggaggtgtggggctcggcctccaccaacaggaacagcaacagcgacggcggggagggcggggagggcaccaagaaggcagtgccgccggccgtgcccactgatgatggctgggacaaccagaactggtagggcccactgcgcccccgtccccagcgcccccgggcgacttcgtgtttgcactctgccctcgtcgttcctcctccttccatttgacccaagaatcagcaactgcagtgtgaggacagcgtctcgggaggcaggaccctagggagacccgggtgtgcgccgcctgcgcgtggggagtcttcggtgcgtgggggcggcttgctgtccagcctgtgtgggggccgtcccgtcccacactcccctgggcattcttggactcaaggccggggctctgcgtggcttgctgggaggtgggctgcagcacagaggcctgtgactgcgttccagcggccagttcactacgcagtatctctggggcctgggaccagccacgtgccgagctgtcagcgacgtgaggtgtcccttctcgttgagatatttaactttggttttgctctagttctttctttttgaagagagtgactggagtggtaaagatggaaatgctggaaatgatactggcgctcacgctgccatccgaccaccctcggctcccgagtccacgcctgcctgggcctgtgctgtcagacccgcgtcggtcgtaaccctctgtggctcccctgcatcagcaccgtcccaccaccaagttcaccaggttcaccagacacggcctccacaatagccacacccacacctgagctgttctcagtgctggaacttgaccatcctggaacaccctggaagaaaaaggagcgcagggtgggccctcggccctgatgcaggagggtgcgatagcggacgtggccaggcaggaggggccgggttcaggagctgagcaggggatgcctgtgcgtggtgcctgggtctagggaagctccagccccaggatggggctgccctgcacaccggtgcccgccacatgccaaccctcacctccccgaggactggatgatgtgctgccacgtgtgactcgtctcccttgtctgccctgtgtgaccctcagtcttggccagccatgcatgcgcccgaagctcgtgcagtttgtacgtgaggtgctctcctccctgccaccatgctcatcactctggccttggccatgctccctggtcaccccacttcccggtcgccgtctgcagcactcctggagcagcctgggcccttcagcccctgtgctcgtcccaccctagggactcagccacttgcagaacaggatgggaccgagatttcagcgagccctcctggcgcccggtcctccctgtgggcaccagccctcttggtagctggtgtggagggccggtgtccttggctgccacggagggatttgatcaccgaagcagccacctgctgtagttggacctgaggtcagaggcggggcatcagaggctcaaggtgctgagaagccaccgggaaagcagccagcacaaagggcccaggaagccagcccccgagagctgagcgtgggggtctttgagtgtctttctccaagctgagacgtgggcggccgcgtggtatctcccgagggctgcttggaccctggtgggctgagtgctccgaggaggggtggactccaccttggacagtgggatgtggtgttccacatgtgcctgtttccacgccagcaccttgacttggcagcatggagccaaggtctgtccccgcccaggagggtgccttcctcgggggtagggggacggcccactctgccccagggagtcccttttgatgggaagtgcagtcagcagcgtggaggtgtctgggccaccttcagaaggtggatgtggtggccgagaccccgtccacggagggtgatggcctttcccttctgcaggtgcgggcaggtgggcctgggaccggtgctggggcctctccttgctgtgtgtgagggcccaggtggaaggcgcggacctgacagcattccaataaagcatacgggaacatgcaaaaaaaagtctggatgcatcc

SEQ ID NO: 437963 - DNA, 3195 bp, Homo sapiens
  misc_feature (3152)..(3152): n is a, c, g, or t
aagcgcaacgtagccggaagctggtggcggctggtgggcgaccgggcgcatcctcattgcagtgcggcggccctacctcggccctggcctgaccccggcggccctgcccgcccctccctccagcatcatggccagcccaagaaccaggaaggttcttaaagaagtcagggtgcaggatgagaacaacgtttgttttgagtgtggcgcgttcaatcctcagtgggtcagtgtgacctacggcatctggatctgcctggagtgctcggggagacaccgcgggcttggggttcacctcagctttgtgcgctctgttactatggacaagtggaaggacattgagcttgagaagatgaaagctggtgggaatgctaagttccgagagttcctggagtctcaggaggattacgatccttgctggtccttgcaggagaagtacaacagcagagccgcggccctctttagggataaggtggtcgctctggccgaaggcagagagtggtctctggagtcatcacctgcccagaactggaccccacctcagcccaggacgctgccgtccatggtgcaccgagtctctggccagccgcagagtgtgaccgcctcctcggacaaggcttttgaagactggctgaatgatgacctcggctcctatcaaggggcccaggggaatcgctacgtggggtttgggaacacgccaccgcctcagaagaaagaagatgacttcctcaacaacgccatgtcctccctgtactcgggctggagcagcttcaccactggagccagccggtttgcctcggcagccaaggagggcgctacaaagtttggatcccaagcgagtcagaaggcgtccgagctgggccacagcctgaacgagaacgtcctcaagcctgcgcaggagaaggtgaaggagggaaagatttttgatgatgtctccagtggggtctctcagttggcgtccaaggtccagggagtcggtagtaagggatggcgggacgtcaccacctttttttcggggaaagcagagggccccttggacagcccctcggagggccacagttatcagaacagcggtctggaccacttccaaaacagcaacatagaccagagcttctgggagacctttggaagtgctgagcccaccaagacccgcaagtccccgagcagcgacagctggacgtgcgcggacacctccaccgagaggaggagctcggacagctgggaggtgtggggctcggcctccaccaacaggaacagcaacagcgacggcggggagggcggggagggcaccaagaaggcagtgccgccggccgtgcccactgatgatggctgggacaaccagaactggtagggcccactgcgcccccgtccccagcgcccccgggcgacttcgtgtttgcactctgccctcgtcgttcctcctccttccatttgacccaagaatcagcaactgcagtgtgaggacagcgtctcgggaggcaggaccctagggagacccgggtgtgcgccgcctgcgcgtggggagtcttcggtgcgtgggggcggcttgctgtccagcctgtgtgggggccgtcccgtcccacactcccctgggcattcttggactcaaggccggggctctgcgtggcttgctgggaggtgggctgcagcacagaggcctgtgactgcgttccagcggccagttcactacgcagtatctctggggcctgggaccagccacgtgccgagctgtcagcgacgtgaggtgtcccttctcgttgagatatttaactttggttttgctctagttctttctttttgaagagagtgactggagtggtaaagatggaaatgctggaaatgatactggcgctcacgctgccatccgaccaccctcggctcccgagtccacgcctgcctgggcctgtgctgtcagacccgcgtcggtcgtaaccctctgtggctcccctgcatcagcaccgtcccaccaccaagttcaccaggttcaccagacacggcctccacaatagccacacccacacctgagctgttctcagtgctggaacttgaccatcctggaacaccctggaagaaaaaggagcgcagggtgggccctcggccctgatgcaggagggtgcgatagcggacgtggccaggcaggaggggccgggttcaggagctgagcaggggatgcctgtgcgtggtgcctgggtctagggaagctccagccccaggatggggctgccctgcacaccggtgcccgccacatgccaaccctcacctccccgaggactggatgatgtgctgccacgtgtgactcgtctcccttgtctgccctgtgtgaccctcagtcttggccagccatgcatgcgcccgaagctcgtgcagtttgtacgtgaggtgctctcctccctgccaccatgctcatcactctggccttggccatgctccctggtcaccccacttcccggtcgccgtctgcagcactcctggagcagcctgggcccttcagcccctgtgctcgtcccaccctagggactcagccacttgcagaacaggatgggaccgagatttcagcgagccctcctggcgcccggtcctccctgtgggcaccagccctcttggtagctggtgtggagggccggtgtccttggctgccacggagggatttgatcaccgaagcagccacctgctgtagttggacctgaggtcagaggcggggcatcagaggctcaaggtgctgagaagccaccgggaaagcagccagcacaaagggcccaggaagccagcccccgagagctgagcgtgggggtctttgagtgtctttctccaagctgagacgtgggcggccgcgtggtatctcccgagggctgcttggaccctggtgggctgagtgctccgaggaggggtggactccaccttggacagtgggatgtggtgttccacatgtgcctgtttccacgccagcaccttgacttggcagcatggagccaaggtctgtccccgcccaggagggtgccttcctcgggggtagggggacggcccactctgccccagggagtcccttttgatgggaagtgcagtcagcagcgtggaggtgtctgggccaccttcaaaaagtaaatataataaccaaaaccccatccacaaaaaataataacctttcccttctacanatacaaaccaataaacctagaaccaatactaaaacctctcctt

SEQ ID NO: 437964 - DNA, 2546 bp, Homo sapiens
aagcgcaacgtagccggaagctggtggcggctggtgggcgaccgggcgcatcctcattgcagtgcggcggccctacctcggccctggcctgaccccggcggccctgcccgcccctccctccagcatcatggccagcccaagaaccaggaaggttcttaaaggtgaaggagggaaagatttttgatgatgtctccagtggggtctctcagttggcgtccaaggtccagggagtcggtagtaagggatggcgggacgtcaccacctttttttcggggaaagcagagggccccttggacagcccctcggagggccacagttatcagaacagcggtctggaccacttccaaaacagcaacatagaccagagcttctgggagacctttggaagtgctgagcccaccaagacccgcaagtccccgagcagcgacagctggacgtgcgcggacacctccaccgagaggaggagctcggacagctgggaggtgtggggctcggcctccaccaacaggaacagcaacagcgacggcggggagggcggggagggcaccaagaaggcagtgccgccggccgtgcccactgatgatggctgggacaaccagaactggtagggcccactgcgcccccgtccccagcgcccccgggcgacttcgtgtttgcactctgccctcgtcgttcctcctccttccatttgacccaagaatcagcaactgcagtgtgaggacagcgtctcgggaggcaggaccctagggagacccgggtgtgcgccgcctgcgcgtggggagtcttcggtgcgtgggggcggcttgctgtccagcctgtgtgggggccgtcccgtcccacactcccctgggcattcttggactcaaggccggggctctgcgtggcttgctgggaggtgggctgcagcacagaggcctgtgactgcgttccagcggccagttcactacgcagtatctctggggcctgggaccagccacgtgccgagctgtcagcgacgtgaggtgtcccttctcgttgagatatttaactttggttttgctctagttctttctttttgaagagagtgactggagtggtaaagatggaaatgctggaaatgatactggcgctcacgctgccatccgaccaccctcggctcccgagtccacgcctgcctgggcctgtgctgtcagacccgcgtcggtcgtaaccctctgtggctcccctgcatcagcaccgtcccaccaccaagttcaccaggttcaccagacacggcctccacaatagccacacccacacctgagctgttctcagtgctggaacttgaccatcctggaacaccctggaagaaaaaggagcgcagggtgggccctcggccctgatgcaggagggtgcgatagcggacgtggccaggcaggaggggccgggttcaggagctgagcaggggatgcctgtgcgtggtgcctgggtctagggaagctccagccccaggatggggctgccctgcacaccggtgcccgccacatgccaaccctcacctccccgaggactggatgatgtgctgccacgtgtgactcgtctcccttgtctgccctgtgtgaccctcagtcttggccagccatgcatgcgcccgaagctcgtgcagtttgtacgtgaggtgctctcctccctgccaccatgctcatcactctggccttggccatgctccctggtcaccccacttcccggtcgccgtctgcagcactcctggagcagcctgggcccttcagcccctgtgctcgtcccaccctagggactcagccacttgcagaacaggatgggaccgagatttcagcgagccctcctggcgcccggtcctccctgtgggcaccagccctcttggtagctggtgtggagggccggtgtccttggctgccacggagggatttgatcaccgaagcagccacctgctgtagttggacctgaggtcagaggcggggcatcagaggctcaaggtgctgagaagccaccgggaaagcagccagcacaaagggcccaggaagccagcccccgagagctgagcgtgggggtctttgagtgtctttctccaagctgagacgtgggcggccgcgtggtatctcccgagggctgcttggaccctggtgggctgagtgctccgaggaggggtggactccaccttggacagtgggatgtggtgttccacatgtgcctgtttccacgccagcaccttgacttggcagcatggagccaaggtctgtccccgcccaggagggtgccttcctcgggggtagggggacggcccactctgccccagggagtcccttttgatgggaagtgcagtcagcagcgtggaggtgtctgggccaccttcagaaggtggatgtggtggccgagaccccgtccacggagggtgatggcctttcccttctgcaggtgcgggcaggtgggcctgggaccggtgctggggcctctccttgctgtgtgtgagggcccaggtggaaggcgcggacctgacagcattccaataaagcatacgggaacatgcaaaaaaaagtctggatgcatcc

SEQ ID NO: 437965 - DNA, 3178 bp, Homo sapiens
tgacccaggatcaggagaggctgagctcctttctcagcagcttcttcctatggccccagcctccgtgccctcttccctccaggggggactcggtgcctgcctggggaggaaggagaggcgttgcaggtcagcatggggtggctgcagccggcgttggcctcaggcacaggctccacagggcctgttcccaccagcccggcccggcagggccgcatggtggcgcgtgagggaggaccctggagggggaccttcctgcaagaattggtgggggccgcggtctccgccttctagaggtggcggcctactgcccttcgggtgttgtgtgcaaagccccgtttcctgctccctgcgcttgtatcctgctgccttccctcctgctggtgaagctcgtgctgccctttgctggcctgtgctgccactgccgacccgtgtcccgtggtggagctgtcgtggggctcacgtgacttcccttcctacaggcgtccgagctgggccacagcctgaacgagaacgtcctcaagcctgcgcaggagaaggtgaaggagggaaagatttttgatgatgtctccagtggggtctctcagttggcgtccaaggtagggagcctgccagatacgcgggcacagtcgaagccagtctccatattccacggccctgggcgtgagagcagggtgtgccccgtgcagccctcagcccagcttggcagtggccgctgtcctctgagacgggaggagagctgcccagcctgacagcccgagggatatggaaacaacttggcccactgcggcccggtcagccactaactgtcacttctccctctgctcttatcttgctgctgctggccttttcctcggtccagggagtcggtagtaagggatggcgggacgtcaccacctttttttcggggaaagcagagggccccttggacagcccctcggagggccacagttatcagaacagcggtctggaccacttccaaaacagcaacatagaccagagcttctgggagacctttggaagtgctgagcccaccaagacccgcaagtccccgagcagcgacagctggacgtgcgcggacacctccaccgagaggaggagctcggacagctgggaggtgtggggctcggcctccaccaacaggaacagcaacagcgacggcggggagggcggggagggcaccaagaaggcagtgccgccggccgtgcccactgatgatggctgggacaaccagaactggtagggcccactgcgcccccgtccccagcgcccccgggcgacttcgtgtttgcactctgccctcgtcgttcctcctccttccatttgacccaagaatcagcaactgcagtgtgaggacagcgtctcgggaggcaggaccctagggagacccgggtgtgcgccgcctgcgcgtggggagtcttcggtgcgtgggggcggcttgctgtccagcctgtgtgggggccgtcccgtcccacactcccctgggcattcttggactcaaggccggggctctgcgtggcttgctgggaggtgggctgcagcacagaggcctgtgactgcgttccagcggccagttcactacgcagtatctctggggcctgggaccagccacgtgccgagctgtcagcgacgtgaggtgtcccttctcgttgagatatttaactttggttttgctctagttctttctttttgaagagagtgactggagtggtaaagatggaaatgctggaaatgatactggcgctcacgctgccatccgaccaccctcggctcccgagtccacgcctgcctgggcctgtgctgtcagacccgcgtcggtcgtaaccctctgtggctcccctgcatcagcaccgtcccaccaccaagttcaccaggttcaccagacacggcctccacaatagccacacccacacctgagctgttctcagtgctggaacttgaccatcctggaacaccctggaagaaaaaggagcgcagggtgggccctcggccctgatgcaggagggtgcgatagcggacgtggccaggcaggaggggccgggttcaggagctgagcaggggatgcctgtgcgtggtgcctgggtctagggaagctccagccccaggatggggctgccctgcacaccggtgcccgccacatgccaaccctcacctccccgaggactggatgatgtgctgccacgtgtgactcgtctcccttgtctgccctgtgtgaccctcagtcttggccagccatgcatgcgcccgaagctcgtgcagtttgtacgtgaggtgctctcctccctgccaccatgctcatcactctggccttggccatgctccctggtcaccccacttcccggtcgccgtctgcagcactcctggagcagcctgggcccttcagcccctgtgctcgtcccaccctagggactcagccacttgcagaacaggatgggaccgagatttcagcgagccctcctggcgcccggtcctccctgtgggcaccagccctcttggtagctggtgtggagggccggtgtccttggctgccacggagggatttgatcaccgaagcagccacctgctgtagttggacctgaggtcagaggcggggcatcagaggctcaaggtgctgagaagccaccgggaaagcagccagcacaaagggcccaggaagccagcccccgagagctgagcgtgggggtctttgagtgtctttctccaagctgagacgtgggcggccgcgtggtatctcccgagggctgcttggaccctggtgggctgagtgctccgaggaggggtggactccaccttggacagtgggatgtggtgttccacatgtgcctgtttccacgccagcaccttgacttggcagcatggagccaaggtctgtccccgcccaggagggtgccttcctcgggggtagggggacggcccactctgccccagggagtcccttttgatgggaagtgcagtcagcagcgtggaggtgtctgggccaccttcagaaggtggatgtggtggccgagaccccgtccacggagggtgatggcctttcccttctgcaggtgcgggcaggtgggcctgggaccggtgctggggcctctccttgctgtgtgtgagggcccaggtggaaggcgcggacctgacagcattccaataaagcatacgggaacatgcaaaaaaaagtctggatgcatcc

SEQ ID NO: 437966 - DNA, 2812 bp, Homo sapiens
gctggaatccctttggggccactgtagaactttctggggctcagcctgatgggtatccacatgcccctgatatttcggatgccctcacccgggggattcctgcactcctgaagctttaagctttcatctctcccgcccccattaatgccgctgtcttcatccgtgcaggtgtgaaggagggaaagatttttgatgatgtctccagtggggtctctcagttggcgtccaaggtagggagcctgccagatacgcgggcacagtcgaagccagtctccatattccacggccctgggcgtgagagcagggtgtgccccgtgcagccctcagcccagcttggcagtggccgctgtcctctgagacgggaggagagctgcccagcctgacagcccgagggatatggaaacaacttggcccactgcggcccggtcagccactaactgtcacttctccctctgctcttatcttgctgctgctggccttttcctcggtccagggagtcggtagtaagggatggcgggacgtcaccacctttttttcggggaaagcagagggccccttggacagcccctcggagggccacagttatcagaacagcggtctggaccacttccaaaacagcaacatagaccagagcttctgggagacctttggaagtgctgagcccaccaagacccgcaagtccccgagcagcgacagctggacgtgcgcggacacctccaccgagaggaggagctcggacagctgggaggtgtggggctcggcctccaccaacaggaacagcaacagcgacggcggggagggcggggagggcaccaagaaggcagtgccgccggccgtgcccactgatgatggctgggacaaccagaactggtagggcccactgcgcccccgtccccagcgcccccgggcgacttcgtgtttgcactctgccctcgtcgttcctcctccttccatttgacccaagaatcagcaactgcagtgtgaggacagcgtctcgggaggcaggaccctagggagacccgggtgtgcgccgcctgcgcgtggggagtcttcggtgcgtgggggcggcttgctgtccagcctgtgtgggggccgtcccgtcccacactcccctgggcattcttggactcaaggccggggctctgcgtggcttgctgggaggtgggctgcagcacagaggcctgtgactgcgttccagcggccagttcactacgcagtatctctggggcctgggaccagccacgtgccgagctgtcagcgacgtgaggtgtcccttctcgttgagatatttaactttggttttgctctagttctttctttttgaagagagtgactggagtggtaaagatggaaatgctggaaatgatactggcgctcacgctgccatccgaccaccctcggctcccgagtccacgcctgcctgggcctgtgctgtcagacccgcgtcggtcgtaaccctctgtggctcccctgcatcagcaccgtcccaccaccaagttcaccaggttcaccagacacggcctccacaatagccacacccacacctgagctgttctcagtgctggaacttgaccatcctggaacaccctggaagaaaaaggagcgcagggtgggccctcggccctgatgcaggagggtgcgatagcggacgtggccaggcaggaggggccgggttcaggagctgagcaggggatgcctgtgcgtggtgcctgggtctagggaagctccagccccaggatggggctgccctgcacaccggtgcccgccacatgccaaccctcacctccccgaggactggatgatgtgctgccacgtgtgactcgtctcccttgtctgccctgtgtgaccctcagtcttggccagccatgcatgcgcccgaagctcgtgcagtttgtacgtgaggtgctctcctccctgccaccatgctcatcactctggccttggccatgctccctggtcaccccacttcccggtcgccgtctgcagcactcctggagcagcctgggcccttcagcccctgtgctcgtcccaccctagggactcagccacttgcagaacaggatgggaccgagatttcagcgagccctcctggcgcccggtcctccctgtgggcaccagccctcttggtagctggtgtggagggccggtgtccttggctgccacggagggatttgatcaccgaagcagccacctgctgtagttggacctgaggtcagaggcggggcatcagaggctcaaggtgctgagaagccaccgggaaagcagccagcacaaagggcccaggaagccagcccccgagagctgagcgtgggggtctttgagtgtctttctccaagctgagacgtgggcggccgcgtggtatctcccgagggctgcttggaccctggtgggctgagtgctccgaggaggggtggactccaccttggacagtgggatgtggtgttccacatgtgcctgtttccacgccagcaccttgacttggcagcatggagccaaggtctgtccccgcccaggagggtgccttcctcgggggtagggggacggcccactctgccccagggagtcccttttgatgggaagtgcagtcagcagcgtggaggtgtctgggccaccttcagaaggtggatgtggtggccgagaccccgtccacggagggtgatggcctttcccttctgcaggtgcgggcaggtgggcctgggaccggtgctggggcctctccttgctgtgtgtgagggcccaggtggaaggcgcggacctgacagcattccaataaagcatacgggaacatgcaaaaaaaagtctggatgcatcc

SEQ ID NO: 437967 - DNA, 1692 bp, Homo sapiens
gtcatagccgactctagagtgtaaaattcaggccagggaagccgtactgatgcccataggcctgtgactgcgttccagcggccagttcactacgcagtatctctggggcctgggaccagccacgtgccgagctgtcagcgacgtgaggtgtcccttctcgttgagatatttaactttggttttgctctagttctttctttttgaagagagtgactggagtggtaaagatggaaatgctggaaatgatactggcgctcacgctgccatccgaccaccctcggctcccgagtccacgcctgcctgggcctgtgctgtcagacccgcgtcggtcgtaaccctctgtggctcccctgcatcagcaccgtcccaccaccaagttcaccaggttcaccagacacggcctccacaatagccacacccacacctgagctgttctcagtgctggaacttgaccatcctggaacaccctggaagaaaaaggagcgcagggtgggccctcggccctgatgcaggagggtgcgatagcggacgtggccaggcaggaggggccgggttcaggagctgagcaggggatgcctgtgcgtggtgcctgggtctagggaagctccagccccaggatggggctgccctgcacaccggtgcccgccacatgccaaccctcacctccccgaggactggatgatgtgctgccacgtgtgactcgtctcccttgtctgccctgtgtgaccctcagtcttggccagccatgcatgcgcccgaagctcgtgcagtttgtacgtgaggtgctctcctccctgccaccatgctcatcactctggccttggccatgctccctggtcaccccacttcccggtcgccgtctgcagcactcctggagcagcctgggcccttcagcccctgtgctcgtcccaccctagggactcagccacttgcagaacaggatgggaccgagatttcagcgagccctcctggcgcccggtcctccctgtgggcaccagccctcttggtagctggtgtggagggccggtgtccttggctgccacggagggatttgatcaccgaagcagccacctgctgtagttggacctgaggtcagaggcggggcatcagaggctcaaggtgctgagaagccaccgggaaagcagccagcacaaagggcccaggaagccagcccccgagagctgagcgtgggggtctttgagtgtctttctccaagctgagacgtgggcggccgcgtggtatctcccgagggctgcttggaccctggtgggctgagtgctccgaggaggggtggactccaccttggacagtgggatgtggtgttccacatgtgcctgtttccacgccagcaccttgacttggcagcatggagccaaggtctgtccccgcccaggagggtgccttcctcgggggtagggggacggcccactctgccccagggagtcccttttgatgggaagtgcagtcagcagcgtggaggtgtctgggccaccttcagaaggtggatgtggtggccgagaccccgtccacggagggtgatggcctttcccttctgcaggtgcgggcaggtgggcctgggaccggtgctggggcctctccttgctgtgtgtgagggcccaggtggaaggcgcggacctgacagcattccaataaagcatacgggaacatgcaaaaaaaagtctggatgcatcc

SEQ ID NO: 437968 - DNA, 1361 bp, Homo sapiens
tgagtcgcctagtttgacttcgggcaggcaccgtcccaccaccaagttcaccaggttcaccagacacggcctccacaatagccacacccacacctgagctgttctcagtgctggaacttgaccatcctggaacaccctggaagaaaaaggagcgcagggtgggccctcggccctgatgcaggagggtgcgatagcggacgtggccaggcaggaggggccgggttcaggagctgagcaggggatgcctgtgcgtggtgcctgggtctagggaagctccagccccaggatggggctgccctgcacaccggtgcccgccacatgccaaccctcacctccccgaggactggatgatgtgctgccacgtgtgactcgtctcccttgtctgccctgtgtgaccctcagtcttggccagccatgcatgcgcccgaagctcgtgcagtttgtacgtgaggtgctctcctccctgccaccatgctcatcactctggccttggccatgctccctggtcaccccacttcccggtcgccgtctgcagcactcctggagcagcctgggcccttcagcccctgtgctcgtcccaccctagggactcagccacttgcagaacaggatgggaccgagatttcagcgagccctcctggcgcccggtcctccctgtgggcaccagccctcttggtagctggtgtggagggccggtgtccttggctgccacggagggatttgatcaccgaagcagccacctgctgtagttggacctgaggtcagaggcggggcatcagaggctcaaggtgctgagaagccaccgggaaagcagccagcacaaagggcccaggaagccagcccccgagagctgagcgtgggggtctttgagtgtctttctccaagctgagacgtgggcggccgcgtggtatctcccgagggctgcttggaccctggtgggctgagtgctccgaggaggggtggactccaccttggacagtgggatgtggtgttccacatgtgcctgtttccacgccagcaccttgacttggcagcatggagccaaggtctgtccccgcccaggagggtgccttcctcgggggtagggggacggcccactctgccccagggagtcccttttgatgggaagtgcagtcagcagcgtggaggtgtctgggccaccttcagaaggtggatgtggtggccgagaccccgtccacggagggtgatggcctttcccttctgcaggtgcgggcaggtgggcctgggaccggtgctggggcctctccttgctgtgtgtgagggcccaggtggaaggcgcggacctgacagcattccaataaagcatacgggaacatgcaaaaaaaagtctggatgcatcc

SEQ ID NO: 437969 - DNA, 1416 bp, Homo sapiens
cgcctgctgggcctgtgctgtcagacccgcgtcggtcgtaaccctctgtggctcccctgcatcagcagtgtcccttctcgttgagatatttaactttggttttgctctagttctttctttttgaagagagtgactggagtggtaaagatggaaatgctggaaatgatactggcgctcacgctgccatccgaccaccctcggctcccgagtccacgcctgcctgggcctgtgctgtcagacccgcgatagcggacgtggccaggcaggaggggccgggttcaggagctgagcaggggatgcctgtgcgtggtgcctgggtctagggaagctccagccccaggatggggctgccctgcacaccggtgcccgccacatgccaaccctcacctccccgaggactggatgatgtgctgccacgtgtgactcgtctcccttgtctgccctgtgtgaccctcagtcttggccagccatgcatgcgcccgaagctcgtgcagtttgtacgtgaggtgctctcctccctgccaccatgctcatcactctggccttggccatgctccctggtcaccccacttcccggtcgccgtctgcagcactcctggagcagcctgggcccttcagcccctgtgctcgtcccaccctagggactcagccacttgcagaacaggatgggaccgagatttcagcgagccctcctggcgcccggtcctccctgtgggcaccagccctcttggtagctggtgtggagggccggtgtccttggctgccacggagggatttgatcaccgaagcagccacctgctgtagttggacctgaggtcagaggcggggcatcagaggctcaaggtgctgagaagccaccgggaaagcagccagcacaaagggcccaggaagccagcccccgagagctgagcgtgggggtctttgagtgtctttctccaagctgagacgtgggcggccgcgtggtatctcccgagggctgcttggaccctggtgggctgagtgctccgaggaggggtggactccaccttggacagtgggatgtggtgttccacatgtgcctgtttccacgccagcaccttgacttggcagcatggagccaaggtctgtccccgcccaggagggtgccttcctcgggggtagggggacggcccactctgccccagggagtcccttttgatgggaagtgcagtcagcagcgtggaggtgtctgggccaccttcagaaggtggatgtggtggccgagaccccgtccacggagggtgatggcctttcccttctgcaggtgcgggcaggtgggcctgggaccggtgctggggcctctccttgctgtgtgtgagggcccaggtggaaggcgcggacctgacagcattccaataaagcatacgggaacatgcaaaaaaaagtctggatgcatcc

SEQ ID NO: 437970 - DNA, 2803 bp, Homo sapiens
aagcgcaacgtagccggaagctggtggcggctggtgggcgaccgggcgcatcctcattgcagtgcggcggccctacctcggccctggcctgaccccggcggccctgcccgcccctccctccagcatcatggccagcccaagaaccaggaaggttcttaaagaagtcagggtgcaggatgagaacaacgtttgttttgagtgtggcgcgttcaatcctcagtgggtcagtgtgacctacggcatctggatctgcctggagtgctcggggagacaccgcgggcttggggttcacctcagctttgtgcgctctgttactatggacaagtggaaggacattgagcttgagaagatgaaagctggtgggaatgctaagttccgagagttcctggagtctcaggaggattacgatccttgctggtccttgcaggagaagtacaacagcagagccgcggccctctttagggataaggtggtcgctctggccgaaggcagagagtggtctctggagtcatcacctgcccagaactggaccccacctcagcccaggacgctgccgtccatggtgcaccgagtctctggccagccgcagagtgtgaccgcctcctcggacaaggcttttgaagactggctgaatgatgacctcggctcctatcaaggggcccaggggaatcgctacgtggggtttgggaacacgccaccgcctcagaagaaagaagatgacttcctcaacaacgccatgtcctccctgtactcgggctggagcagcttcaccactggagccagccggtttgcctcggcagccaaggagggcgctacaaagtttggatcccaagcgagtcagaaggcgtccgagctgggccacagcctgaacgagaacgtcctcaagcctgcgcaggagaaggtgaaggagggaaagatttttgatgatgtctccagtggggtctctcagttggcgtccaaggtccagggagtcggtagtaagggatggcgggacgtcaccacctttttttcggggaaagcagagggccccttggacagcccctcggagggccacagttatcagaacagcggtctggaccacttccaaaacagcaacatagaccagagcttctgggagacctttggaagtgctgagcccaccaagacccgcaagtccccgagcagcgacagctggacgtgcgcggacacctccaccgagaggaggagctcggacagctgggaggtgtggggctcggcctccaccaacaggaacagcaacagcgacggcggggagggcggggagggcaccaagaaggcagtgccgccggccgtgcccactgatgatggctgggacaaccagaactggtagggcccactgcgcccccgtccccagcgcccccgggcgacttcgtgtttgcactctgccctcgtcgttcctcctccttccatttgacccaagaatcagcaactgcagtgtgaggacagcgtctcgggaggcaggaccctagggagacccgggtgtgcgccgcctgcgcgtggggagtcttcggtgcgtgggggcggcttgctgtccagcctgtgtgggggccgtcccgtcccacactcccctgggcattcttggactcaaggccggggctctgcgtggcttgctgggaggtgggctgcagcacagaggcctgtgactgcgttccagcggccagttcactacgcagtatctctggggcctgggaccagccacgtgccgagctgtcagcgacgtgaggtgtcccttctcgttgagatatttaactttggttttgctctagttctttctttttgaagagagtgactggagtggtaaagatggaaatgctggaaatgatactggcgctcacgctgccatccgaccaccctcggctcccgagtccacgcctgcctgggcctgtgctgtcagacccgcgtcggtcgtaaccctctgtggctcccctgcatcagcaccgtcccaccaccaagttcaccaggttcaccagacacggcctccacaatagccacacccacacctgagctgttctcagtgctggaacttgaccatcctggaacaccctggaagaaaaaggagcgcagggtgggccctcggccctgatgcaggagggtgcgatagcggacgtggccaggcaggaggggccgggttcaggagctgagcaggggatgcctgtgcgtggtgcctgggtctagggaagctccagccccaggatggggctgccctgcacaccggtgcccgccacatgccaaccctcacctccccgaggactggatgatgtgctgccacgtgtgactcgtctcccttgtctgccctgtgtgaccctcagtcttggccagccatgcatgcgcccgaagctcgtgcagtttgtacgtgaggtgctctcctccctgccaccatgctcatcactctggccttggccatgctccctggtcaccccacttcccggtcgccgtctgcagcactcctggagcagcctgggcccttcagcccctgtgctcgtcccaccctagggactcagccacttgcagaacaggatgggaccgagatttcagcgagccctcctggcgcccggtcctccctgtgggcaccagccctcttggtagctggtgtggagggccggtgtccttggctgccacggagggatttgatcaccgaagcagccacctgctgtagttggacttcagcccccacccccgccctcaggagttgagggcatggatatgtttctttttttatttacactttttatgtgtgccggtttgccgggataaacagggcctttggcattgtgtaaaaaaaaat

SEQ ID NO: 437971 - DNA, 2397 bp, Homo sapiens
aagcgcaacgtagccggaagctggtggcggctggtgggcgaccgggcgcatcctcattgcagtgcggcggccctacctcggccctggcctgaccccggcggccctgcccgcccctccctccagcatcatggccagcccaagaaccaggaaggttcttaaagaagtcagggtgcaggatgagaacaacgtttgttttgagtgtggcgcgttcaatcctcagtgggtcagtgtgacctacggcatctggatctgcctggagtgctcggggagacaccgcgggcttggggttcacctcagctttgtgcgctctgttactatggacaagtggaaggacattgagcttgagaagatgaaagctggtgggaatgctaagttccgagagttcctggagtctcaggaggattacgatccttgctggtccttgcaggagaagtacaacagcagagccgcggccctctttagggataaggtggtcgctctggccgaaggcagagagtggtctctggagtcatcacctgcccagaactggaccccacctcagcccaggacgctgccgtccatggtgcaccgagtctctggccagccgcagagtgtgaccgcctcctcggacaaggcttttgaagactggctgaatgatgacctcggctcctatcaaggggcccaggggaatcgctacgtggggtttgggaacacgccaccgcctcagaagaaagaagatgacttcctcaacaacgccatgtcctccctgtactcgggctggagcagcttcaccactggagccagccggtttgcctcggcagccaaggagggcgctacaaagtttggatcccaagcgagtcagaaggcgtccgagctgggccacagcctgaacgagaacgtcctcaagcctgcgcaggagaaggtgaaggagggaaagatttttgatgatgtctccagtggggtctctcagttggcgtccaaggtccagggagtcggtagtaagggatggcgggacgtcaccacctttttttcggggaaagcagagggccccttggacagcccctcggagggccacagttatcagaacagcggtctggaccacttccaaaacagcaacatagaccagagcttctgggagacctttggaagtgctgagcccaccaagacccgcaagtccccgagcagcgacagctggacgtgcgcggacacctccaccgagaggaggagctcggacagctgggaggtgtggggctcggcctccaccaacaggaacagcaacagcgacggcggggagggcggggagggcaccaagaaggcagtgccgccggccgtgcccactgatgatggctgggacaaccagaactggtagggcccactgcgcccccgtccccagcgcccccgggcgacttcgtgtttgcactctgccctcgtcgttcctcctccttccatttgacccaagaatcagcaactgcagtgtgaggacagcgtctcgggaggcaggaccctagggagacccgggtgtgcgccgcctgcgcgtggggagtcttcggtgcgtgggggcggcttgctgtccagcctgtgtgggggccgtcccgtcccacactcccctgggcattcttggactcaaggccggggctctgcgtggcttgctgggaggtgggctgcagcacagaggcctgtgactgcgttccagcggccagttcactacgcagtatctctggggcctgggaccagccacgtgccgagctgtcagcgacgtgaggtgtcccttctcgttgagatatttaactttggttttgctctagttctttctttttgaagagagtgactggagtggtaaagatggaaatgctggaaatgatactggcgctcacgctgccatccgaccaccctcggctcccgagtccacgcctgcctgggcctgtgctgtcagacccgcgtcggtcgtaaccctctgtggctcccctgcatcagcaccgtcccaccaccaagttcaccaggttcaccagacacggcctccacaatagccacacccacacctgagctgttctcagtgctggaacttgaccatcctggaacttgacttggcagcatggagccaaggtctgtccccgcccaggagggtgccttcctcgggggtagggggacggcccactctgccccagggagtcccttttgatgggaagtgcagtcagcagcgtggaggtgtctgggccaccttcagaaggtggatgtggtggccgagaccccgtccacggagggtgatggcctttcccttctgcaggtgcgggcaggtgggcctgggaccggtgctggggcctctccttgctgtgtgtgagggcccaggtggaaggcgcggacctgacagcattccaataaagcatacgggaacatgcaaaaaaaagtctggatgcatcc

SEQ ID NO: 437972 - DNA, 362 bp, Homo sapiens
ctccaggcgggccgtggggggtgcgctggagtcgacggtgcccgagggcatcgccaggcgcctttatgctctcgaatgccctgtgtctccttgtcaggtggtcgctctggccgaaggcagagagtggtctctggagtcatcacctgcccagaactggaccccacctcagcccaggacgctgccgtccatggtgcaccggtagctgctcctcgtggggccttagtacagtttccactgggtcctgaacttagtagattgggtttcccacagaattctccccttctttgctgttgtgacagctcttttcccagaagtcagtgggaaaaacagctttttaaaattgccaaaacaatacaagcttt

SEQ ID NO: 437973 - DNA, 755 bp, Homo sapiens
  misc_feature (70)..(70): n is a, c, g, or t
agcagttttgcccttgtttccccaaagtggaatttacccctcttaaaaggaaccaaaagcggaggccccnccccggtgccgccgccctagaactattggattccccgggttcaaggaattggcgaagcagccacctgctgtagttggacctgaggtcagaggcggggcatcagaggctcaaggtgctgagaagccaccgggaaagcagccagcacaaagggcccaggaagccagcccccgagagctgagcgtgggggtctttgagtgtctttctccaagctgagacgtgggcggccgcgtggtatctcccgagggctgcttggaccctggtgggctgagtgctccgaggaggggtggactccaccttggacagtgggatgtggtgttccacatgtgcctgtttccacgccagcaccttgacttggcagcatggagccaaggtctgtccccgcccaggagggtgccttcctcgggggtagggggacggcccactctgccccagggagtcccttttgatgggaagtgcagtcagcagcgtggaggtgtctgggccaccttcagaaggtggatgtggtggccgagaccccgtccacggagggtgatggcctttcccttctgcaggtgcgggcaggtgggcctgggaccggtgctggggcctctccttgctgtgtgtgagggcccaggtggaaggcgcggacctgacagcattccaataaagcatacgggaacatgcaaaaaaaagtctggatgcatcc

SEQ ID NO: 437974 - DNA, 3360 bp, Homo sapiens
cggatctggaatctcccaccggttacgggagtccagagggtccctgcccacgcacgtcgcctcccggggcgcgagcaggaccctgccccgtccgcttcaacacccttttcccgagctccttcggacccaggactcggcctggacacatcccagtcaggtggcctctgaagcccggtggggcttccaccccctaagaacatcatggccagcccaagaaccaggaaggttcttaaagaagtcagggtgcaggatgagaacaacgtttgttttgagtgtggcgcgttcaatcctcagtgggtcagtgtgacctacggcatctggatctgcctggagtgctcggggagacaccgcgggcttggggttcacctcagctttgtgcgctctgttactatggacaagtggaaggacattgagcttgagaagatgaaagctggtgggaatgctaagttccgagagttcctggagtctcaggaggattacgatccttgctggtccttgcaggagaagtacaacagcagagccgcggccctctttagggataaggtggtcgctctggccgaaggcagagagtggtctctggagtcatcacctgcccagaactggaccccacctcagcccaggacgctgccgtccatggtgcaccgagtctctggccagccgcagagtgtgaccgcctcctcggacaaggcttttgaagactggctgaatgatgacctcggctcctatcaaggggcccaggggaatcgctacgtggggtttgggaacacgccaccgcctcagaagaaagaagatgacttcctcaacaacgccatgtcctccctgtactcgggctggagcagcttcaccactggagccagccggtttgcctcggcagccaaggagggcgctacaaagtttggatcccaagcgagtcagaaggcgtccgagctgggccacagcctgaacgagaacgtcctcaagcctgcgcaggagaaggtgaaggagggaaagatttttgatgatgtctccagtggggtctctcagttggcgtccaaggtccagggagtcggtagtaagggatggcgggacgtcaccacctttttttcggggaaagcagagggccccttggacagcccctcggagggccacagttatcagaacagcggtctggaccacttccaaaacagcaacatagaccagagcttctgggagacctttggaagtgctgagcccaccaagacccgcaagtccccgagcagcgacagctggacgtgcgcggacacctccaccgagaggaggagctcggacagctgggaggtgtggggctcggcctccaccaacaggaacagcaacagcgacggcggggagggcggggagggcaccaagaaggcagtgccgccggccgtgcccactgatgatggctgggacaaccagaactggtagggcccactgcgcccccgtccccagcgcccccgggcgacttcgtgtttgcactctgccctcgtcgttcctcctccttccatttgacccaagaatcagcaactgcagtgtgaggacagcgtctcgggaggcaggaccctagggagacccgggtgtgcgccgcctgcgcgtggggagtcttcggtgcgtgggggcggcttgctgtccagcctgtgtgggggccgtcccgtcccacactcccctgggcattcttggactcaaggccggggctctgcgtggcttgctgggaggtgggctgcagcacagaggcctgtgactgcgttccagcggccagttcactacgcagtatctctggggcctgggaccagccacgtgccgagctgtcagcgacgtgaggtgtcccttctcgttgagatatttaactttggttttgctctagttctttctttttgaagagagtgactggagtggtaaagatggaaatgctggaaatgatactggcgctcacgctgccatccgaccaccctcggctcccgagtccacgcctgcctgggcctgtgctgtcagacccgcgtcggtcgtaaccctctgtggctcccctgcatcagcaccgtcccaccaccaagttcaccaggttcaccagacacggcctccacaatagccacacccacacctgagctgttctcagtgctggaacttgaccatcctggaacaccctggaagaaaaaggagcgcagggtgggccctcggccctgatgcaggagggtgcgatagcggacgtggccaggcaggaggggccgggttcaggagctgagcaggggatgcctgtgcgtggtgcctgggtctagggaagctccagccccaggatggggctgccctgcacaccggtgcccgccacatgccaaccctcacctccccgaggactggatgatgtgctgccacgtgtgactcgtctcccttgtctgccctgtgtgaccctcagtcttggccagccatgcatgcgcccgaagctcgtgcagtttgtacgtgaggtgctctcctccctgccaccatgctcatcactctggccttggccatgctccctggtcaccccacttcccggtcgccgtctgcagcactcctggagcagcctgggcccttcagcccctgtgctcgtcccaccctagggactcagccacttgcagaacaggatgggaccgagatttcagcgagccctcctggcgcccggtcctccctgtgggcaccagccctcttggtagctggtgtggagggccggtgtccttggctgccacggagggatttgatcaccgaagcagccacctgctgtagttggacctgaggtcagaggcggggcatcagaggctcaaggtgctgagaagccaccgggaaagcagccagcacaaagggcccaggaagccagcccccgagagctgagcgtgggggtctttgagtgtctttctccaagctgagacgtgggcggccgcgtggtatctcccgagggctgcttggaccctggtgggctgagtgctccgaggaggggtggactccaccttggacagtgggatgtggtgttccacatgtgcctgtttccacgccagcaccttgacttggcagcatggagccaaggtctgtccccgcccaggagggtgccttcctcgggggtagggggacggcccactctgccccagggagtcccttttgatgggaagtgcagtcagcagcgtggaggtgtctgggccaccttcagaaggtggatgtggtggccgagaccccgtccacggagggtgatggcctttcccttctgcaggtgcgggcaggtgggcctgggaccggtgctggggcctctccttgctgtgtgtgagggcccaggtggaaggcgcggacctgacagcattccaataaagcatacgggaacatgcaaaaaaaagtctggatgcatcc

SEQ ID NO: 437975 - DNA, 2921 bp, Homo sapiens
tgacccaggatcaggagaggctgagctcctttctcagcagcttcttcctatggccccagcctccgtgccctcttccctccaggggggactcggtgcctgcctggggaggaaggagaggcgttgcaggtcagcatggggtggctgcagccggcgttggcctcaggcacaggctccacagggcctgttcccaccagcccggcccggcagggccgcatggtggcgcgtgagggaggaccctggagggggaccttcctgcaagaattggtgggggccgcggtctccgccttctagaggtggcggcctactgcccttcgggtgttgtgtgcaaagccccgtttcctgctccctgcgcttgtatcctgctgccttccctcctgctggtgaagctcgtgctgccctttgctggcctgtgctgccactgccgacccgtgtcccgtggtggagctgtcgtggggctcacgtgacttcccttcctacaggcgtccgagctgggccacagcctgaacgagaacgtcctcaagcctgcgcaggagaaggtgaaggagggaaagatttttgatgatgtctccagtggggtctctcagttggcgtccaaggtccagggagtcggtagtaagggatggcgggacgtcaccacctttttttcggggaaagcagagggccccttggacagcccctcggagggccacagttatcagaacagcggtctggaccacttccaaaacagcaacatagaccagagcttctgggagacctttggaagtgctgagcccaccaagacccgcaagtccccgagcagcgacagctggacgtgcgcggacacctccaccgagaggaggagctcggacagctgggaggtgtggggctcggcctccaccaacaggaacagcaacagcgacggcggggagggcggggagggcaccaagaaggcagtgccgccggccgtgcccactgatgatggctgggacaaccagaactggtagggcccactgcgcccccgtccccagcgcccccgggcgacttcgtgtttgcactctgccctcgtcgttcctcctccttccatttgacccaagaatcagcaactgcagtgtgaggacagcgtctcgggaggcaggaccctagggagacccgggtgtgcgccgcctgcgcgtggggagtcttcggtgcgtgggggcggcttgctgtccagcctgtgtgggggccgtcccgtcccacactcccctgggcattcttggactcaaggccggggctctgcgtggcttgctgggaggtgggctgcagcacagaggcctgtgactgcgttccagcggccagttcactacgcagtatctctggggcctgggaccagccacgtgccgagctgtcagcgacgtgaggtgtcccttctcgttgagatatttaactttggttttgctctagttctttctttttgaagagagtgactggagtggtaaagatggaaatgctggaaatgatactggcgctcacgctgccatccgaccaccctcggctcccgagtccacgcctgcctgggcctgtgctgtcagacccgcgtcggtcgtaaccctctgtggctcccctgcatcagcaccgtcccaccaccaagttcaccaggttcaccagacacggcctccacaatagccacacccacacctgagctgttctcagtgctggaacttgaccatcctggaacaccctggaagaaaaaggagcgcagggtgggccctcggccctgatgcaggagggtgcgatagcggacgtggccaggcaggaggggccgggttcaggagctgagcaggggatgcctgtgcgtggtgcctgggtctagggaagctccagccccaggatggggctgccctgcacaccggtgcccgccacatgccaaccctcacctccccgaggactggatgatgtgctgccacgtgtgactcgtctcccttgtctgccctgtgtgaccctcagtcttggccagccatgcatgcgcccgaagctcgtgcagtttgtacgtgaggtgctctcctccctgccaccatgctcatcactctggccttggccatgctccctggtcaccccacttcccggtcgccgtctgcagcactcctggagcagcctgggcccttcagcccctgtgctcgtcccaccctagggactcagccacttgcagaacaggatgggaccgagatttcagcgagccctcctggcgcccggtcctccctgtgggcaccagccctcttggtagctggtgtggagggccggtgtccttggctgccacggagggatttgatcaccgaagcagccacctgctgtagttggacctgaggtcagaggcggggcatcagaggctcaaggtgctgagaagccaccgggaaagcagccagcacaaagggcccaggaagccagcccccgagagctgagcgtgggggtctttgagtgtctttctccaagctgagacgtgggcggccgcgtggtatctcccgagggctgcttggaccctggtgggctgagtgctccgaggaggggtggactccaccttggacagtgggatgtggtgttccacatgtgcctgtttccacgccagcaccttgacttggcagcatggagccaaggtctgtccccgcccaggagggtgccttcctcgggggtagggggacggcccactctgccccagggagtcccttttgatgggaagtgcagtcagcagcgtggaggtgtctgggccaccttcagaaggtggatgtggtggccgagaccccgtccacggagggtgatggcctttcccttctgcaggtgcgggcaggtgggcctgggaccggtgctggggcctctccttgctgtgtgtgagggcccaggtggaaggcgcggacctgacagcattccaataaagcatacgggaacatgcaaaaaaaagtctggatgcatcc

SEQ ID NO: 437976 - DNA, 3480 bp, Homo sapiens
aagcgcaacgtagccggaagctggtggcggctggtgggcgaccgggcgcatcctcattgcagtgcggcggccctacctcggccctggcctgaccccggcggccctgcccgcccctccctccagcatcatggccagcccaagaaccaggaaggttcttaaagaagtcagggtgcaggatgagaacaacgtttgttttgagtgtggcgcgttcaatcctcagtgggtcagtgtgacctacggcatctggatctgcctggagtgctcggggagacaccgcgggcttggggttcacctcagctttgtgcgctctgttactatggacaagtggaaggacattgagcttgagaagatgaaagctggtgggaatgctaagttccgagagttcctggagtctcaggaggattacgatccttgctggtccttgcaggagaagtacaacagcagagccgcggccctctttagggataaggtggtcgctctggccgaaggcagagagtggtctctggagtcatcacctgcccagaactggaccccacctcagcccaggacgctgccgtccatggtgcaccgagtctctggccagccgcagagtgtgaccgcctcctcggacaaggcttttgaagactggctgaatgatgacctcggctcctatcaaggggcccaggggaatcgctacgtggggtttgggaacacgccaccgcctcagaagaaagaagatgacttcctcaacaacgccatgtcctccctgtactcgggctggagcagcttcaccactggagccagccggtttgcctcggcagccaaggagggcgctacaaagtttggatcccaagcgagtcagaaggcgtccgagctgggccacagcctgaacgagaacgtcctcaagcctgcgcaggagaaggtgaaggagggaaagatttttgatgatgtctccagtggggtctctcagttggcgtccaaggtccagggagtcggtagtaagggatggcgggacgtcaccacctttttttcggggaaagcagagggccccttggacagcccctcggagggccacagttatcagaacagcggtctggaccacttccaaaacagcaacatagaccagagcttctgggagacctttggaagtgctgagcccaccaagacccgcaagtccccgagcagcgacagctggacgtgcgcggacacctccaccgagaggaggagctcggacagctgggaggtgtggggctcggcctccaccaacaggaacagcaacagcgacggcggggagggcggggagggcaccaagaaggcagtgccgccggccgtgcccactgatgatggctgggacaaccagaactggtagggcccactgcgcccccgtccccagcgcccccgggcgacttcgtgtttgcactctgccctcgtcgttcctcctccttccatttgacccaagaatcagcaactgcagtgtgaggacagcgtctcgggaggcaggaccctagggagacccgggtgtgcgccgcctgcgcgtggggagtcttcggtgcgtgggggcggcttgctgtccagcctgtgtgggggccgtcccgtcccacactcccctgggcattcttggactcaaggccggggctctgcgtggcttgctgggaggtgggctgcagcacagaggcctgtgactgcgttccagcggccagttcactacgcagtatctctggggcctgggaccagccacgtgccgagctgtcagcgacgtgaggtgtcccttctcgttgagatatttaactttggttttgctctagttctttctttttgaagagagtgactggagtggtaaagatggaaatgctggaaatgatactggcgctcacgctgccatccgaccaccctcggctcccgagtccacgcctgcctgggcctgtgctgtcagacccgcgtcggtcgtaaccctctgtggctcccctgcatcagcaccgtcccaccaccaagttcaccaggttcaccagacacggcctccacaatagccacacccacacctgagctgttctcagtgctggaacttgaccatcctggaacaccctggaagaaaaaggagcgcagggtgggccctcggccctgatgcaggagggtgcgatagcggacgtggccaggcaggaggggccgggttcaggagctgagcaggggatgcctgtgcgtggtgcctgggtctagggaagctccagccccaggatggggctgccctgcacaccggtgcccgccacatgccaaccctcacctccccgaggactggatgatgtgctgccacgtgtgactcgtctcccttgtctgccctgtgtgaccctcagtcttggccagccatgcatgcgcccgaagctcgtgcagtttgtacgtgaggtgctctcctccctgccaccatgctcatcactctggccttggccatgctccctggtcaccccacttcccggtcgccgtctgcagcactcctggagcagcctgggcccttcagcccctgtgctcgtcccaccctagggactcagccacttgcagaacaggatgggaccgagatttcagcgagccctcctggcgcccggtcctccctgtgggcaccagccctcttggtagctggtgtggagggccggtgtccttggctgccacggagggatttgatcaccgaagcagccacctgctgtagttggacctgaggtcagaggcggggcatcagaggctcaaggtgctgagaagccaccgggaaagcagccagcacaaagggcccaggaagccagcccccgagagctgagcgtgggggtctttgagtgtctttctccaagctgagacgtgggcggccgcgtggtatctcccgagggctgcttggaccctggtgggctgagtgctccgaggaggggtggactccaccttggacagtgggatgtggtgttccacatgtgcctgtttccacgccagcaccttgacttggcagcatggagccaaggtctgtccccgcccaggagggtgccttcctcgggggtagggggacggcccactctgccccagggagtcccttttgatgggaagtgcagtcagcagcgtggaggtgtctgggccaccttcagaaggtggatgtggtggccgagaccccgtccacggagggtgatggcctttcccttctgcaggtgcgggcaggtgggcctgggaccggtgctggggcctctccttgctgtgtgtgagactgcgttccagcggccagttcactacgcagtatctctggggcctgggaccagccacgtgccgagctgtcagcgacgtgaggtgtcccttctcgttgagatatttaactttggttttgctctagttctttctttttgaagagagtgactggagtggtaaagatggaaatgctggaaatgatactggcgtcacgctgccatccgaccaccctcggctcccgagtccacgcctgcctggacctgacagcattccaataaagcatacgggaacatg

SEQ ID NO: 437977 - DNA, 2519 bp, Homo sapiens
cgcacacacctggcaccgctgcagagtggccggggcgtctgtgtctgtacgtgtgtgcgaggcaccccttgtttctggattttgcctgggtcttctcagcgggacggcgcgtgccggcttgcgtgtgggggcctcctgaagctgcctgtgccgcgacagggcctgcctaacctctcttcccgtctccttccagggtccagggagtcggtagtaagggatggcgggacgtcaccacctttttttcggggaaagcagagggccccttggacagcccctcggagggccacagttatcagaacagcggtctggaccacttccaaaacagcaacatagaccagagcttctgggagacctttggaagtgctgagcccaccaagacccgcaagtccccgagcagcgacagctggacgtgcgcggacacctccaccgagaggaggagctcggacagctgggaggtgtggggctcggcctccaccaacaggaacagcaacagcgacggcggggagggcggggagggcaccaagaaggcagtgccgccggccgtgcccactgatgatggctgggacaaccagaactggtagggcccactgcgcccccgtccccagcgcccccgggcgacttcgtgtttgcactctgccctcgtcgttcctcctccttccatttgacccaagaatcagcaactgcagtgtgaggacagcgtctcgggaggcaggaccctagggagacccgggtgtgcgccgcctgcgcgtggggagtcttcggtgcgtgggggcggcttgctgtccagcctgtgtgggggccgtcccgtcccacactcccctgggcattcttggactcaaggccggggctctgcgtggcttgctgggaggtgggctgcagcacagaggcctgtgactgcgttccagcggccagttcactacgcagtatctctggggcctgggaccagccacgtgccgagctgtcagcgacgtgaggtgtcccttctcgttgagatatttaactttggttttgctctagttctttctttttgaagagagtgactggagtggtaaagatggaaatgctggaaatgatactggcgctcacgctgccatccgaccaccctcggctcccgagtccacgcctgcctgggcctgtgctgtcagacccgcgtcggtcgtaaccctctgtggctcccctgcatcagcaccgtcccaccaccaagttcaccaggttcaccagacacggcctccacaatagccacacccacacctgagctgttctcagtgctggaacttgaccatcctggaacaccctggaagaaaaaggagcgcagggtgggccctcggccctgatgcaggagggtgcgatagcggacgtggccaggcaggaggggccgggttcaggagctgagcaggggatgcctgtgcgtggtgcctgggtctagggaagctccagccccaggatggggctgccctgcacaccggtgcccgccacatgccaaccctcacctccccgaggactggatgatgtgctgccacgtgtgactcgtctcccttgtctgccctgtgtgaccctcagtcttggccagccatgcatgcgcccgaagctcgtgcagtttgtacgtgaggtgctctcctccctgccaccatgctcatcactctggccttggccatgctccctggtcaccccacttcccggtcgccgtctgcagcactcctggagcagcctgggcccttcagcccctgtgctcgtcccaccctagggactcagccacttgcagaacaggatgggaccgagatttcagcgagccctcctggcgcccggtcctccctgtgggcaccagccctcttggtagctggtgtggagggccggtgtccttggctgccacggagggatttgatcaccgaagcagccacctgctgtagttggacctgaggtcagaggcggggcatcagaggctcaaggtgctgagaagccaccgggaaagcagccagcacaaagggcccaggaagccagcccccgagagctgagcgtgggggtctttgagtgtctttctccaagctgagacgtgggcggccgcgtggtatctcccgagggctgcttggaccctggtgggctgagtgctccgaggaggggtggactccaccttggacagtgggatgtggtgttccacatgtgcctgtttccacgccagcaccttgacttggcagcatggagccaaggtctgtccccgcccaggagggtgccttcctcgggggtagggggacggcccactctgccccagggagtcccttttgatgggaagtgcagtcagcagcgtggaggtgtctgggccaccttcagaaggtggatgtggtggccgagaccccgtccacggagggtgatggcctttcccttctgcaggtgcgggcaggtgggcctgggaccggtgctggggcctctccttgctgtgtgtgagggcccaggtggaaggcgcggacctgacagcattccaataaagcatacgggaacatgcaaaaaaaagtctggatgcatcc

SEQ ID NO: 437978 - DNA, 2552 bp, Homo sapiens
aagcgcaacgtagccggaagctggtggcggctggtgggcgaccgggcgcatcctcattgcagtgcggcggccctacctcggccctggcctgaccccggcggccctgcccgcccctccctccagcatcatggccagcccaagaaccaggaaggttcttaaagaagtcagggtgcaggatgagaacaacgtttgttttgagtgtggcgcgttcaatcctcagtgggtcagtgtgacctacggcatctggatctgcctggagtgctcggggagacaccgcgggcttggggttcacctcagctttgtgcgctctgttactatggacaagtggaaggacattgagcttgagaagatgaaagctggtgggaatgctaagttccgagagttcctggagtctcaggaggattacgatccttgctggtccttgcaggagaagtacaacagcagagccgcggccctctttagggataaggtggtcgctctggccgaaggcagagagtggtctctggagtcatcacctgcccagaactggaccccacctcagcccaggacgctgccgtccatggtgcaccgagtctctggccagccgcagagtgtgaccgcctcctcggacaaggcttttgaagactggctgaatgatgacctcggctcctatcaaggggcccaggggaatcgctacgtggggtttgggaacacgccaccgcctcagaagaaagaagatgacttcctcaacaacgccatgtcctccctgtactcgggctggagcagcttcaccactggagccagccggtttgcctcggcagccaaggagggcgctacaaagtttggatcccaagcgagtcagaaggcgtccgagctgggccacagcctgaacgagaacgtcctcaagcctgcgcaggagaaggtgaaggagggaaagatttttgatgatgtctccagtggggtctctcagttggcgtccaaggtccagggagtcggtagtaagggatggcgggacgtcaccacctttttttcggggaaagcagagggccccttggacagcccctcggagggccacagttatcagaacagcggtctggaccacttccaaaacagcaacatagaccagagcttctgggagacctttggaagtgctgagcccaccaagacccgcaagtccccgagcagcgacagctggacgtgcgcggacacctccaccgagaggaggagctcggacagctgggaggtgtggggctcggcctccaccaacaggaacagcaacagcgacggcggggagggcggggagggcaccaagaaggcagtgccgccggccgtgcccactgatgatggctgggacaaccagaactggtagggcccactgcgcccccgtccccagcgcccccgggcgacttcgtgtttgcactctgccctcgtcgttcctcctccttccatttgacccaagaatcagcaactgcagtgtgaggacagcgtctcgggaggcaggaccctagggagacccgggtgtgcgccgcctgcgcgtggggagtcttcggtgcgtgggggcggcttgctgtccagcctgtgtgggggccgtcccgtcccacactcccctgggcattcttggactcaaggccggggctctgcgtggcttgctgggaggtgggctgcagcacagaggcctgtgactgcgttccagcggccagttcactacgcagtatctctggggcctgggaccagccacgtgccgagctgtcagcgacgtgaggtgtcccttctcgttgagatatttaactttggttttgctctagttctttctttttgaagagagtgactggagtggtaaagatggaaatgctggaaatgatactggcgctcacgctgccatccgaccaccctcggctcccgagtccacgcctgcctgggcctgtgctgtcagacccgcgtcggtcgtaaccctctgtggctcccctgcatcagcaccgtcccaccaccaagttcaccaggttcaccagacacggcctccacaatagccacacccacacctgagctgttctcagtgctggaacttgaccatcctggaacaccctggaagaaaaaggagcgcagggtgggccctcggccctgatgcaggagggtgcgatagcggacgtggccaggcaggaggggccgggttcaggagctgagcaggggatgcctgtgcgtggtgcctgggtctagggaagctccagccccaggatggggctgccctgcacaccggtgcccgccacatgccaaccctcacctccccgaggactggatgatgtgctgccacgtgtgactcgtctcccttgtctgccctgtgtgaccctcagtcttggccagccatgcatgcgcccgaagctcgtgcagtttgtacgtgaggtgctctcctccctgccaccatgctcatcaccaagttcaccaggttcaccagacacggcctccacaatagccacacccacacctgagctgttctcagggcccaggtggaaggcgcggacctgacagcattccaataaagcatacgggaacatgcaaaaaaaagtctggatgcatcc

SEQ ID NO: 437979 - DNA, 2386 bp, Homo sapiens
aagcgcaacgtagccggaagctggtggcggctggtgggcgaccgggcgcatcctcattgcagtgcggcggccctacctcggccctggcctgaccccggcggccctgcccgcccctccctccagcatcatggccagcccaagaaccaggaaggttcttaaagaagtcagggtgcaggatgagaacaacgtttgttttgagtgtggcgcgttcaatcctcagtgggtcagtgtgacctacggcatctggatctgcctggagtgctcggggagacaccgcgggcttggggttcacctcagctttgtgcgctctgttactatggacaagtggaaggacattgagcttgagaagatgaaagctggtgggaatgctaagttccgagagttcctggagtctcaggaggattacgatccttgctggtccttgcaggagaagtacaacagcagagccgcggccctctttagggataaggtggtcgctctggccgaaggcagagagtggtctctggagtcatcacctgcccagaactggaccccacctcagcccaggacgctgccgtccatggtgcaccgagtctctggccagccgcagagtgtgaccgcctcctcggacaaggcttttgaagactggctgaatgatgacctcggctcctatcaaggggcccaggggaatcgctacgtggggtttgggaacacgccaccgcctcagaagaaagaagatgacttcctcaacaacgccatgtcctccctgtactcgggctggagcagcttcaccactggagccagccggtttgcctcggcagccaaggagggcgctacaaagtttggatcccaagcgagtcagaaggcgtccgagctgggccacagcctgaacgagaacgtcctcaagcctgcgcaggagaaggtgaaggagggaaagatttttgatgatgtctccagtggggtctctcagttggcgtccaaggtccagggagtcggtagtaagggatggcgggacgtcaccacctttttttcggggaaagcagagggccccttggacagcccctcggagggccacagttatcagaacagcggtctggaccacttccaaaacagcaacatagaccagagcttctgggagacctttggaagtgctgagcccaccaagacccgcaagtccccgagcagcgacagctggacgtgcgcggacacctccaccgagaggaggagctcggacagctgggaggtgtggggctcggcctccaccaacaggaacagcaacagcgacggcggggagggcggggagggcaccaagaaggcagtgccgccggccgtgcccactgatgatggctgggacaaccagaactggtagggcccactgcgcccccgtccccagcgcccccgggcgacttcgtgtttgcactctgccctcgtcgttcctcctccttccatttgacccaagaatcagcaactgcagtgtgaggacagcgtctcgggaggcaggaccctagggagacccgggtgtgcgccgcctgcgcgtggggagtcttcggtgcgtgggggcggcttgctgtccagcctgtgtgggggccgtcccgtcccacactcccctgggcattcttggactcaaggccggggctctgcgtggcttgctgggaggtgggctgcagcacagaggcctgtgactgcgttccagcggccagttcactacgcagtatctctggggcctgggaccagccacgtgccgagctgtcagcgacgtgaggtgtcccttctcgttgagatatttaactttggttttgctctagttctttctttttgaagagagtgactggagtggtaaagatggaaatgctggaaatgatactggcgctcacgctgccatccgaccaccctcggctcccgagtccacgcctgcctgggcctgtgctgtcagacccgcgtcggtcgtaaccctctgtggctcccctgcatcagcaccgtcccaccaccaagttcaccaggttcaccagacacggcctccacaatagccacacccacacctgagctgttctcagtgctggaacttgaccatcctggaacaccctggaagaaaaaggagcgcagggtgggccctcggccctgatgcaggagggtgcgatagcggacgtggccaggcaggaggggccgggttcaggagctgagcaggggatgcctgtgcgtggtgcctgggtctagggaagctccagccccaggatggggctgccctgcacaccggtgcccgccacatgccaaccctcacctccccgaggactggatgatgtgctgccacgtgtgactcgtctcccttgtctgccctgtgtgaccctcagtcttggccacattccaataaagcatacgggaacatgcaaaaaaaagtctggatgcatcc

SEQ ID NO: 437980 - DNA, 209 bp, Homo sapiens
gtgctctcaggggtgacgtgaaggcactgcccacgtaggccacatggttctgggggtgcttctggggttacctcagacttcacccagttttggccttaccagccttcgattctcggtttcagagtctctggccagccgcagagtgtgaccgcctcctcggacaaggcttttgaagactggctgaatgatgacctcggctcctatcaagg

SEQ ID NO: 437981 - DNA, 3989 bp, Homo sapiens
  misc_feature (12)..(12): n is a, c, g, or t
ggccggcggcangtgacccaccgcggcggggccggcggcccagaaatagcagcggcggcggttccgcccgcgggcggcgcgagcgaggggcagaggcgagagacgccggcggggcgcgggcgcggcggccccggaggatgctgctgagccccggcactgcctggctgcgagcacatgatggcgatacgggagctcaaagtgtgccttctcggggacactggggttgggaaatcaagcatcgtgtgtcgatttgtccaggatcactttgaccacaacatcagccctactattggggcatcttttatgaccaaaactgtgccttgtggaaatgaacttcacaagttcctcatctgggacactgctggtcaggaacggtttcattcattggctcccatgtactatcgaggctcagctgcagctgttatcgtgtatgatattaccaagcaggattcattttataccttgaagaaatgggtcaaggagctgaaagaacatggtccagaaaacattgtaatggccatcgctggaaacaagtgcgacctctcagatattagggaggttcccctgaaggatgctaaggaatacgctgaatccataggtgccatcgtggttgagacaagtgcaaaaaatgctattaatatcgaagagctctttcaaggaatcagccgccagatcccacccttggacccccatgaaaatggaaacaatggaacaatcaaagttgagaagccaaccatgcaagccagccgccggtgctgttgacccaagggccgtggtccacggtacttgaagaagccagagcccacatcctgtgcactgctgaaggaccctacgctcggtggcctggcacctcactttgagaagagtgagcacactggctttgcatcctggaagacctgcagggggcggggcaggaaatgtacctgaaaaggattttagaaaaccctgggaaaacccaccacaccaccacaaaatggcctttagtgtatgaaatgcacatggaggggatgtagttgcatttttgctaaaaaaaaaaaaaaacctttaaaaattgttggatgtgtacaaaagtcttactgccttattatgtgtatgggattctaaagtggcattccacttggatttcctgtgctacctatccaaattccagtaactacttcagtgtcattgcctttgttacctaaccaaccttcactgaaaggcaaatttagttcaggaggttagtttttagctagctttggaagtaagcctttatttattactttttggaggaaatcagagaagtgtcaatggaccgtcactcagactgagacttgagttattacagaagccaggaaaagtgtattagaaactgttgtctacaccacttttaattggtgaacaatttttctaagttatggtcatatatacccaaacaaaccaaatcaaactaaattactgcatataattttgggattgggtggcctagtttgaaagagtgatttaagtaatcactatgtaagtggtgagagatgcaggacatacacattattcaagagaccacctgacatgcatctcctccgcaggaatacattcgtcctctcttagagaagtttaacgcacatagtattattttactaagagaatatctcttggtgtcatatctaggggaagagaattaactagaattaaatttaatgtttgaatctaaatcattgggcaaacttctaataataacaattaataataggttacaggaaagccagccagaggaagtgtcagcactttaaaattctagaccccaaaaaactacaaaatcagaaaaagtatttttatgtttctagcttgaggagaagggctttagggctaaccagaggtctgaccctagaatgccaaggaactgagaatgggctccgatgaaaaccttccttttcagattccctgtctgctcaattaaagatgtttgaatccaaaggaagtcaaggaagaaaaagcatggaaaggaagagaactgattcctactgaaaattcaaattctattaccattctaactttcataaaaagttgggatcaagaagcagctgatttcctgccagggcttatattaggggggtgattcttaaaggacattaggattggtgctcagaaatggttaatcatgctgtgtgctagccagggccagctggtaccttctttgccatgagcattcaagggacagctaacctttattgacaatctatattgcaaaagtcaggaaagaggttgtgagctgattggattaaagacctggcacttcagtaactcagcacgcttccacttcactcaacttaagagagttcattgacagtgttaggatgtgaaggctgggaaacacttattttgcttcaagagttccacttggctctcccaaataggtacctcaaaaactgttagcaagcggcatttggatgtcttgacaggggctttgcagggatttttagggttttttccacattgtccacattaatggttggcatgattgtgcttgcaggccaagaaatgatcataccccttgccaaaggtaaaaaaaaaaaaaaaaaaatgagttgaaaattgaagtgacctctttccagctgacttgcaggcttattttgtaacctttcctcatccagttttccctgagaacctgggtttatctctagatagctgttcaggttttttagctgaggggtaagtatcctagctgagagttttgcatctttgggctgggtttgcagtggttgtgttttgcataaaatgtctagtctttgccacagatagtgagctacccactaatgagcccatggttttatttcagaagcacatgagggtgtgaaaccactctgttacctttctgtattgtcttagctattcaagccagtcagaggataatatatatattctcatcagcactcagagtagtcagtgaagagagtagatcacacttgggcacaccaggattcacataaacattgtatcttctctgtggatgctcaggccttgtctacaatgaggctttacaaccttcctttgttttggctcgggattacttcctggctgtctaataattgaaccataaccatgtaatattatgtaaaggcctggaaattactgttgctaaaaaaagtcatgtagtttcatgtagtgtagcatccttggcatcgttttccaaaatttgttccttctcccttttttttttctttcgtgtgtggcatgagtgtgtatctgtgtaaatatgattgtatatgtgttactccgatatgtaatccatttcactggctgagtttggcccctagccatgtgttaatataaagtaggcatggcttcccaatggaaatctctgagaatgacagtggagttgtgcaagcattttacattgccacataattgacttgccattttatggttaaaaacggcacattaggcagttgaatatgacgttaccttgcagactaaaaggttgaaggcccgaaactaacttttagctaacaataagggctgtgccccaatggaaactgagttcattttctgagaaaggtttggatgactgaaatatttcctctacagtcaaggactttggcatgcggtggctgaaactgagcttttttgtgtgggctccagttctcactgttctgcaatgctcatggcaagttgaatggtgagctagcttataaattaaagagctctgaactgtattcagaccgactgggtatctagcttactgttttaacatcattgttgaaaccagaccctgtagtccagtggtgctgccctgttgtgcaaactgctcctttttctcgtgtttttgtaaagagcttccatctgggctggacccagttcttgcacatacaagacaccgctgcagtcagctaggacctttccgccatgtattctattctgtagtaaagcatttccatcaacaatgcctaattgtatctgttatttttggtttaacacacactgattcatactaataaatattttcagtttta

SEQ ID NO: 437982 - DNA, 3936 bp, Homo sapiens
  misc_feature (12)..(12): n is a, c, g, or t
ggccggcggcangtgacccaccgcggcggggccggcggcccagaaatagcagcggcggcggttccgcccgcgggcggcgcgagcgaggggcagaggcgagagacgccggcggggcgcgggcgcggcggccccggaggatgctgctgagccccggcactgcctggctgcgagcacatgatggcgatacgggagctcaaagtgtgccttctcggggacactggggttgggaaatcaagcatcgtgtgtcgatttgtccaggatcactttgaccacaacatcagccctactattggggcatcttttatgaccaaaactgtgccttgtggaaatgaacttcacaagttcctcatctgggacactgctggtcaggaacggtttcattcattggctcccatgtactatcgaggctcagctgcagctgttatcgtgtatgatattaccaagcaggattcattttataccttgaagaaatgggtcaaggagctgaaagaacatggtccagaaaacattgtaatggccatcgctggaaacaagtgcgacctctcagatattagggaggttcccctgaaggatgctaaggaatacgctgaatccataggtgccatcgtggttgagacaagtgcaaaaaatgctattaatatcgaagagctctttcaaggaatcagccgccagatcccacccttggacccccatgaaaatggaaacaatggaacaatcaaagttgagaagccaaccatgcaagccagccgccggtgctgttgacccaagggccgtggtccacggtacttgaagaagccagagcccacatcctgtgcactgctgaaggaccctacgctcggtggcctggcacctcactttgagaagagtgagcacactggctttgcatcctggaagacctgcagggggcggggcaggaaatgtacctgaaaaggattttagaaaaccctgggaaaacccaccacaccaccacaaaatggcctttagtgtatgaaatgcacatggaggggatgtagttgcatttttgctaaaaaaaaaaaaaaacctttaaaaattgttggatgtgtacaaaagtcttactgccttattatgtgtatgggattctaaagtggcattccacttggatttcctgtgctacctatccaaattccagtaactacttcagtgtcattgcctttgttacctaaccaaccttcactgaaaggcaaatttagttcaggaggttagtttttagctagctttggaagtaagcctttatttattactttttggaggaaatcagagaagtgtcaatggaccgtcactcagactgagacttgagttattacagaagccaggaaaagtgtattagaaactgttgtctacaccacttttaattggtgaacaatttttctaagttatggtcatatatacccaaacaaaccaaatcaaactaaattactgcatataattttgggattgggtggcctagtttgaaagagtgatttaagtaatcactatgtaagtggtgagagatgcaggacatacacattattcaagagaccacctgacatgcatctcctccgcaggaatacattcgtcctctcttagagaagtttaacgcacatagtattattttactaagagaatatctcttggtgtcatatctaggggaagagaattaactagaattaaatttaatgtttgaatctaaatcattgggcaaacttctaataataacaattaataataggttacaggaaagccagccagaggaagtgtcagcactttaaaattctagaccccaaaaaactacaaaatcagaaaaagtatttttatgtttctagcttgaggagaagggctttagggctaaccagaggtctgaccctagaatgccaaggaactgagaatgggctccgatgaaaaccttccttttcagattccctgtctgctcaattaaagatgtttgaatccaaaggaagtcaaggaagaaaaagcatggaaaggaagagaactgattcctactgaaaattcaaattctattaccattctaactttcataaaaagttgggatcaagaagcagctgatttcctgccagggcttatattaggggggtgattcttaaaggacattaggattggtgctcagaaatggttaatcatgctgtgtgctagccagggccagctggtaccttctttgccatgagcattcaagggacagctaacctttattgacaatctatattgcaaaagtcaggaaagaggttgtgagctgattggattaaagacctggcacttcagtaactcagcacgcttccacttcactcaacttaagagagttcattgacagtgttaggatgtgaaggctgggaaacacttattttgcttcaagagttccacttggctctcccaaataggtacctcaaaaactgttagcaagcggcatttggatgtcttgacaggggctttgcagggatttttagggttttttccacattgtccacattaatggttggcatgattgtgcttgcaggccaagaaatgatcataccccttgccaaaggtaaaaaaaaaaaaaaaaaaatgagttgaaaattgaagtgacctctttccagctgacttgcaggcttattttgtaacctttcctcatccagttttccctgagaacctgggtttatctctagatagctgttcaggttttttagctgaggggtaagtatcctagctgagagttttgcatctttgggctgggtttgcagtggttgtgttttgcataaaatgtctagtctttgccacagatagtgagctacccactaatgagcccatggttttatttcagaagcacatgagggtgtgaaaccactctgttacctttctgtattgtcttagctattcaagccagtcagaggataatatatatattctcatcagcactcagagtagtcagtgaagagagtagatcacacttgggcacaccaggattcacataaacattgtatcttctctgtggatgctcaggccttgtctacaatgaggctttacaaccttcctttgttttggctcgggattacttcctggctgtctaataattgaaccataaccatgtaatattatgtaaaggcctggaaattactgttgctaaaaaaagtcatgtagtttcatgtagtgtagcatccttggcatcgttttccatctgtgtaaatatgattgtatatgtgttactccgatatgtaatccatttcactggctgagtttggcccctagccatgtgttaatataaagtaggcatggcttcccaatggaaatctctgagaatgacagtggagttgtgcaagcattttacattgccacataattgacttgccattttatggttaaaaacggcacattaggcagttgaatatgacgttaccttgcagactaaaaggttgaaggcccgaaactaacttttagctaacaataagggctgtgccccaatggaaactgagttcattttctgagaaaggtttggatgactgaaatatttcctctacagtcaaggactttggcatgcggtggctgaaactgagcttttttgtgtgggctccagttctcactgttctgcaatgctcatggcaagttgaatggtgagctagcttataaattaaagagctctgaactgtattcagaccgactgggtatctagcttactgttttaacatcattgttgaaaccagaccctgtagtccagtggtgctgccctgttgtgcaaactgctcctttttctcgtgtttttgtaaagagcttccatctgggctggacccagttcttgcacatacaagacaccgctgcagtcagctaggacctttccgccatgtattctattctgtagtaaagcatttccatcaacaatgcctaattgtatctgttatttttggtttaacacacactgattcatactaataaatattttcagtttta

SEQ ID NO: 437983 - DNA, 4055 bp, Homo sapiens
  misc_feature (12)..(12): n is a, c, g, or t
ggccggcggcangtgacccaccgcggcggggccggcggcccagaaatagcagcggcggcggttccgcccgcgggcggcgcgagcgaggggcagaggcgagagacgccggcggggcgcgggcgcggcggccccggaggatgctgctgagccccggcactgcctggctgcgagcacatgatggcgatacgggagctcaaagtgtgccttctcggggacactggggttgggaaatcaagcatcgtgtgtcgatttgtccaggatcactttgaccacaacatcagccctactattggggcatcttttatgaccaaaactgtgccttgtggaaatgaacttcacaagttcctcatctgggacactgctggtcaggaacggtttcattcattggctcccatgtactatcgaggctcagctgcagctgttatcgtgtatgatattaccaagcaggattcattttataccttgaagaaatgggtcaaggagctgaaagaacatggtccagaaaacattgtaatggccatcgctggaaacaagtgcgacctctcagatattagggaggttcccctgaaggatgctaaggaatacgctgaatccataggtgccatcgtggttgagacaagtgcaaaaaatgctattaatatcgaagagctctttcaaggaatcagccgccagatcccacccttggacccccatgaaaatggaaacaatggaacaatcaaagttgagaagccaaccatgcaagccagccgccggtgctgttgacccaagggccgtggtccacggtacttgaagaagccagagcccacatcctgtgcactgctgaaggaccctacgctcggtggcctggcacctcactttgagaagagtgagcacactggctttgcatcctggaagacctgcagggggcggggcaggaaatgtacctgaaaaggattttagaaaaccctgggaaaacccaccacaccaccacaaaatggcctttagtgtatgaaatgcacatggaggggatgtagttgcatttttgctaaaaaaaaaaaaaaacctttaaaaattgttggatgtgtacaaaagtcttactgccttattatgtgtatgggattctaaagtggcattccacttggatttcctgtgctacctatccaaattccagtaactacttcagtgtcattgcctttgttacctaaccaaccttcactgaaaggcaaatttagttcaggaggttagtttttagctagctttggaagtaagcctttatttattactttttggaggaaatcagagaagtgtcaatggaccgtcactcagactgagacttgagttattacagaagccaggaaaagtgtattagaaactgttgtctacaccacttttaattggtgaacaatttttctaagttatggtcatatatacccaaacaaaccaaatcaaactaaattactgcatataattttgggattgggtggcctagtttgaaagagtgatttaagtaatcactatgtaagtggtgagagatgcaggacatacacattattcaagagaccacctgacatgcatctcctccgcaggaatacattcgtcctctcttagagaagtttaacgcacatagtattattttactaagagaatatctcttggtgtcatatctaggggaagagaattaactagaattaaatttaatgtttgaatctaaatcattgggcaaacttctaataataacaattaataataggttacaggaaagccagccagaggaagtgtcagcactttaaaattctagaccccaaaaaactacaaaatcagaaaaagtatttttatgtttctagcttgaggagaagggctttagggctaaccagaggtctgaccctagaatgccaaggaactgagaatgggctccgatgaaaaccttccttttcagattccctgtctgctcaattaaagatgtttgaatccaaaggaagtcaaggaagaaaaagcatggaaaggaagagaactgattcctactgaaaattcaaattctattaccattctaactttcataaaaagttgggatcaagaagcagctgatttcctgccagggcttatattaggggggtgattcttaaaggacattaggattggtgctcagaaatggttaatcatgctgtgtgctagccagggccagctggtaccttctttgccatgagcattcaagggacagctaacctttattgacaatctatattgcaaaagtcaggaaagaggttgtgagctgattggattaaagacctggcacttcagtaactcagcacgcttccacttcactcaacttaagagagttcattgacagtgttaggatgtgaaggctgggaaacacttattttgcttcaagagttccacttggctctcccaaataggtacctcaaaaactgttagcaagcggcatttggatgtcttgacaggggctttgcagggatttttagggttttttccacattgtccacattaatggttggcatgattgtgcttgcaggccaagaaatgatcataccccttgccaaaggtaaaaaaaaaaaaaaaaaaatgagttgaaaattgaagtgacctctttccagctgacttgcaggcttattttgtaacctttcctcatccagttttccctgagaacctgggtttatctcttctagaaatagcgtgttctcagggttttataagccttgaaggggtataacggtattcctaagccgtggagaaagtttttggggcatatcctgtgggggggccatgggggaattgtggcacgagtggtagtggagagtatatgggcatattacacagtggtcttaggtctatgggccaccagaatagtgagctacccactaatgagcccatggttttatttcagaagcacatgagggtgtgaaaccactctgttacctttctgtattgtcttagctattcaagccagtcagaggataatatatatattctcatcagcactcagagtagtcagtgaagagagtagatcacacttgggcacaccaggattcacataaacattgtatcttctctgtggatgctcaggccttgtctacaatgaggctttacaaccttcctttgttttggctcgggattacttcctggctgtctaataattgaaccataaccatgtaatattatgtaaaggcctggaaattactgttgctaaaaaaagtcatgtagtttcatgtagtgtagcatccttggcatcgttttccaaaatttgttccttctcccttttttttttctttcgtgtgtggcatgagtgtgtatctgtgtaaatatgattgtatatgtgttactccgatatgtaatccatttcactggctgagtttggcccctagccatgtgttaatataaagtaggcatggcttcccaatggaaatctctgagaatgacagtggagttgtgcaagcattttacattgccacataattgacttgccattttatggttaaaaacggcacattaggcagttgaatatgacgttaccttgcagactaaaaggttgaaggcccgaaactaacttttagctaacaataagggctgtgccccaatggaaactgagttcattttctgagaaaggtttggatgactgaaatatttcctctacagtcaaggactttggcatgcggtggctgaaactgagcttttttgtgtgggctccagttctcactgttctgcaatgctcatggcaagttgaatggtgagctagcttataaattaaagagctctgaactgtattcagaccgactgggtatctagcttactgttttaacatcattgttgaaaccagaccctgtagtccagtggtgctgccctgttgtgcaaactgctcctttttctcgtgtttttgtaaagagcttccatctgggctggacccagttcttgcacatacaagacaccgctgcagtcagctaggacctttccgccatgtattctattctgtagtaaagcatttccatcaacaatgcctaattgtatctgttatttttggtttaacacacactgattcatactaataaatattttcagtttta

SEQ ID NO: 437984 - DNA, 3942 bp, Homo sapiens
  misc_feature (12)..(12): n is a, c, g, or t
ggccggcggcangtgacccaccgcggcggggccggcggcccagaaatagcagcggcggcggttccgcccgcgggcggcgcgagcgaggggcagaggcgagagacgccggcggggcgcgggcgcggcggccccggaggatgctgctgagccccggcactgcctggctgcgagcacatgatggcgatacgggagctcaaagtgtgccttctcggggacactggggttgggaaatcaagcatcgtgtgtcgatttgtccaggatcactttgaccacaacatcagccctactattggggcatcttttatgaccaaaactgtgccttgtggaaatgaacttcacaagttcctcatctgggacactgctggtcaggaacggtttcattcattggctcccatgtactatcgaggctcagctgcagctgttatcgtgtatgatattaccaagcaggattcattttataccttgaagaaatgggtcaaggagctgaaagaacatggtccagaaaacattgtaatggccatcgctggaaacaagtgcgacctctcagatattagggaggttcccctgaaggatgctaaggaatacgctgaatccataggtgccatcgtggttgagacaagtgcaaaaaatgctattaatatcgaagagctctttcaaggaatcagccgccagatcccacccttggacccccatgaaaatggaaacaatggaacaatcaaagttgagaagccaaccatgcaagccagccgccggtgctgttgacccaagggccgtggtccacggtacttgaagaagccagagcccacatcctgtgcactgctgaaggaccctacgctcggtggcctggcacctcactttgagaagagtgagcacactggctttgcatcctggaagacctgcagggggcggggcaggaaatgtacctgaaaaggattttagaaaaccctgggaaaacccaccacaccaccacaaaatggcctttagtgtatgaaatgcacatggaggggatgtagttgcatttttgctaaaaaaaaaaaaaaacctttaaaaattgttggatgtgtacaaaagtcttactgccttattatgtgtatgggattctaaagtggcattccacttggatttcctgtgctacctatccaaattccagtaactacttcagtgtcattgcctttgttacctaaccaaccttcactgaaaggcaaatttagttcaggaggttagtttttagctagctttggaagtaagcctttatttattactttttggaggaaatcagagaagtgtcaatggaccgtcactcagactgagacttgagttattacagaagccaggaaaagtgtattagaaactgttgtctacaccacttttaattggtgaacaatttttctaagttatggtcatatatacccaaacaaaccaaatcaaactaaattactgcatataattttgggattgggtggcctagtttgaaagagtgatttaagtaatcactatgtaagtggtgagagatgcaggacatacacattattcaagagaccacctgacatgcatctcctccgcaggaatacattcgtcctctcttagagaagtttaacgcacatagtattattttactaagagaatatctcttggtgtcatatctaggggaagagaattaactagaattaaatttaatgtttgaatctaaatcattgggcaaacttctaataataacaattaataataggttacaggaaagccagccagaggaagtgtcagcactttaaaattctagaccccaaaaaactacaaaatcagaaaaagtatttttatgtttctagcttgaggagaagggctttagggctaaccagaggtctgaccctagaatgccaaggaactgagaatgggctccgatgaaaaccttccttttcagattccctgtctgctcaattaaagatgtttgaatccaaaggaagtcaaggaagaaaaagcatggaaaggaagagaactgattcctactgaaaattcaaattctattaccattctaactttcataaaaagttgggatcaagaagcagctgatttcctgccagggcttatattaggggggtgattcttaaaggacattaggattggtgctcagaaatggttaatcatgctgtgtgctagccagggccagctggtaccttctttgccatgagcattcaagggacagctaacctttattgacaatctatattgcaaaagtcaggaaagaggttgtgagctgattggattaaagacctggcacttcagtaactcagcacgcttccacttcactcaacttaagagagttcattgacagtgttaggatgtgaaggctgggaaacacttattttgcttcaagagttccacttggctctcccaaataggtacctcaaaaactgttagcaagcggcatttggatgtcttgacaggggctttgcagggatttttagggttttttccacattgtccacattaatggttggcatgattgtgcttgcaggccaagaaatgatcataccccttgccaaaggtaaaaaaaaaaaaaaaaaaatgagttgaaaattgaagtgacctctttccagctgacttgcaggcttattttgtaacctttcctcatccagttttccctgagaacctgggtttatctctagatagctgttcaggttttttagctgaggggtaagtatcctagctgagagttttgcatctttgggctgggtttgcagtggttgtgttttgcataaaatgtctagtctttgccacagatagtgagctacccactaatgagcccatggttttatttcagaagcacatgagggtgtgaaaccactctgttacctttctgtattgtcttagctattcaagccagtcagaggataatatatatattctcatcagcactcagagtagtcagtgaagagagtagatcacacttgggcacaccaggattcacataaacattgtatcttctctgtggatgctcaggccttgtctacaatgaggctttacaaccttcctttgttttggctcgggattacttcctggctgtctaataattgaaccataaccatgtaatattatgtaaaggcctggaaattactgttgctaaaaaaagtcatgtagtttcatgtagtgtagcatccttggcatcgttttccaaaatttgttccttctcccttttttttttctttcgtgtgtggcatgagtgtgtatctgtgtaaatatgattgtatatgtgttactccgatatgtaatccatttcactggctgagtttggcccctagccatgtgttaatataaagtaggcatggcttcccaatggaaatctctgagaatgacagtggagttgtgcaagcattttacattgccacataattgacttgccattttatggttaaaaacggcacattaggcagttgaatatgacgttaccttgcagactaaaagcaatggaaactgagttcattttctgagaaaggtttggatgactgaaatatttcctctacagtcaaggactttggcatgcggtggctgaaactgagcttttttgtgtgggctccagttctcactgttctgcaatgctcatggcaagttgaatggtgagctagcttataaattaaagagctctgaactgtattcagaccgactgggtatctagcttactgttttaacatcattgttgaaaccagaccctgtagtccagtggtgctgccctgttgtgcaaactgctcctttttctcgtgtttttgtaaagagcttccatctgggctggacccagttcttgcacatacaagacaccgctgcagtcagctaggacctttccgccatgtattctattctgtagtaaagcatttccatcaacaatgcctaattgtatctgttatttttggtttaacacacactgattcatactaataaatattttcagtttta

SEQ ID NO: 437985 - DNA, 3994 bp, Homo sapiens
tgctggtattacagagtgtgagccaccggacccaggcctgagtttctctttctctctttttaactttattttttgaaaaacccggtagactttgtggggagcatttttgttgataattttactgatctaaagctgagtgatttttttaaaagaatttgaatttggcttcctcaccagtaatatgtctccttgcttctttgatgtgatagttttgagatgacactggggttgggaaatcaagcatcgtgtgtcgatttgtccaggatcactttgaccacaacatcagccctactattggggcatcttttatgaccaaaactgtgccttgtggaaatgaacttcacaagttcctcatctgggacactgctggtcaggaacggtttcattcattggctcccatgtactatcgaggctcagctgcagctgttatcgtgtatgatattaccaagcaggattcattttataccttgaagaaatgggtcaaggagctgaaagaacatggtccagaaaacattgtaatggccatcgctggaaacaagtgcgacctctcagatattagggaggttcccctgaaggatgctaaggaatacgctgaatccataggtgccatcgtggttgagacaagtgcaaaaaatgctattaatatcgaagagctctttcaaggaatcagccgccagatcccacccttggacccccatgaaaatggaaacaatggaacaatcaaagttgagaagccaaccatgcaagccagccgccggtgctgttgacccaagggccgtggtccacggtacttgaagaagccagagcccacatcctgtgcactgctgaaggaccctacgctcggtggcctggcacctcactttgagaagagtgagcacactggctttgcatcctggaagacctgcagggggcggggcaggaaatgtacctgaaaaggattttagaaaaccctgggaaaacccaccacaccaccacaaaatggcctttagtgtatgaaatgcacatggaggggatgtagttgcatttttgctaaaaaaaaaaaaaaacctttaaaaattgttggatgtgtacaaaagtcttactgccttattatgtgtatgggattctaaagtggcattccacttggatttcctgtgctacctatccaaattccagtaactacttcagtgtcattgcctttgttacctaaccaaccttcactgaaaggcaaatttagttcaggaggttagtttttagctagctttggaagtaagcctttatttattactttttggaggaaatcagagaagtgtcaatggaccgtcactcagactgagacttgagttattacagaagccaggaaaagtgtattagaaactgttgtctacaccacttttaattggtgaacaatttttctaagttatggtcatatatacccaaacaaaccaaatcaaactaaattactgcatataattttgggattgggtggcctagtttgaaagagtgatttaagtaatcactatgtaagtggtgagagatgcaggacatacacattattcaagagaccacctgacatgcatctcctccgcaggaatacattcgtcctctcttagagaagtttaacgcacatagtattattttactaagagaatatctcttggtgtcatatctaggggaagagaattaactagaattaaatttaatgtttgaatctaaatcattgggcaaacttctaataataacaattaataataggttacaggaaagccagccagaggaagtgtcagcactttaaaattctagaccccaaaaaactacaaaatcagaaaaagtatttttatgtttctagcttgaggagaagggctttagggctaaccagaggtctgaccctagaatgccaaggaactgagaatgggctccgatgaaaaccttccttttcagattccctgtctgctcaattaaagatgtttgaatccaaaggaagtcaaggaagaaaaagcatggaaaggaagagaactgattcctactgaaaattcaaattctattaccattctaactttcataaaaagttgggatcaagaagcagctgatttcctgccagggcttatattaggggggtgattcttaaaggacattaggattggtgctcagaaatggttaatcatgctgtgtgctagccagggccagctggtaccttctttgccatgagcattcaagggacagctaacctttattgacaatctatattgcaaaagtcaggaaagaggttgtgagctgattggattaaagacctggcacttcagtaactcagcacgcttccacttcactcaacttaagagagttcattgacagtgttaggatgtgaaggctgggaaacacttattttgcttcaagagttccacttggctctcccaaataggtacctcaaaaactgttagcaagcggcatttggatgtcttgacaggggctttgcagggatttttagggttttttccacattgtccacattaatggttggcatgattgtgcttgcaggccaagaaatgatcataccccttgccaaaggtaaaaaaaaaaaaaaaaaaatgagttgaaaattgaagtgacctctttccagctgacttgcaggcttattttgtaacctttcctcatccagttttccctgagaacctgggtttatctctagatagctgttcaggttttttagctgaggggtaagtatcctagctgagagttttgcatctttgggctgggtttgcagtggttgtgttttgcataaaatgtctagtctttgccacagatagtgagctacccactaatgagcccatggttttatttcagaagcacatgagggtgtgaaaccactctgttacctttctgtattgtcttagctattcaagccagtcagaggataatatatatattctcatcagcactcagagtagtcagtgaagagagtagatcacacttgggcacaccaggattcacataaacattgtatcttctctgtggatgctcaggccttgtctacaatgaggctttacaaccttcctttgttttggctcgggattacttcctggctgtctaataattgaaccataaccatgtaatattatgtaaaggcctggaaattactgttgctaaaaaaagtcatgtagtttcatgtagtgtagcatccttggcatcgttttccaaaatttgttccttctcccttttttttttctttcgtgtgtggcatgagtgtgtatctgtgtaaatatgattgtatatgtgttactccgatatgtaatccatttcactggctgagtttggcccctagccatgtgttaatataaagtaggcatggcttcccaatggaaatctctgagaatgacagtggagttgtgcaagcattttacattgccacataattgacttgccattttatggttaaaaacggcacattaggcagttgaatatgacgttaccttgcagactaaaaggttgaaggcccgaaactaacttttagctaacaataagggctgtgccccaatggaaactgagttcattttctgagaaaggtttggatgactgaaatatttcctctacagtcaaggactttggcatgcggtggctgaaactgagcttttttgtgtgggctccagttctcactgttctgcaatgctcatggcaagttgaatggtgagctagcttataaattaaagagctctgaactgtattcagaccgactgggtatctagcttactgttttaacatcattgttgaaaccagaccctgtagtccagtggtgctgccctgttgtgcaaactgctcctttttctcgtgtttttgtaaagagcttccatctgggctggacccagttcttgcacatacaagacaccgctgcagtcagctaggacctttccgccatgtattctattctgtagtaaagcatttccatcaacaatgcctaattgtatctgttatttttggtttaacacacactgattcatactaataaatattttcagtttta

SEQ ID NO: 437986 - DNA, 3852 bp, Homo sapiens
  misc_feature (12)..(12): n is a, c, g, or t
ggccggcggcangtgacccaccgcggcggggccggcggcccagaaatagcagcggcggcggttccgcccgcgggcggcgcgagcgaggggcagaggcgagagacgccggcggggcgcgggcgcggcggccccggaggatgctgctgagccccggcactgcctggctgcgagcacatgatggcgatacgggagctcaaagtgtgccttctcggggacactggggttgggaaatcaagcatcgtgtgtcgatttgtccaggatcactttgaccacaacatcagccctactattggggcatcttttatgaccaaaactgtgccttgtggaaatgaacttcacaagttcctcatctgggacactgctggtcaggaacggtttcattcattggctcccatgtactatcgaggctcagctgcagctgttatcgtgtatgatattaccaagcaggattcattttataccttgaagaaatgggtcaaggagctgaaagaacatggtccagaaaacattgtaatggccatcgctggaaacaagtgcgacctctcagatattagggaggttcccctgaaggatgctaaggaatacgctgaatccataggtgccatcgtggttgagacaagtgcaaaaaatgctattaatatcgaagagctctttcaaggaatcagccgccagatcccacccttggacccccatgaaaatggaaacaatggaacaatcaaagttgagaagccaaccatgcaagccagccgccggtgctgttgacccaagggccgtggtccacggtacttgaagaagccagagcccacatcctgtgcactgctgaaggaccctacgctcggtggcctggcacctcactttgagaagagtgagcacactggctttgcatcctggaagacctgcagggggcggggcaggaaatgtacctgaaaaggattttagaaaaccctgggaaaacccaccacaccaccacaaaatggcctttagtgtatgaaatgcacatggaggggatgtagttgcatttttgctaaaaaaaaaaaaaaacctttaaaaattgttggatgtgtacaaaagtcttactgccttattatgtgtatgggattctaaagtggcattccacttggatttcctgtgctacctatccaaattccagtaactacttcagtgtcattgcctttgttacctaaccaaccttcactgaaaggcaaatttagttcaggaggttagtttttagctagctttggaagtaagcctttatttattactttttggaggaaatcagagaagtgtcaatggaccgtcactcagactgagacttgagttattacagaagccaggaaaagtgtattagaaactgttgtctacaccacttttaattggtgaacaatttttctaagttatggtcatatatacccaaacaaaccaaatcaaactaaattactgcatataattttgggattgggtggcctagtttgaaagagtgatttaagtaatcactatgtaagtggtgagagatgcaggacatacacattattcaagagaccacctgacatgcatctcctccgcaggaatacattcgtcctctcttagagaagtttaacgcacatagtattattttactaagagaatatctcttggtgtcatatctaggggaagagaattaactagaattaaatttaatgtttgaatctaaatcattgggcaaacttctaataataacaattaataataggttacaggaaagccagccagaggaagtgtcagcactttaaaattctagaccccaaaaaactacaaaatcagaaaaagtatttttatgtttctagcttgaggagaagggctttagggctaaccagaggtctgaccctagaatgccaaggaactgagaatgggctccgatgaaaaccttccttttcagattccctgtctgctcaattaaagatgtttgaatccaaaggaagtcaaggaagaaaaagcatggaaaggaagagaactgattcctactgaaaattcaaattctattaccattctaactttcataaaaagttgggatcaagggacagctaacctttattgacaatctatattgcaaaagtcaggaaagaggttgtgagctgattggattaaagacctggcacttcagtaactcagcacgcttccacttcactcaacttaagagagttcattgacagtgttaggatgtgaaggctgggaaacacttattttgcttcaagagttccacttggctctcccaaataggtacctcaaaaactgttagcaagcggcatttggatgtcttgacaggggctttgcagggatttttagggttttttccacattgtccacattaatggttggcatgattgtgcttgcaggccaagaaatgatcataccccttgccaaaggtaaaaaaaaaaaaaaaaaaatgagttgaaaattgaagtgacctctttccagctgacttgcaggcttattttgtaacctttcctcatccagttttccctgagaacctgggtttatctctagatagctgttcaggttttttagctgaggggtaagtatcctagctgagagttttgcatctttgggctgggtttgcagtggttgtgttttgcataaaatgtctagtctttgccacagatagtgagctacccactaatgagcccatggttttatttcagaagcacatgagggtgtgaaaccactctgttacctttctgtattgtcttagctattcaagccagtcagaggataatatatatattctcatcagcactcagagtagtcagtgaagagagtagatcacacttgggcacaccaggattcacataaacattgtatcttctctgtggatgctcaggccttgtctacaatgaggctttacaaccttcctttgttttggctcgggattacttcctggctgtctaataattgaaccataaccatgtaatattatgtaaaggcctggaaattactgttgctaaaaaaagtcatgtagtttcatgtagtgtagcatccttggcatcgttttccaaaatttgttccttctcccttttttttttctttcgtgtgtggcatgagtgtgtatctgtgtaaatatgattgtatatgtgttactccgatatgtaatccatttcactggctgagtttggcccctagccatgtgttaatataaagtaggcatggcttcccaatggaaatctctgagaatgacagtggagttgtgcaagcattttacattgccacataattgacttgccattttatggttaaaaacggcacattaggcagttgaatatgacgttaccttgcagactaaaaggttgaaggcccgaaactaacttttagctaacaataagggctgtgccccaatggaaactgagttcattttctgagaaaggtttggatgactgaaatatttcctctacagtcaaggactttggcatgcggtggctgaaactgagcttttttgtgtgggctccagttctcactgttctgcaatgctcatggcaagttgaatggtgagctagcttataaattaaagagctctgaactgtattcagaccgactgggtatctagcttactgttttaacatcattgttgaaaccagaccctgtagtccagtggtgctgccctgttgtgcaaactgctcctttttctcgtgtttttgtaaagagcttccatctgggctggacccagttcttgcacatacaagacaccgctgcagtcagctaggacctttccgccatgtattctattctgtagtaaagcatttccatcaacaatgcctaattgtatctgttatttttggtttaacacacactgattcatactaataaatattttcagtttta

SEQ ID NO: 437987 - DNA, 3935 bp, Homo sapiens
  misc_feature (12)..(12): n is a, c, g, or t
ggccggcggcangtgacccaccgcggcggggccggcggcccagaaatagcagcggcggcggttccgcccgcgggcggcgcgagcgaggggcagaggcgagagacgccggcggggcgcgggcgcggcggccccggaggatgctgctgagccccggcactgcctggctgcgagcacatgatggcgatacgggagctcaaagtgtgccttctcggggacactggggttgggaaatcaagcatcgtgtgtcgatttgtccaggatcactttgaccacaacatcagccctactattggggcatcttttatgaccaaaactgtgccttgtggaaatgaacttcacaagttcctcatctgggacactgctggtcaggaacggtttcattcattggctcccatgtactatcgaggctcagctgcagctgttatcgtgtatgatattaccaagcaggattcattttataccttgaagaaatgggtcaaggagctgaaagaacatggtccagaaaacattgtaatggccatcgctggaaacaagtgcgacctctcagatattagggaggttcccctgaaggatgctaaggaatacgctgaatccataggtgccatcgtggttgagacaagtgcaaaaaatgctattaatatcgaagagctctttcaaggaatcagccgccagatcccacccttggacccccatgaaaatggaaacaatggaacaatcaaagttgagaagccaaccatgcaagccagccgccggtgctgttgacccaagggccgtggtccacggtacttgaagaagccagagcccacatcctgtgcactgctgaaggaccctacgctcggtggcctggcacctcactttgagaagagtgagcacactggctttgcatcctggaagacctgcagggggcggggcaggaaatgtacctgaaaaggattttagaaaaccctgggaaaacccaccacaccaccacaaaatggcctttagtgtatgaaatgcacatggaggggatgtagttgcatttttgctaaaaaaaaaaaaaaacctttaaaaattgttggatgtgtacaaaagtcttactgccttattatgtgtatgggattctaaagtggcattccacttggatttcctgtgctacctatccaaattccagtaactacttcagtgtcattgcctttgttacctaaccaaccttcactgaaaggcaaatttagttcaggaggttagtttttagctagctttggaagtaagcctttatttattactttttggaggaaatcagagaagtgtcaatggaccgtcactcagactgagacttgagttattacagaagccaggaaaagtgtattagaaactgttgtctacaccacttttaattggtgaacaatttttctaagttatggtcatatatacccaaacaaaccaaatcaaactaaattactgcatataattttgggattgggtggcctagtttgaaagagtgatttaagtaatcactatgtaagtggtgagagatgcaggacatacacattattcaagagaccacctgacatgcatctcctccgcaggaatacattcgtcctctcttagagaagtttaacgcacatagtattattttactaagagaatatctcttggtgtcatatctaggggaagagaattaactagaattaaatttaatgtttgaatctaaatcattgggcaaacttctaataataacaattaataataggttacaggaaagccagccagaggaagtgtcagcactttaaaattctagaccccaaaaaactacaaaatcagaaaaagtatttttatgtttctagcttgaggagaagggctttagggctaaccagaggtctgaccctagaatgccaaggaactgagaatgggctccgatgaaaaccttccttttcagattccctgtctgctcaattaaagatgtttgaatccaaaggaagtcaaggaagaaaaagcatggaaaggaagagaactgattcctactgaaaattcaaattctattaccattctaactttcataaaaagttgggatcaagaagcagctgatttcctgccagggcttatattaggggggtgattcttaaaggacattaggattggtgctcagaaatggttaatcatgctgtgtgctagccagggccagctggtaccttctttgccatgagcattcaagggacagctaacctttattgacaatctatattgcaaaagtcaggaaagaggttgtgagctgattggattaaagacctggcacttcagtaactcagcacgcttccacttcactcaatgcttcaagagttccacttggctctcccaaataggtacctcaaaaactgttagcaagcggcatttggatgtcttgacaggggctttgcagggatttttagggttttttccacattgtccacattaatggttggcatgattgtgcttgcaggccaagaaatgatcataccccttgccaaaggtaaaaaaaaaaaaaaaaaaatgagttgaaaattgaagtgacctctttccagctgacttgcaggcttattttgtaacctttcctcatccagttttccctgagaacctgggtttatctctagatagctgttcaggttttttagctgaggggtaagtatcctagctgagagttttgcatctttgggctgggtttgcagtggttgtgttttgcataaaatgtctagtctttgccacagatagtgagctacccactaatgagcccatggttttatttcagaagcacatgagggtgtgaaaccactctgttacctttctgtattgtcttagctattcaagccagtcagaggataatatatatattctcatcagcactcagagtagtcagtgaagagagtagatcacacttgggcacaccaggattcacataaacattgtatcttctctgtggatgctcaggccttgtctacaatgaggctttacaaccttcctttgttttggctcgggattacttcctggctgtctaataattgaaccataaccatgtaatattatgtaaaggcctggaaattactgttgctaaaaaaagtcatgtagtttcatgtagtgtagcatccttggcatcgttttccaaaatttgttccttctcccttttttttttctttcgtgtgtggcatgagtgtgtatctgtgtaaatatgattgtatatgtgttactccgatatgtaatccatttcactggctgagtttggcccctagccatgtgttaatataaagtaggcatggcttcccaatggaaatctctgagaatgacagtggagttgtgcaagcattttacattgccacataattgacttgccattttatggttaaaaacggcacattaggcagttgaatatgacgttaccttgcagactaaaaggttgaaggcccgaaactaacttttagctaacaataagggctgtgccccaatggaaactgagttcattttctgagaaaggtttggatgactgaaatatttcctctacagtcaaggactttggcatgcggtggctgaaactgagcttttttgtgtgggctccagttctcactgttctgcaatgctcatggcaagttgaatggtgagctagcttataaattaaagagctctgaactgtattcagaccgactgggtatctagcttactgttttaacatcattgttgaaaccagaccctgtagtccagtggtgctgccctgttgtgcaaactgctcctttttctcgtgtttttgtaaagagcttccatctgggctggacccagttcttgcacatacaagacaccgctgcagtcagctaggacctttccgccatgtattctattctgtagtaaagcatttccatcaacaatgcctaattgtatctgttatttttggtttaacacacactgattcatactaataaatattttcagtttta

SEQ ID NO: 437988 - DNA, 3832 bp, Homo sapiens
ttttttagcaaaaatgcaactacatcccctccatgtgcatttcatacactaaaggccattttgtggtggtgtggtgggttttcccagggttttctaaaatccttttcaggtacatttcctgccccgccccctgcaggtcttccaggatgcaaagccagtgtgctcactcttctcaaagtgaggtgccaggccaccgagcgtagggtccttcagcagtgcacaggatgtgggctctggcttcttcaagtaccgtggaccacggcccttgggtcaacagcaccggcggctggcttgcatggttggcttctcaactttgattgttccattgtttccattttcatgggggacactggggttgggaaatcaagcatcgtgtgtcgatttgtccaggatcactttgaccacaacatcagccctactattggggcatcttttatgaccaaaactgtgccttgtggaaatgaacttcacaagttcctcatctgggacactgctggtcaggaacgggccgccagatcccacccttggacccccatgaaaatggaaacaatggaacaatcaaagttgagaagccaaccatgcaagccagccgccggtgctgttgacccaagggccgtggtccacggtacttgaagaagccagagcccacatcctgtgcactgctgaaggaccctacgctcggtggcctggcacctcactttgagaagagtgagcacactggctttgcatcctggaagacctgcagggggcggggcaggaaatgtacctgaaaaggattttagaaaaccctgggaaaacccaccacaccaccacaaaatggcctttagtgtatgaaatgcacatggaggggatgtagttgcatttttgctaaaaaaaaaaaaaaacctttaaaaattgttggatgtgtacaaaagtcttactgccttattatgtgtatgggattctaaagtggcattccacttggatttcctgtgctacctatccaaattccagtaactacttcagtgtcattgcctttgttacctaaccaaccttcactgaaaggcaaatttagttcaggaggttagtttttagctagctttggaagtaagcctttatttattactttttggaggaaatcagagaagtgtcaatggaccgtcactcagactgagacttgagttattacagaagccaggaaaagtgtattagaaactgttgtctacaccacttttaattggtgaacaatttttctaagttatggtcatatatacccaaacaaaccaaatcaaactaaattactgcatataattttgggattgggtggcctagtttgaaagagtgatttaagtaatcactatgtaagtggtgagagatgcaggacatacacattattcaagagaccacctgacatgcatctcctccgcaggaatacattcgtcctctcttagagaagtttaacgcacatagtattattttactaagagaatatctcttggtgtcatatctaggggaagagaattaactagaattaaatttaatgtttgaatctaaatcattgggcaaacttctaataataacaattaataataggttacaggaaagccagccagaggaagtgtcagcactttaaaattctagaccccaaaaaactacaaaatcagaaaaagtatttttatgtttctagcttgaggagaagggctttagggctaaccagaggtctgaccctagaatgccaaggaactgagaatgggctccgatgaaaaccttccttttcagattccctgtctgctcaattaaagatgtttgaatccaaaggaagtcaaggaagaaaaagcatggaaaggaagagaactgattcctactgaaaattcaaattctattaccattctaactttcataaaaagttgggatcaagaagcagctgatttcctgccagggcttatattaggggggtgattcttaaaggacattaggattggtgctcagaaatggttaatcatgctgtgtgctagccagggccagctggtaccttctttgccatgagcattcaagggacagctaacctttattgacaatctatattgcaaaagtcaggaaagaggttgtgagctgattggattaaagacctggcacttcagtaactcagcacgcttccacttcactcaacttaagagagttcattgacagtgttaggatgtgaaggctgggaaacacttattttgcttcaagagttccacttggctctcccaaataggtacctcaaaaactgttagcaagcggcatttggatgtcttgacaggggctttgcagggatttttagggttttttccacattgtccacattaatggttggcatgattgtgcttgcaggccaagaaatgatcataccccttgccaaaggtaaaaaaaaaaaaaaaaaaatgagttgaaaattgaagtgacctctttccagctgacttgcaggcttattttgtaacctttcctcatccagttttccctgagaacctgggtttatctctagatagctgttcaggttttttagctgaggggtaagtatcctagctgagagttttgcatctttgggctgggtttgcagtggttgtgttttgcataaaatgtctagtctttgccacagatagtgagctacccactaatgagcccatggttttatttcagaagcacatgagggtgtgaaaccactctgttacctttctgtattgtcttagctattcaagccagtcagaggataatatatatattctcatcagcactcagagtagtcagtgaagagagtagatcacacttgggcacaccaggattcacataaacattgtatcttctctgtggatgctcaggccttgtctacaatgaggctttacaaccttcctttgttttggctcgggattacttcctggctgtctaataattgaaccataaccatgtaatattatgtaaaggcctggaaattactgttgctaaaaaaagtcatgtagtttcatgtagtgtagcatccttggcatcgttttccaaaatttgttccttctcccttttttttttctttcgtgtgtggcatgagtgtgtatctgtgtaaatatgattgtatatgtgttactccgatatgtaatccatttcactggctgagtttggcccctagccatgtgttaatataaagtaggcatggcttcccaatggaaatctctgagaatgacagtggagttgtgcaagcattttacattgccacataattgacttgccattttatggttaaaaacggcacattaggcagttgaatatgacgttaccttgcagactaaaaggttgaaggcccgaaactaacttttagctaacaataagggctgtgccccaatggaaactgagttcattttctgagaaaggtttggatgactgaaatatttcctctacagtcaaggactttggcatgcggtggctgaaactgagcttttttgtgtgggctccagttctcactgttctgcaatgctcatggcaagttgaatggtgagctagcttataaattaaagagctctgaactgtattcagaccgactgggtatctagcttactgttttaacatcattgttgaaaccagaccctgtagtccagtggtgctgccctgttgtgcaaactgctcctttttctcgtgtttttgtaaagagcttccatctgggctggacccagttcttgcacatacaagacaccgctgcagtcagctaggacctttccgccatgtattctattctgtagtaaagcatttccatcaacaatgcctaattgtatctgttatttttggtttaacacacactgattcatactaataaatattttcagtttta

SEQ ID NO: 437989 - DNA, 3392 bp, Homo sapiens
gtcgacgatcggtgtctggtgactcttggtaatcggtgctgcgcggcgaaggagtggactgtgagaggccgccagatcccacccttggacccccatgaaaatggaaacaatggaacaatcaaagttgagaagccaaccatgcaagccagccgccggtgctgttgacccaagggccgtggtccacggtacttgaagaagccagagcccacatcctgtgcactgctgaaggaccctacgctcggtggcctggcacctcactttgagaagagtgagcacactggctttgcatcctggaagacctgcagggggcggggcaggaaatgtacctgaaaaggattttagaaaaccctgggaaaacccaccacaccaccacaaaatggcctttagtgtatgaaatgcacatggaggggatgtagttgcatttttgctaaaaaaaaaaaaaaacctttaaaaattgttggatgtgtacaaaagtcttactgccttattatgtgtatgggattctaaagtggcattccacttggatttcctgtgctacctatccaaattccagtaactacttcagtgtcattgcctttgttacctaaccaaccttcactgaaaggcaaatttagttcaggaggttagtttttagctagctttggaagtaagcctttatttattactttttggaggaaatcagagaagtgtcaatggaccgtcactcagactgagacttgagttattacagaagccaggaaaagtgtattagaaactgttgtctacaccacttttaattggtgaacaatttttctaagttatggtcatatatacccaaacaaaccaaatcaaactaaattactgcatataattttgggattgggtggcctagtttgaaagagtgatttaagtaatcactatgtaagtggtgagagatgcaggacatacacattattcaagagaccacctgacatgcatctcctccgcaggaatacattcgtcctctcttagagaagtttaacgcacatagtattattttactaagagaatatctcttggtgtcatatctaggggaagagaattaactagaattaaatttaatgtttgaatctaaatcattgggcaaacttctaataataacaattaataataggttacaggaaagccagccagaggaagtgtcagcactttaaaattctagaccccaaaaaactacaaaatcagaaaaagtatttttatgtttctagcttgaggagaagggctttagggctaaccagaggtctgaccctagaatgccaaggaactgagaatgggctccgatgaaaaccttccttttcagattccctgtctgctcaattaaagatgtttgaatccaaaggaagtcaaggaagaaaaagcatggaaaggaagagaactgattcctactgaaaattcaaattctattaccattctaactttcataaaaagttgggatcaagaagcagctgatttcctgccagggcttatattaggggggtgattcttaaaggacattaggattggtgctcagaaatggttaatcatgctgtgtgctagccagggccagctggtaccttctttgccatgagcattcaagggacagctaacctttattgacaatctatattgcaaaagtcaggaaagaggttgtgagctgattggattaaagacctggcacttcagtaactcagcacgcttccacttcactcaacttaagagagttcattgacagtgttaggatgtgaaggctgggaaacacttattttgcttcaagagttccacttggctctcccaaataggtacctcaaaaactgttagcaagcggcatttggatgtcttgacaggggctttgcagggatttttagggttttttccacattgtccacattaatggttggcatgattgtgcttgcaggccaagaaatgatcataccccttgccaaaggtaaaaaaaaaaaaaaaaaaatgagttgaaaattgaagtgacctctttccagctgacttgcaggcttattttgtaacctttcctcatccagttttccctgagaacctgggtttatctctagatagctgttcaggttttttagctgaggggtaagtatcctagctgagagttttgcatctttgggctgggtttgcagtggttgtgttttgcataaaatgtctagtctttgccacagatagtgagctacccactaatgagcccatggttttatttcagaagcacatgagggtgtgaaaccactctgttacctttctgtattgtcttagctattcaagccagtcagaggataatatatatattctcatcagcactcagagtagtcagtgaagagagtagatcacacttgggcacaccaggattcacataaacattgtatcttctctgtggatgctcaggccttgtctacaatgaggctttacaaccttcctttgttttggctcgggattacttcctggctgtctaataattgaaccataaccatgtaatattatgtaaaggcctggaaattactgttgctaaaaaaagtcatgtagtttcatgtagtgtagcatccttggcatcgttttccaaaatttgttccttctcccttttttttttctttcgtgtgtggcatgagtgtgtatctgtgtaaatatgattgtatatgtgttactccgatatgtaatccatttcactggctgagtttggcccctagccatgtgttaatataaagtaggcatggcttcccaatggaaatctctgagaatgacagtggagttgtgcaagcattttacattgccacataattgacttgccattttatggttaaaaacggcacattaggcagttgaatatgacgttaccttgcagactaaaaggttgaaggcccgaaactaacttttagctaacaataagggctgtgccccaatggaaactgagttcattttctgagaaaggtttggatgactgaaatatttcctctacagtcaaggactttggcatgcggtggctgaaactgagcttttttgtgtgggctccagttctcactgttctgcaatgctcatggcaagttgaatggtgagctagcttataaattaaagagctctgaactgtattcagaccgactgggtatctagcttactgttttaacatcattgttgaaaccagaccctgtagtccagtggtgctgccctgttgtgcaaactgctcctttttctcgtgtttttgtaaagagcttccatctgggctggacccagttcttgcacatacaagacaccgctgcagtcagctaggacctttccgccatgtattctattctgtagtaaagcatttccatcaacaatgcctaattgtatctgttatttttggtttaacacacactgattcatactaataaatattttcagtttta

SEQ ID NO: 437990 - DNA, 2599 bp, Homo sapiens
  misc_feature (21)..(21): n is a, c, g, or t
tggctgtctctagaggatccnctccccgtacgcgcaaaactaaattactgcatataattttgggattgggtggcctagtttgaaagagtgatttaagtaatcactatgtaagtggtgagagatgcaggacatacacattattcaagagaccacctgacatgcatctcctccgcaggaatacattcgtcctctcttagagaagtttaacgcacatagtattattttactaagagaatatctcttggtgtcatatctaggggaagagaattaactagaattaaatttaatgtttgaatctaaatcattgggcaaacttctaataataacaattaataataggttacaggaaagccagccagaggaagtgtcagcactttaaaattctagaccccaaaaaactacaaaatcagaaaaagtatttttatgtttctagcttgaggagaagggctttagggctaaccagaggtctgaccctagaatgccaaggaactgagaatgggctccgatgaaaaccttccttttcagattccctgtctgctcaattaaagatgtttgaatccaaaggaagtcaaggaagaaaaagcatggaaaggaagagaactgattcctactgaaaattcaaattctattaccattctaactttcataaaaagttgggatcaagaagcagctgatttcctgccagggcttatattaggggggtgattcttaaaggacattaggattggtgctcagaaatggttaatcatgctgtgtgctagccagggccagctggtaccttctttgccatgagcattcaagggacagctaacctttattgacaatctatattgcaaaagtcaggaaagaggttgtgagctgattggattaaagacctggcacttcagtaactcagcacgcttccacttcactcaacttaagagagttcattgacagtgttaggatgtgaaggctgggaaacacttattttgcttcaagagttccacttggctctcccaaataggtacctcaaaaactgttagcaagcggcatttggatgtcttgacaggggctttgcagggatttttagggttttttccacattgtccacattaatggttggcatgattgtgcttgcaggccaagaaatgatcataccccttgccaaaggtaaaaaaaaaaaaaaaaaaatgagttgaaaattgaagtgacctctttccagctgacttgcaggcttattttgtaacctttcctcatccagttttccctgagaacctgggtttatctctagatagctgttcaggttttttagctgaggggtaagtatcctagctgagagttttgcatctttgggctgggtttgcagtggttgtgttttgcataaaatgtctagtctttgccacagatagtgagctacccactaatgagcccatggttttatttcagaagcacatgagggtgtgaaaccactctgttacctttctgtattgtcttagctattcaagccagtcagaggataatatatatattctcatcagcactcagagtagtcagtgaagagagtagatcacacttgggcacaccaggattcacataaacattgtatcttctctgtggatgctcaggccttgtctacaatgaggctttacaaccttcctttgttttggctcgggattacttcctggctgtctaataattgaaccataaccatgtaatattatgtaaaggcctggaaattactgttgctaaaaaaagtcatgtagtttcatgtagtgtagcatccttggcatcgttttccaaaatttgttccttctcccttttttttttctttcgtgtgtggcatgagtgtgtatctgtgtaaatatgattgtatatgtgttactccgatatgtaatccatttcactggctgagtttggcccctagccatgtgttaatataaagtaggcatggcttcccaatggaaatctctgagaatgacagtggagttgtgcaagcattttacattgccacataattgacttgccattttatggttaaaaacggcacattaggcagttgaatatgacgttaccttgcagactaaaaggttgaaggcccgaaactaacttttagctaacaataagggctgtgccccaatggaaactgagttcattttctgagaaaggtttggatgactgaaatatttcctctacagtcaaggactttggcatgcggtggctgaaactgagcttttttgtgtgggctccagttctcactgttctgcaatgctcatggcaagttgaatggtgagctagcttataaattaaagagctctgaactgtattcagaccgactgggtatctagcttactgttttaacatcattgttgaaaccagaccctgtagtccagtggtgctgccctgttgtgcaaactgctcctttttctcgtgtttttgtaaagagcttccatctgggctggacccagttcttgcacatacaagacaccgctgcagtcagctaggacctttccgccatgtattctattctgtagtaaagcatttccatcaacaatgcctaattgtatctgttatttttggtttaacacacactgattcatactaataaatattttcagtttta

SEQ ID NO: 437991 - DNA, 2100 bp, Homo sapiens
tcagcctggacgacagagtgagactccatctcaaaaaacagacaaacaaaaaagtcagcccctgcacatctctgtagtgcttttcatgtattcaaaccacttccgtatatgacctctcacttagtcctcatgacaatggagcacttattattcttcccattttacagatgaggaaactaagacccagaaagttcaggtcctctgaccccagaagtgtctgtgatgacccccccctcgtgccgaattcggcacgagggcaaatcttaccccgcctggtaccttctttgccatgagcattcaagggacagctaacctttattgacaatctatattgcaaaagtcaggaaagaggttgtgagctgattggattaaagacctggcacttcagtaactcagcacgcttccacttcactcaacttaagagagttcattgacagtgttaggatgtgaaggctgggaaacacttattttgcttcaagagttccacttggctctcccaaataggtacctcaaaaactgttagcaagcggcatttggatgtcttgacaggggctttgcagggatttttagggttttttccacattgtccacattaatggttggcatgattgtgcttgcaggccaagaaatgatcataccccttgccaaaggtaaaaaaaaaaaaaaaaaaatgagttgaaaattgaagtgacctctttccagctgacttgcaggcttattttgtaacctttcctcatccagttttccctgagaacctgggtttatctctagatagctgttcaggttttttagctgaggggtaagtatcctagctgagagttttgcatctttgggctgggtttgcagtggttgtgttttgcataaaatgtctagtctttgccacagatagtgagctacccactaatgagcccatggttttatttcagaagcacatgagggtgtgaaaccactctgttacctttctgtattgtcttagctattcaagccagtcagaggataatatatatattctcatcagcactcagagtagtcagtgaagagagtagatcacacttgggcacaccaggattcacataaacattgtatcttctctgtggatgctcaggccttgtctacaatgaggctttacaaccttcctttgttttggctcgggattacttcctggctgtctaataattgaaccataaccatgtaatattatgtaaaggcctggaaattactgttgctaaaaaaagtcatgtagtttcatgtagtgtagcatccttggcatcgttttccaaaatttgttccttctcccttttttttttctttcgtgtgtggcatgagtgtgtatctgtgtaaatatgattgtatatgtgttactccgatatgtaatccatttcactggctgagtttggcccctagccatgtgttaatataaagtaggcatggcttcccaatggaaatctctgagaatgacagtggagttgtgcaagcattttacattgccacataattgacttgccattttatggttaaaaacggcacattaggcagttgaatatgacgttaccttgcagactaaaaggttgaaggcccgaaactaacttttagctaacaataagggctgtgccccaatggaaactgagttcattttctgagaaaggtttggatgactgaaatatttcctctacagtcaaggactttggcatgcggtggctgaaactgagcttttttgtgtgggctccagttctcactgttctgcaatgctcatggcaagttgaatggtgagctagcttataaattaaagagctctgaactgtattcagaccgactgggtatctagcttactgttttaacatcattgttgaaaccagaccctgtagtccagtggtgctgccctgttgtgcaaactgctcctttttctcgtgtttttgtaaagagcttccatctgggctggacccagttcttgcacatacaagacaccgctgcagtcagctaggacctttccgccatgtattctattctgtagtaaagcatttccatcaacaatgcctaattgtatctgttatttttggtttaacacacactgattcatactaataaatattttcagtttta

SEQ ID NO: 437992 - DNA, 1944 bp, Homo sapiens
ttttttccacattgtccacattaatggttggcatgattgtgcttgcaggccaagaaatgatcataccccttgccaaaggtaaaaaaaaaaaaaaaaaaaatgagttgaaaattgaagtgacctctttccagctgacttgcaggcttggacagctaacctttattgacaatctatattgcaaaagtcaggaaagaggttgtgagctgattggattaaagacctggcacttcagtaactcagcacgcttccacttcactcaacttaagagagttcattgacagtgttaggatgtgaaggctgggaaacacttattttgcttcaagagttccacttggctctcccaaataggtacctcaaaaactgttagcaagcggcatttggatgtcttgacaggggctttgcagggatttttagggttttttccacattgtccacattaatggttggcatgattgtgcttgcaggccaagaaatgatcataccccttgccaaaggtaaaaaaaaaaaaaaaaaaatgagttgaaaattgaagtgacctctttccagctgacttgcaggcttattttgtaacctttcctcatccagttttccctgagaacctgggtttatctctagatagctgttcaggttttttagctgaggggtaagtatcctagctgagagttttgcatctttgggctgggtttgcagtggttgtgttttgcataaaatgtctagtctttgccacagatagtgagctacccactaatgagcccatggttttatttcagaagcacatgagggtgtgaaaccactctgttacctttctgtattgtcttagctattcaagccagtcagaggataatatatatattctcatcagcactcagagtagtcagtgaagagagtagatcacacttgggcacaccaggattcacataaacattgtatcttctctgtggatgctcaggccttgtctacaatgaggctttacaaccttcctttgttttggctcgggattacttcctggctgtctaataattgaaccataaccatgtaatattatgtaaaggcctggaaattactgttgctaaaaaaagtcatgtagtttcatgtagtgtagcatccttggcatcgttttccaaaatttgttccttctcccttttttttttctttcgtgtgtggcatgagtgtgtatctgtgtaaatatgattgtatatgtgttactccgatatgtaatccatttcactggctgagtttggcccctagccatgtgttaatataaagtaggcatggcttcccaatggaaatctctgagaatgacagtggagttgtgcaagcattttacattgccacataattgacttgccattttatggttaaaaacggcacattaggcagttgaatatgacgttaccttgcagactaaaaggttgaaggcccgaaactaacttttagctaacaataagggctgtgccccaatggaaactgagttcattttctgagaaaggtttggatgactgaaatatttcctctacagtcaaggactttggcatgcggtggctgaaactgagcttttttgtgtgggctccagttctcactgttctgcaatgctcatggcaagttgaatggtgagctagcttataaattaaagagctctgaactgtattcagaccgactgggtatctagcttactgttttaacatcattgttgaaaccagaccctgtagtccagtggtgctgccctgttgtgcaaactgctcctttttctcgtgtttttgtaaagagcttccatctgggctggacccagttcttgcacatacaagacaccgctgcagtcagctaggacctttccgccatgtattctattctgtagtaaagcatttccatcaacaatgcctaattgtatctgttatttttggtttaacacacactgattcatactaataaatattttcagtttta

SEQ ID NO: 437993 - DNA, 2047 bp, Homo sapiens
tcagcctggacgacagagtgagactccatctcaaaaaacagacaaacaaaaaagtcagcccctgcacatctctgtagtgcttttcatgtattcaaaccacttccgtatatgacctctcacttagtcctcatgacaatggagcacttattattcttcccattttacagatgaggaaactaagacccagaaagttcaggtcctctgaccccagaagtgtctgtgatgacccccccctcgtgccgaattcggcacgagggcaaatcttaccccgcctggtaccttctttgccatgagcattcaagggacagctaacctttattgacaatctatattgcaaaatcagcacgcttccacttcactcaacttaagagagttcattgacagtgttaggatgtgaaggctgggaaacacttattttgcttcaagagttccacttggctctcccaaataggtacctcaaaaactgttagcaagcggcatttggatgtcttgacaggggctttgcagggatttttagggttttttccacattgtccacattaatggttggcatgattgtgcttgcaggccaagaaatgatcataccccttgccaaaggtaaaaaaaaaaaaaaaaaaatgagttgaaaattgaagtgacctctttccagctgacttgcaggcttattttgtaacctttcctcatccagttttccctgagaacctgggtttatctctagatagctgttcaggttttttagctgaggggtaagtatcctagctgagagttttgcatctttgggctgggtttgcagtggttgtgttttgcataaaatgtctagtctttgccacagatagtgagctacccactaatgagcccatggttttatttcagaagcacatgagggtgtgaaaccactctgttacctttctgtattgtcttagctattcaagccagtcagaggataatatatatattctcatcagcactcagagtagtcagtgaagagagtagatcacacttgggcacaccaggattcacataaacattgtatcttctctgtggatgctcaggccttgtctacaatgaggctttacaaccttcctttgttttggctcgggattacttcctggctgtctaataattgaaccataaccatgtaatattatgtaaaggcctggaaattactgttgctaaaaaaagtcatgtagtttcatgtagtgtagcatccttggcatcgttttccaaaatttgttccttctcccttttttttttctttcgtgtgtggcatgagtgtgtatctgtgtaaatatgattgtatatgtgttactccgatatgtaatccatttcactggctgagtttggcccctagccatgtgttaatataaagtaggcatggcttcccaatggaaatctctgagaatgacagtggagttgtgcaagcattttacattgccacataattgacttgccattttatggttaaaaacggcacattaggcagttgaatatgacgttaccttgcagactaaaaggttgaaggcccgaaactaacttttagctaacaataagggctgtgccccaatggaaactgagttcattttctgagaaaggtttggatgactgaaatatttcctctacagtcaaggactttggcatgcggtggctgaaactgagcttttttgtgtgggctccagttctcactgttctgcaatgctcatggcaagttgaatggtgagctagcttataaattaaagagctctgaactgtattcagaccgactgggtatctagcttactgttttaacatcattgttgaaaccagaccctgtagtccagtggtgctgccctgttgtgcaaactgctcctttttctcgtgtttttgtaaagagcttccatctgggctggacccagttcttgcacatacaagacaccgctgcagtcagctaggacctttccgccatgtattctattctgtagtaaagcatttccatcaacaatgcctaattgtatctgttatttttggtttaacacacactgattcatactaataaatattttcagtttta

SEQ ID NO: 437994 - DNA, 432 bp, Homo sapiens
acccacgcgtcgtttttttttaaaactgaaaatatttattagtatgaatcagtgtgtgttaaaccaaaaataacagatacaattaggcaagttgaatggtgagctagcttataaattaaagagctctgaactgtattcagaccgactgggtatctagcttactgttttaacatcattgttgaaaccagaccctgtagtccagtggtgctgccctgttgtgcaaactgctcctttttctcgtgtttttgtaaagagcttccatctgggctggacccagttcttgcacatacaagacaccgctgcagtcagctaggacctttccgccatgtattctattctgtagtaaagcatttccatcaacaatgcctaattgtatctgttatttttggtttaacacacactgattcatactaataaatattttcagtttta

SEQ ID NO: 437995 - DNA, 795 bp, Homo sapiens
  misc_feature (12)..(12): n is a, c, g, or t
ggccggcggcangtgacccaccgcggcggggccggcggcccagaaatagcagcggcggcggttccgcccgcgggcggcgcgagcgaggggcagaggcgagagacgccggcggggcgcgggcgcggcggccccggaggatgctgctgagccccggcactgcctggctgcgagcacatgatggcgatacgggagctcaaagtgtgccttctcggggacactggggttgggaaatcaagcatcgtgtgtcgatttgtccaggatcactttgaccacaacatcagccctactattggggcatcttttatgaccaaaactgtgccttgtggaaatgaacttcacaagttcctcatctgggacactgctggtcaggaacggtttcattcattggctcccatgtactatcgaggctcagctgcagctgttatcgtgtatgatattaccaagcaggattcattttataccttgaagaaatgggtcaaggagctgaaagaacatggtccagaaaacattgtaatggccatcgctggaaacaagtgcgacctctcagatattaggtaagatgcattgaaatctcttttgtgtagatactgtcctccatccctgagtgtcatccgtgtagatactgtcctccatccctgagtgtcatccgtgtagatgctgtcctccatccctgagtgtcatccgtgtagatgctgtcctccatccctgagtgtcatgcgtgtagatgctgtcctccatccctgagtgtcatccgtgtagatgctgtcctccatccctgagtgtcatccgtgtaga

SEQ ID NO: 437996 - DNA, 529 bp, Homo sapiens
gaagaaggaagggaggaaggaaaggaaggaaggagaaaggagcccctccaggaacacctttattttgtgcacagcccaaagcaggagtgttgaagcagggtgaaaatctgtgtgtgcagtgttggctgtaggaaagggaactcacccttggcctcctttttgttgcaggccgccagatcccacccttggacccccatgaaaatggaaacaatggaacaatcaaagttgagaagccaaccatgcaagccagccgccggtgctgttgacccaagggccgtggtccacggtacttgaagaagccagagcccacatcctgtgcactgctgaaggaccctacgctcggtggcctggcacctcactttgagaagagtgagcacactggctttgcatcctggaagacctgcagggggcggggcaggaaatgtacctgaaaaggattttagaaaaccctgggaaaacccaccacaccaccacaaaatggcctttagtgtatgaaatgcacatggaggggatgtagttgcatttttgc

SEQ ID NO: 437997 - DNA, 3936 bp, Homo sapiens
  misc_feature (12)..(12): n is a, c, g, or t
ggccggcggcangtgacccaccgcggcggggccggcggcccagaaatagcagcggcggcggttccgcccgcgggcggcgcgagcgaggggcagaggcgagagacgccggcggggcgcgggcgcggcggccccggaggatgctgctgagccccggcactgcctggctgcgagcacatgatggcgatacgggagctcaaagtgtgccttctcggggacactggggttgggaaatcaagcatcgtgtgtcgatttgtccaggatcactttgaccacaacatcagccctactattggggcatcttttatgaccaaaactgtgccttgtggaaatgaacttcacaagttcctcatctgggacactgctggtcaggaacggtttcattcattggctcccatgtactatcgaggctcagctgcagctgttatcgtgtatgatattaccaagcaggattcattttataccttgaagaaatgggtcaaggagctgaaagaacatggtccagaaaacattgtaatggccatcgctggaaacaagtgcgacctctcagatattagggaggttcccctgaaggatgctaaggaatacgctgaatccataggtgccatcgtggttgagacaagtgcaaaaaatgctattaatatcgaagagctctttcaaggaatcagccgccagatcccacccttggacccccatgaaaatggaaacaatggaacaatcaaagttgagaagccaaccatgcaagccagccgccggtgctgttgacccaagggccgtggtccacggtacttgaagaagccagagcccacatcctgtgcactgctgaaggaccctacgctcggtggcctggcacctcactttgagaagagtgagcacactggctttgcatcctggaagacctgcagggggcggggcaggaaatgtacctgaaaaggattttagaaaaccctgggaaaacccaccacaccaccacaaaatggcctttagtgtatgaaatgcacatggaggggatgtagttgcatttttgctaaaaaaaaaaaaaaacctttaaaaattgttggatgtgtacaaaagtcttactgccttattatgtgtatgggattctaaagtggcattccacttggatttcctgtgctacctatccaaattccagtaactacttcagtgtcattgcctttgttacctaaccaaccttcactgaaaggcaaatttagttcaggaggttagtttttagctagctttggaagtaagcctttatttattactttttggaggaaatcagagaagtgtcaatggaccgtcactcagactgagacttgagttattacagaagccaggaaaagtttatggtcatatatacccaaacaaaccaaatcaaactaaattactgcatataattttgggattgggtggcctagtttgaaagagtgatttaagtaatcactatgtaagtggtgagagatgcaggacatacacattattcaagagaccacctgacatgcatctcctccgcaggaatacattcgtcctctcttagagaagtttaacgcacatagtattattttactaagagaatatctcttggtgtcatatctaggggaagagaattaactagaattaaatttaatgtttgaatctaaatcattgggcaaacttctaataataacaattaataataggttacaggaaagccagccagaggaagtgtcagcactttaaaattctagaccccaaaaaactacaaaatcagaaaaagtatttttatgtttctagcttgaggagaagggctttagggctaaccagaggtctgaccctagaatgccaaggaactgagaatgggctccgatgaaaaccttccttttcagattccctgtctgctcaattaaagatgtttgaatccaaaggaagtcaaggaagaaaaagcatggaaaggaagagaactgattcctactgaaaattcaaattctattaccattctaactttcataaaaagttgggatcaagaagcagctgatttcctgccagggcttatattaggggggtgattcttaaaggacattaggattggtgctcagaaatggttaatcatgctgtgtgctagccagggccagctggtaccttctttgccatgagcattcaagggacagctaacctttattgacaatctatattgcaaaagtcaggaaagaggttgtgagctgattggattaaagacctggcacttcagtaactcagcacgcttccacttcactcaacttaagagagttcattgacagtgttaggatgtgaaggctgggaaacacttattttgcttcaagagttccacttggctctcccaaataggtacctcaaaaactgttagcaagcggcatttggatgtcttgacaggggctttgcagggatttttagggttttttccacattgtccacattaatggttggcatgattgtgcttgcaggccaagaaatgatcataccccttgccaaaggtaaaaaaaaaaaaaaaaaaatgagttgaaaattgaagtgacctctttccagctgacttgcaggcttattttgtaacctttcctcatccagttttccctgagaacctgggtttatctctagatagctgttcaggttttttagctgaggggtaagtatcctagctgagagttttgcatctttgggctgggtttgcagtggttgtgttttgcataaaatgtctagtctttgccacagatagtgagctacccactaatgagcccatggttttatttcagaagcacatgagggtgtgaaaccactctgttacctttctgtattgtcttagctattcaagccagtcagaggataatatatatattctcatcagcactcagagtagtcagtgaagagagtagatcacacttgggcacaccaggattcacataaacattgtatcttctctgtggatgctcaggccttgtctacaatgaggctttacaaccttcctttgttttggctcgggattacttcctggctgtctaataattgaaccataaccatgtaatattatgtaaaggcctggaaattactgttgctaaaaaaagtcatgtagtttcatgtagtgtagcatccttggcatcgttttccaaaatttgttccttctcccttttttttttctttcgtgtgtggcatgagtgtgtatctgtgtaaatatgattgtatatgtgttactccgatatgtaatccatttcactggctgagtttggcccctagccatgtgttaatataaagtaggcatggcttcccaatggaaatctctgagaatgacagtggagttgtgcaagcattttacattgccacataattgacttgccattttatggttaaaaacggcacattaggcagttgaatatgacgttaccttgcagactaaaaggttgaaggcccgaaactaacttttagctaacaataagggctgtgccccaatggaaactgagttcattttctgagaaaggtttggatgactgaaatatttcctctacagtcaaggactttggcatgcggtggctgaaactgagcttttttgtgtgggctccagttctcactgttctgcaatgctcatggcaagttgaatggtgagctagcttataaattaaagagctctgaactgtattcagaccgactgggtatctagcttactgttttaacatcattgttgaaaccagaccctgtagtccagtggtgctgccctgttgtgcaaactgctcctttttctcgtgtttttgtaaagagcttccatctgggctggacccagttcttgcacatacaagacaccgctgcagtcagctaggacctttccgccatgtattctattctgtagtaaagcatttccatcaacaatgcctaattgtatctgttatttttggtttaacacacactgattcatactaataaatattttcagtttta

SEQ ID NO: 437998 - DNA, 3935 bp, Homo sapiens
  misc_feature (12)..(12): n is a, c, g, or t
ggccggcggcangtgacccaccgcggcggggccggcggcccagaaatagcagcggcggcggttccgcccgcgggcggcgcgagcgaggggcagaggcgagagacgccggcggggcgcgggcgcggcggccccggaggatgctgctgagccccggcactgcctggctgcgagcacatgatggcgatacgggagctcaaagtgtgccttctcggggacactggggttgggaaatcaagcatcgtgtgtcgatttgtccaggatcactttgaccacaacatcagccctactattggggcatcttttatgaccaaaactgtgccttgtggaaatgaacttcacaagttcctcatctgggacactgctggtcaggaacggtttcattcattggctcccatgtactatcgaggctcagctgcagctgttatcgtgtatgatattaccaagcaggattcattttataccttgaagaaatgggtcaaggagctgaaagaacatggtccagaaaacattgtaatggccatcgctggaaacaagtgcgacctctcagatattagggaggttcccctgaaggatgctaaggaatacgctgaatccataggtgccatcgtggttgagacaagtgcaaaaaatgctattaatatcgaagagctctttcaaggaatcagccgccagatcccacccttggacccccatgaaaatggaaacaatggaacaatcaaagttgagaagccaaccatgcaagccagccgccggtgctgttgacccaagggccgtggtccacggtacttgaagaagccagagcccacatcctgtgcactgctgaaggaccctacgctcggtggcctggcacctcactttgagaagagtgagcacactggctttgcatcctggaagacctgcagggggcggggcaggaaatgtacctgaaaaggattttagaaaaccctgggaaaacccaccacaccaccacaaaatggcctttagtgtatgaaatgcacatggaggggatgtagttgcatttttgctaaaaaaaaaaaaaaacctttaaaaattgttggatgtgtacaaaagtcttactgccttattatgtgtatgggattctaaagtggcattccacttggatttcctgtgctacctatccaaattccagtaactacttcagtgtcattgcctttgttacctaaccaaccttcactgaaaggcaaatttagttcaggaggttagtttttagctagctttggaagtaagcctttatttattactttttggaggaaatcagagaagtgtcaatggaccgtcactcagactgagacttgagttattacagaagccaggaaaagtgtattagaaactgttgtctacaccacttttaattggtgaacaatttttctaagttatggtcatatatacccaaacaaaccaaatcaaactaaattactgcatataattttgggattgggtggcctagtttgaaagagtgatttaagtaatcactatgtaagtggtgagagatgcaggacatacacattattcaagagaccacctgacatgcatctcctccgcaggaatacattcgtcctctcttagagaagtttaacgcacatagtattattttactaagagaatatctcttggtgtcatatctaggggaagagaattaactagaattaaatttaatgtttgaatctaaatcattgggcaaacttctaataataacaattaataataggttacaggaaagccagccagaggaagtgtcagcactttaaaattctagaccccaaaaaactacaaaatcagaaaaagtatttttatgtttctagcttgaggagaagggctttagggctaaccagaggtctgaccctagaatgccaaggaactgagaatgggctccgatgaaaaccttccttttcagattccctgtctgctcaattaaagatgtttgaatccaaaggaagtcaaggaagaaaaagcatggaaaggaagagaactgattcctactgaaaattcaaattctattaccattctaactttcataaaaagttgggatcaagaagcagctgatttcctgccagggcttatattaggggggtgattcttaaaggacattaggattggtgctcagaaatggttaatcatgctgtgtgctagccagggccagctggtaccttctttgccatgagcattcaagggacagctaacctttattgacaatctatattgcaaaagtcaggaaagaggttgtgagctgattggattaaagacctggcacttcagtaactcagcacgcttccacttcactcaacttaagagagttcattgacagtgttaggatgtgaaggctgggaaacacttattttgcttcaagagttccacttggctctcccaaataggtacctcaaaaactgttagcaagcggcatttggatgtcttgacaggggctttgcagggatttttagggttttttccacattgtccacattaatggttggcatgattgtgcttgcaggccaagaaatgatcataccccttgccaaaggtaaaaaaaaaaaaaaaaaaatgagttgaaaattgaagtgacctctttccagctgacttgcaggcttattttgtaacctttcctcatccagttttccctgagaacctgggtttatctctagatagctgttcaggttttttagctgaggggtaagtatcctagctgagagttttgcatctttgggctgggtttgcagtggttgtgttttgcataaaatgtctagtctttgccacagatagtgagctacccactaatgagcccatggttttatttcagaagcacatgagggtgtgaaaccactctgttacctttctgtattgtcttagctattcaagccagtcagaggataatatatatattctcatcagcactcagagtagtcagtgaagagagtagatcacacttgggcacaccaggattcacataaacattgtatcttctctgtggatgctcaggccttgtctacaatgaggctttacaaccttcctttgttttggctcgggattacttcctggctgtctaataattgaaccataaccatgtaatattatgtaaaggcctggaaattactgttgctaaaaaaagtcatgtagtttcatgtagtgtagcatccttggcatcgttttccaaaatttgttccttctcccttttttttttctttcgtgtgtggcatgagtgtgtatctgtgtaaatatgattgtatatgtgttactccgatatgtaatccatttcactggctgagtttggcccctagccatgtgttaatataaagtaggcatggcttcccaatggaaatctctgagaatgacagtggagttgtgcaagcattttacattgccacataattgacttgccattttatggttgaaggcccgaaactaacttttagctaacaataagggctgtgccccaatggaaactgagttcattttctgagaaaggtttggatgactgaaatatttcctctacagtcaaggactttggcatgcggtggctgaaactgagcttttttgtgtgggctccagttctcactgttctgcaatgctcatggcaagttgaatggtgagctagcttataaattaaagagctctgaactgtattcagaccgactgggtatctagcttactgttttaacatcattgttgaaaccagaccctgtagtccagtggtgctgccctgttgtgcaaactgctcctttttctcgtgtttttgtaaagagcttccatctgggctggacccagttcttgcacatacaagacaccgctgcagtcagctaggacctttccgccatgtattctattctgtagtaaagcatttccatcaacaatgcctaattgtatctgttatttttggtttaacacacactgattcatactaataaatattttcagtttta

SEQ ID NO: 437999 - DNA, 4121 bp, Homo sapiens
ttttttagcaaaaatgcaactacatcccctccatgtgcatttcatacactaaaggccattttgtggtggtgtggtgggttttcccagggttttctaaaatccttttcaggtacatttcctgccccgccccctgcaggtcttccaggatgcaaagccagtgtgctcactcttctcaaagtgaggtgccaggccaccgagcgtagggtccttcagcagtgcacaggatgtgggctctggcttcttcaagtaccgtggaccacggcccttgggtcaacagcaccggcggctggcttgcatggttggcttctcaactttgattgttccattgtttccattttcatgggggacactggggttgggaaatcaagcatcgtgtgtcgatttgtccaggatcactttgaccacaacatcagccctactattggggcatcttttatgaccaaaactgtgccttgtggaaatgaacttcacaagttcctcatctgggacactgctggtcaggaacggtttcattcattggctcccatgtactatcgaggctcagctgcagctgttatcgtgtatgatattaccaagcaggattcattttataccttgaagaaatgggtcaaggagctgaaagaacatggtccagaaaacattgtaatggccatcgctggaaacaagtgcgacctctcagatattagggaggttcccctgaaggatgctaaggaatacgctgaatccataggtgccatcgtggttgagacaagtgcaaaaaatgctattaatatcgaagagctctttcaaggaatcagccgccagatcccacccttggacccccatgaaaatggaaacaatggaacaatcaaagttgagaagccaaccatgcaagccagccgccggtgctgttgacccaagggccgtggtccacggtacttgaagaagccagagcccacatcctgtgcactgctgaaggaccctacgctcggtggcctggcacctcactttgagaagagtgagcacactggctttgcatcctggaagacctgcagggggcggggcaggaaatgtacctgaaaaggattttagaaaaccctgggaaaacccaccacaccaccacaaaatggcctttagtgtatgaaatgcacatggaggggatgtagttgcatttttgctaaaaaaaaaaaaaaacctttaaaaattgttggatgtgtacaaaagtcttactgccttattatgtgtatgggattctaaagtggcattccacttggatttcctgtgctacctatccaaattccagtaactacttcagtgtcattgcctttgttacctaaccaaccttcactgaaaggcaaatttagttcaggaggttagtttttagctagctttggaagtaagcctttatttattactttttggaggaaatcagagaagtgtcaatggaccgtcactcagactgagacttgagttattacagaagccaggaaaagtgtattagaaactgttgtctacaccacttttaattggtgaacaatttttctaagttatggtcatatatacccaaacaaaccaaatcaaactaaattactgcatataattttgggattgggtggcctagtttgaaagagtgatttaagtaatcactatgtaagtggtgagagatgcaggacatacacattattcaagagaccacctgacatgcatctcctccgcaggaatacattcgtcctctcttagagaagtttaacgcacatagtattattttactaagagaatatctcttggtgtcatatctaggggaagagaattaactagaattaaatttaatgtttgaatctaaatcattgggcaaacttctaataataacaattaataataggttacaggaaagccagccagaggaagtgtcagcactttaaaattctagaccccaaaaaactacaaaatcagaaaaagtatttttatgtttctagcttgaggagaagggctttagggctaaccagaggtctgaccctagaatgccaaggaactgagaatgggctccgatgaaaaccttccttttcagattccctgtctgctcaattaaagatgtttgaatccaaaggaagtcaaggaagaaaaagcatggaaaggaagagaactgattcctactgaaaattcaaattctattaccattctaactttcataaaaagttgggatcaagaagcagctgatttcctgccagggcttatattaggggggtgattcttaaaggacattaggattggtgctcagaaatggttaatcatgctgtgtgctagccagggccagctggtaccttctttgccatgagcattcaagggacagctaacctttattgacaatctatattgcaaaagtcaggaaagaggttgtgagctgattggattaaagacctggcacttcagtaactcagcacgcttccacttcactcaacttaagagagttcattgacagtgttaggatgtgaaggctgggaaacacttattttgcttcaagagttccacttggctctcccaaataggtacctcaaaaactgttagcaagcggcatttggatgtcttgacaggggctttgcagggatttttagggttttttccacattgtccacattaatggttggcatgattgtgcttgcaggccaagaaatgatcataccccttgccaaaggtaaaaaaaaaaaaaaaaaaatgagttgaaaattgaagtgacctctttccagctgacttgcaggcttattttgtaacctttcctcatccagttttccctgagaacctgggtttatctctagatagctgttcaggttttttagctgaggggtaagtatcctagctgagagttttgcatctttgggctgggtttgcagtggttgtgttttgcataaaatgtctagtctttgccacagatagtgagctacccactaatgagcccatggttttatttcagaagcacatgagggtgtgaaaccactctgttacctttctgtattgtcttagctattcaagccagtcagaggataatatatatattctcatcagcactcagagtagtcagtgaagagagtagatcacacttgggcacaccaggattcacataaacattgtatcttctctgtggatgctcaggccttgtctacaatgaggctttacaaccttcctttgttttggctcgggattacttcctggctgtctaataattgaaccataaccatgtaatattatgtaaaggcctggaaattactgttgctaaaaaaagtcatgtagtttcatgtagtgtagcatccttggcatcgttttccaaaatttgttccttctcccttttttttttctttcgtgtgtggcatgagtgtgtatctgtgtaaatatgattgtatatgtgttactccgatatgtaatccatttcactggctgagtttggcccctagccatgtgttaatataaagtaggcatggcttcccaatggaaatctctgagaatgacagtggagttgtgcaagcattttacattgccacataattgacttgccattttatggttaaaaacggcacattaggcagttgaatatgacgttaccttgcagactaaaaggttgaaggcccgaaactaacttttagctaacaataagggctgtgccccaatggaaactgagttcattttctgagaaaggtttggatgactgaaatatttcctctacagtcaaggactttggcatgcggtggctgaaactgagcttttttgtgtgggctccagttctcactgttctgcaatgctcatggcaagttgaatggtgagctagcttataaattaaagagctctgaactgtattcagaccgactgggtatctagcttactgttttaacatcattgttgaaaccagaccctgtagtccagtggtgctgccctgttgtgcaaactgctcctttttctcgtgtttttgtaaagagcttccatctgggctggacccagttcttgcacatacaagacaccgctgcagtcagctaggacctttccgccatgtattctattctgtagtaaagcatttccatcaacaatgcctaattgtatctgttatttttggtttaacacacactgattcatactaataaatattttcagtttta

SEQ ID NO: 438000 - DNA, 3935 bp, Homo sapiens
  misc_feature (12)..(12): n is a, c, g, or t
ggccggcggcangtgacccaccgcggcggggccggcggcccagaaatagcagcggcggcggttccgcccgcgggcggcgcgagcgaggggcagaggcgagagacgccggcggggcgcgggcgcggcggccccggaggatgctgctgagccccggcactgcctggctgcgagcacatgatggcgatacgggagctcaaagtgtgccttctcggggacactggggttgggaaatcaagcatcgtgtgtcgatttgtccaggatcactttgaccacaacatcagccctactattggggcatcttttatgaccaaaactgtgccttgtggaaatgaacttcacaagttcctcatctgggacactgctggtcaggaacggtttcattcattggctcccatgtactatcgaggctcagctgcagctgttatcgtgtatgatattaccaagcaggattcattttataccttgaagaaatgggtcaaggagctgaaagaacatggtccagaaaacattgtaatggccatcgctggaaacaagtgcgacctctcagatattagggaggttcccctgaaggatgctaaggaatacgctgaatccataggtgccatcgtggttgagacaagtgcaaaaaatgctattaatatcgaagagctctttcaaggaatcagccgccagatcccacccttggacccccatgaaaatggaaacaatggaacaatcaaagttgagaagccaaccatgcaagccagccgccggtgctgttgacccaagggccgtggtccacggtacttgaagaagccagagcccacatcctgtgcactgctgaaggaccctacgctcggtggcctggcacctcactttgagaagagtgagcacactggctttgcatcctggaagacctgcagggggcggggcaggaaatgtacctgaaaaggattttagaaaaccctgggaaaacccaccacaccaccacaaaatggcctttagtgtatgaaatgcacatggaggggatgtagttgcatttttgctaaaaaaaaaaaaaaacctttaaaaattgttggatgtgtacaaaagtcttactgccttattatgtgtatgggattctaaagtggcattccacttggatttcctgtgctacctatccaaattccagtaactacttcagtgtcattgcctttgttacctaaccaaccttcactgaaaggcaaatttagttcaggaggttagtttttagctagctttggaagtaagcctttatttattactttttggaggaaatcagagaagtgtcaatggaccgtcactcagactgagacttgagttattacagaagccaggaaaagtgtattagaaactgttgtctacaccacttttaattggtgaacaatttttctaagttatggtcatatatacccaaacaaaccaaatcaaactaaattactgcatataattttgggattgggtggcctagtttgaaagagtgatttaagtaatcactatgtaagtggtgagagatgcaggacatacacattattcaagagaccacctgacatgcatctcctccgcaggaatacattcgtcctctcttagagaagtttaacgcacatagtattattttactaagagaatatctcttggtgtcatatctaggggaagagaattaactagaattaaatttaatgtttgaatctaaatcattgggcaaacttctaataataacaattaataataggttacaggaaagccagccagaggaagtgtcagcactttaaaattctagaccccaaaaaactacaaaatcagaaaaagtatttttatgtttctagcttgaggagaagggctttagggctaaccagaggtctgaccctagaatgccaaggaactgagaatgggctccgatgaaaaccttccttttcagattccctgtctgctcaattaaagatgtttgaatccaaaggaagtcaaggaagaaaaagcatggaaaggaagagaactgattcctactgaaaattcaaattctattaccattctaactttcataaaaagttgggatcaagaagcagctgatttcctgccagggcttatattaggggggtgattcttaaaggacattaggattggtgctcagaaatggttaatcatgctgtgtgctagccagggccagctggtaccttctttgccatgagcattcaagggacagctaacctttattgacaatctatattgcaaaagtcaggaaagaggttgtgagctgattggattaaagacctggcacttcagtaactcagcacgcttccacttcactcaacttaagagagttcattgacagtgttaggatgtgaaggctgggaaacacttattttgcttcaagagttccacttggctctcccaaataggtacctcaaaaaggttttttccacattgtccacattaatggttggcatgattgtgcttgcaggccaagaaatgatcataccccttgccaaaggtaaaaaaaaaaaaaaaaaaatgagttgaaaattgaagtgacctctttccagctgacttgcaggcttattttgtaacctttcctcatccagttttccctgagaacctgggtttatctctagatagctgttcaggttttttagctgaggggtaagtatcctagctgagagttttgcatctttgggctgggtttgcagtggttgtgttttgcataaaatgtctagtctttgccacagatagtgagctacccactaatgagcccatggttttatttcagaagcacatgagggtgtgaaaccactctgttacctttctgtattgtcttagctattcaagccagtcagaggataatatatatattctcatcagcactcagagtagtcagtgaagagagtagatcacacttgggcacaccaggattcacataaacattgtatcttctctgtggatgctcaggccttgtctacaatgaggctttacaaccttcctttgttttggctcgggattacttcctggctgtctaataattgaaccataaccatgtaatattatgtaaaggcctggaaattactgttgctaaaaaaagtcatgtagtttcatgtagtgtagcatccttggcatcgttttccaaaatttgttccttctcccttttttttttctttcgtgtgtggcatgagtgtgtatctgtgtaaatatgattgtatatgtgttactccgatatgtaatccatttcactggctgagtttggcccctagccatgtgttaatataaagtaggcatggcttcccaatggaaatctctgagaatgacagtggagttgtgcaagcattttacattgccacataattgacttgccattttatggttaaaaacggcacattaggcagttgaatatgacgttaccttgcagactaaaaggttgaaggcccgaaactaacttttagctaacaataagggctgtgccccaatggaaactgagttcattttctgagaaaggtttggatgactgaaatatttcctctacagtcaaggactttggcatgcggtggctgaaactgagcttttttgtgtgggctccagttctcactgttctgcaatgctcatggcaagttgaatggtgagctagcttataaattaaagagctctgaactgtattcagaccgactgggtatctagcttactgttttaacatcattgttgaaaccagaccctgtagtccagtggtgctgccctgttgtgcaaactgctcctttttctcgtgtttttgtaaagagcttccatctgggctggacccagttcttgcacatacaagacaccgctgcagtcagctaggacctttccgccatgtattctattctgtagtaaagcatttccatcaacaatgcctaattgtatctgttatttttggtttaacacacactgattcatactaataaatattttcagtttta

SEQ ID NO: 438001 - DNA, 3909 bp, Homo sapiens
  misc_feature (12)..(12): n is a, c, g, or t
ggccggcggcangtgacccaccgcggcggggccggcggcccagaaatagcagcggcggcggttccgcccgcgggcggcgcgagcgaggggcagaggcgagagacgccggcggggcgcgggcgcggcggccccggaggatgctgctgagccccggcactgcctggctgcgagcacatgatggcgatacgggagctcaaagtgtgccttctcgggggcatcttttatgaccaaaactgtgccttgtggaaatgaacttcacaagttcctcatctgggacactgctggtcaggaacggtttcattcattggctcccatgtactatcgaggctcagctgcagctgttatcgtgtatgatattaccaagcaggattcattttataccttgaagaaatgggtcaaggagctgaaagaacatggtccagaaaacattgtaatggccatcgctggaaacaagtgcgacctctcagatattagggaggttcccctgaaggatgctaaggaatacgctgaatccataggtgccatcgtggttgagacaagtgcaaaaaatgctattaatatcgaagagctctttcaaggaatcagccgccagatcccacccttggacccccatgaaaatggaaacaatggaacaatcaaagttgagaagccaaccatgcaagccagccgccggtgctgttgacccaagggccgtggtccacggtacttgaagaagccagagcccacatcctgtgcactgctgaaggaccctacgctcggtggcctggcacctcactttgagaagagtgagcacactggctttgcatcctggaagacctgcagggggcggggcaggaaatgtacctgaaaaggattttagaaaaccctgggaaaacccaccacaccaccacaaaatggcctttagtgtatgaaatgcacatggaggggatgtagttgcatttttgctaaaaaaaaaaaaaaacctttaaaaattgttggatgtgtacaaaagtcttactgccttattatgtgtatgggattctaaagtggcattccacttggatttcctgtgctacctatccaaattccagtaactacttcagtgtcattgcctttgttacctaaccaaccttcactgaaaggcaaatttagttcaggaggttagtttttagctagctttggaagtaagcctttatttattactttttggaggaaatcagagaagtgtcaatggaccgtcactcagactgagacttgagttattacagaagccaggaaaagtgtattagaaactgttgtctacaccacttttaattggtgaacaatttttctaagttatggtcatatatacccaaacaaaccaaatcaaactaaattactgcatataattttgggattgggtggcctagtttgaaagagtgatttaagtaatcactatgtaagtggtgagagatgcaggacatacacattattcaagagaccacctgacatgcatctcctccgcaggaatacattcgtcctctcttagagaagtttaacgcacatagtattattttactaagagaatatctcttggtgtcatatctaggggaagagaattaactagaattaaatttaatgtttgaatctaaatcattgggcaaacttctaataataacaattaataataggttacaggaaagccagccagaggaagtgtcagcactttaaaattctagaccccaaaaaactacaaaatcagaaaaagtatttttatgtttctagcttgaggagaagggctttagggctaaccagaggtctgaccctagaatgccaaggaactgagaatgggctccgatgaaaaccttccttttcagattccctgtctgctcaattaaagatgtttgaatccaaaggaagtcaaggaagaaaaagcatggaaaggaagagaactgattcctactgaaaattcaaattctattaccattctaactttcataaaaagttgggatcaagaagcagctgatttcctgccagggcttatattaggggggtgattcttaaaggacattaggattggtgctcagaaatggttaatcatgctgtgtgctagccagggccagctggtaccttctttgccatgagcattcaagggacagctaacctttattgacaatctatattgcaaaagtcaggaaagaggttgtgagctgattggattaaagacctggcacttcagtaactcagcacgcttccacttcactcaacttaagagagttcattgacagtgttaggatgtgaaggctgggaaacacttattttgcttcaagagttccacttggctctcccaaataggtacctcaaaaactgttagcaagcggcatttggatgtcttgacaggggctttgcagggatttttagggttttttccacattgtccacattaatggttggcatgattgtgcttgcaggccaagaaatgatcataccccttgccaaaggtaaaaaaaaaaaaaaaaaaatgagttgaaaattgaagtgacctctttccagctgacttgcaggcttattttgtaacctttcctcatccagttttccctgagaacctgggtttatctctagatagctgttcaggttttttagctgaggggtaagtatcctagctgagagttttgcatctttgggctgggtttgcagtggttgtgttttgcataaaatgtctagtctttgccacagatagtgagctacccactaatgagcccatggttttatttcagaagcacatgagggtgtgaaaccactctgttacctttctgtattgtcttagctattcaagccagtcagaggataatatatatattctcatcagcactcagagtagtcagtgaagagagtagatcacacttgggcacaccaggattcacataaacattgtatcttctctgtggatgctcaggccttgtctacaatgaggctttacaaccttcctttgttttggctcgggattacttcctggctgtctaataattgaaccataaccatgtaatattatgtaaaggcctggaaattactgttgctaaaaaaagtcatgtagtttcatgtagtgtagcatccttggcatcgttttccaaaatttgttccttctcccttttttttttctttcgtgtgtggcatgagtgtgtatctgtgtaaatatgattgtatatgtgttactccgatatgtaatccatttcactggctgagtttggcccctagccatgtgttaatataaagtaggcatggcttcccaatggaaatctctgagaatgacagtggagttgtgcaagcattttacattgccacataattgacttgccattttatggttaaaaacggcacattaggcagttgaatatgacgttaccttgcagactaaaaggttgaaggcccgaaactaacttttagctaacaataagggctgtgccccaatggaaactgagttcattttctgagaaaggtttggatgactgaaatatttcctctacagtcaaggactttggcatgcggtggctgaaactgagcttttttgtgtgggctccagttctcactgttctgcaatgctcatggcaagttgaatggtgagctagcttataaattaaagagctctgaactgtattcagaccgactgggtatctagcttactgttttaacatcattgttgaaaccagaccctgtagtccagtggtgctgccctgttgtgcaaactgctcctttttctcgtgtttttgtaaagagcttccatctgggctggacccagttcttgcacatacaagacaccgctgcagtcagctaggacctttccgccatgtattctattctgtagtaaagcatttccatcaacaatgcctaattgtatctgttatttttggtttaacacacactgattcatactaataaatattttcagtttta

SEQ ID NO: 438002 - DNA, 2887 bp, Homo sapiens
  misc_feature (12)..(12): n is a, c, g, or t
ggccggcggcangtgacccaccgcggcggggccggcggcccagaaatagcagcggcggcggttccgcccgcgggcggcgcgagcgaggggcagaggcgagagacgccggcggggcgcgggcgcggcggccccggaggatgctgctgagccccggcactgcctggctgcgagcacatgatggcgatacgggagctcaaagtgtgccttctcggggacactggggttgggaaatcaagcatcgtgtgtcgatttgtccaggatcactttgaccacaacatcagccctactattggggcatcttttatgaccaaaactgtgccttgtggaaatgaacttcacaagttcctcatctgggacactgctggtcaggaacggtttcattcattggctcccatgtactatcgaggctcagctgcagctgttatcgtgtatgatattaccaagcaggattcattttataccttgaagaaatgggtcaaggagctgaaagaacatggtccagaaaacattgtaatggccatcgctggaaacaagtgcgacctctcagatattagggaggttcccctgaaggatgctaaggaatacgctgaatccataggtgccatcgtggttgagacaagtgcaaaaaatgctattaatatcgaagagctctttcaaggaatcagccgccagatcccacccttggacccccatgaaaatggaaacaatggaacaatcaaagttgagaagccaaccatgcaagccagccgccggtgctgttgacccaagggccgtggtccacggtacttgaagaagccagagcccacatcctgtgcactgctgaaggaccctacgctcggtggcctggcacctcactttgagaagagtgagcacactggctttgcatcctggaagacctgcagggggcggggcaggaaatgtacctgaaaaggattttagaaaaccctgggaaaacccaccacaccaccacaaaatggcctttagtgtatgaaatgcacatggaggggatgtagttgcatttttgctaaaaaaaaaaaaaaacctttaaaaattgttggatgtgtacaaaagtcttactgccttattatgtgtatgggattctaaagtggcattccacttggatttcctgtgctacctatccaaattccagtaactacttcagtgtcattgcctttgttacctaaccaaccttcactgaaaggcaaatttagttcaggaggttagtttttagctagctttggaagtaagcctttatttattactttttggaggaaatcagagaagtgtcaatggaccgtcactcagactgagacttgagttattacagaagccaggaaaagtgtattagaaactgttgtctacaccacttttaattggtgaacaatttttctaagttatggtcatatatacccaaacaaaccaaatcaaactaaattactgcatataattttgggattgggtggcctagtttgaaagagtgatttaagtaatcactatgtaagtggtgagagatgcaggacatacacattattcaagagaccacctgacatgcatctcctccgcaggaatacattcgtcctctcttagagaagtttaacgcacatagtattattttactaagagaatatctcttggtgtcatatctaggggaagagaattaactagaattaaatttaatgtttgaatctaaatcattgggcaaacttctaataataacaattaataataggttacaggaaagccagccagaggaagtgtcagcactttaaaattctagaccccaaaaaactacaaaatcagaaaaagtatttttatgtttctagcttgaggagaagggctttagggctaaccagaggtctgaccctagaatgccaaggaactgagaatgggctccgatgaaaaccttccttttcagattccctgtctgctcaattaaagatgtttgaatccaaaggaagtcaaggaagaaaaagcatggaaaggaagagaactgattcctactgaaaattcaaattctattaccattctaactttcataaaaagttgggatcaagaagcagctgatttcctgccagggcttatattaggggggtgattcttaaaggacattaggattggtgctcagaaatggttaatcatgctgtgtgctagccagggccagctggtaccttctttgccatgagcattcaagggacagctaacctttattgacaatctatattgcaaaagtcaggaaagaggttgtgagctgattggattaaagacctggcacttcagtaactcagcacgcttccacttcactcaacttaagagagttcattgacagtgttaggatgtgaaggctgggaaacacttattttgcttcaagagttccacttggctctcccaaataggtacctcaaaaactgttagcaagcggcatttggatgtcttgacaggggctttgcagggatttttagggttttttccacattgtccacattaatggttggcatgattgtgcttgcaggccaagaaatgatcataccccttgccaaaggtaaaaaaaaaaaaaaaaaaatgagttgaaaattgaagtgacctctttccagctgacttgcaggcttattttgtaacctttcctcatccagttttccctgagaacctgggtttatctctagatagctgttcaggttttttagctgaggggtaagtatcctagctgagagttttgcatctttgggtggacccagttcttgcacatacaagacaccgctgcagtcagctaggacctttccgccatgtattctattctgtagtaaagcatttccatcaacaatgcctaattgtatctgttatttttggtttaacacacactgattcatactaataaatattttcagtttta

SEQ ID NO: 438003 - DNA, 1424 bp, Homo sapiens
gctgcacagaaggttggggccatccaaccaggcagtccgcctgcacagcagctgtccctgctcatcgggctggaggacagaagacagaaccctaaaaccacaggttgctgaaaagccaggagtcaaaatgactgagcgctttgactgccaccattgcaacgaatctctctttggcaagaagtacatcctgcgggaggagagcccctactgcgtggtgtgctttgagaccctgttcgccaacacctgcgaggagtgtgggaagcccatcggctgtgactgcaaggacttgtcttacaaggaccggcactggcatgaagcctgtttccactgctcgcagtgcagaaactcactggtggacaagccctttgctgccaaggaggaccagctgctctgtacagactgctattccaacgagtactcatccaagtgccaggaatgcaagaagaccatcatgccaggtacccgcaagatggagtacaagggcagcagctggcatgagacctgcttcatctgccaccgctgccagcagccaattggaaccaagagtttcatccccaaagacaatcagaatttctgtgtgccctgctatgagaaacaacatgccatgcagtgcgttcagtgcaaaaagcccatcaccacgggaggggtcacttaccgggagcagccctggcacaaggagtgcttcgtgtgcaccgcctgcaggaagcagctgtctgggcagcgcttcacagctcgcgatgactttgcctactgcctgaactgcttctgtgacttgtatgccaagaagtgtgctgggtgcaccaaccccatcagcggacttggtggcacaaaatacatctcctttgaggaacggcagtggcataacgactgctttaactgtaagaagtgctccctctcactggtggggcgtggcttcctcacagagagggacgacatcctgtgccccgactgtgggaaagacatctgaattcaacacagagaagttgctgcttgtgatctcacacacagatttttatgttttctttctcacccaggcaatcttgccttctggtttcttccagccacattgagactttcttctagtgcttttcagtgatactcacgtttgcttaaaccctttagtgctttgtgatagttcagtcccagggaaagagaaaactcgccctaggccctaggtgggaagatggtttgaaatttttgtaatcgagtaaggcacacccaaatgtaaaaatccttttgaatgatgcctttataaatctttctctcactgtctatttaagtgcaattaacatatgtcacgaacttgaaagttttctaaactcaataaggtaatgaccagttgttatttacagctctgtaacctcccgttgcgtcaagtctaaaccaagattatgtgacttgcaataaagttattcagaacagaa

SEQ ID NO: 438004 - DNA, 1888 bp, Homo sapiens
ggcacgaggagggtacgggccgggaccgccgcagcccggggcgggggcacggcaaccgcgaggcctgggggcgcccgccccccgcgccccacgcccggtgccagcgagccgaggcgtgcatctccttatatggtcaaatgacacggcggggtttctcgagggcgggagctgcgcagcgctccactcggccggcagcggagccgcagccaccagccgcccgcgccctccagccccgtccgggagtccccggcccgctgcggtgccgtgagtacctccaaccccctgcgccccggagggaggccgaggggcttagccaccagggctcggaagtgggggccgaatccggtgcgagacccaaggagaggggagcagagccggagttggggagactggttgctgaaaactgtgtcttcctggagactaggctggcattttgactttggggtacggagtctcgctttgtcgcccaggctggagtgcagtggcacgatctcagctcactgcaagctctacctcttggttcacgccattctcctgccccagcctcccaagtagctgggactacaggttgctgaaaagccaggagtcaaaatgactgagcgctttgactgccaccattgcaacgaatctctctttggcaagaagtacatcctgcgggaggagagcccctactgcgtggtgtgctttgagaccctgttcgccaacacctgcgaggagtgtgggaagcccatcggctgtgactgcaaggacttgtcttacaaggaccggcactggcatgaagcctgtttccactgctcgcagtgcagaaactcactggtggacaagccctttgctgccaaggaggaccagctgctctgtacagactgctattccaacgagtactcatccaagtgccaggaatgcaagaagaccatcatgccaggtacccgcaagatggagtacaagggcagcagctggcatgagacctgcttcatctgccaccgctgccagcagccaattggaaccaagagtttcatccccaaagacaatcagaatttctgtgtgccctgctatgagaaacaacatgccatgcagtgcgttcagtgcaaaaagcccatcaccacgggaggggtcacttaccgggagcagccctggcacaaggagtgcttcgtgtgcaccgcctgcaggaagcagctgtctgggcagcgcttcacagctcgcgatgactttgcctactgcctgaactgcttctgtgacttgtatgccaagaagtgtgctgggtgcaccaaccccatcagcggacttggtggcacaaaatacatctcctttgaggaacggcagtggcataacgactgctttaactgtaagaagtgctccctctcactggtggggcgtggcttcctcacagagagggacgacatcctgtgccccgactgtgggaaagacatctgaattcaacacagagaagttgctgcttgtgatctcacacacagatttttatgttttctttctcacccaggcaatcttgccttctggtttcttccagccacattgagactttcttctagtgcttttcagtgatactcacgtttgcttaaaccctttagtgctttgtgatagttcagtcccagggaaagagaaaactcgccctaggccctaggtgggaagatggtttgaaatttttgtaatcgagtaaggcacacccaaatgtaaaaatccttttgaatgatgcctttataaatctttctctcactgtctatttaagtgcaattaacatatgtcacgaacttgaaagttttctaaactcaataaggtaatgaccagttgttatttacagctctgtaacctcccgttgcgtcaagtctaaaccaagattatgtgacttgcaataaagttattcagaacagaa

SEQ ID NO: 438005 - DNA, 1722 bp, Homo sapiens
ggcacgaggagggtacgggccgggaccgccgcagcccggggcgggggcacggcaaccgcgaggcctgggggcgcccgccccccgcgccccacgcccggtgccagcgagccgaggcgtgcatctccttatatggtcaaatgacacggcggggtttctcgagggcgggagctgcgcagcgctccactcggccggcagcggagccgcagccaccagccgcccgcgccctccagccccgtccgggagtccccggcccgctgcggtgccgtgagtacctccaaccccctgcgccccggagggaggccgaggggcttagccaccagggctcggaagtgggggccgaatccggtgcgagacccaaggagaggggagcagagccggagttggggagactggttgctgaaaatgctgaaaagccaggagtcaaaatgactgagcgctttgactgccaccattgcaacgaatctctctttggcaagaagtacatcctgcgggaggagagcccctactgcgtggtgtgctttgagaccctgttcgccaacacctgcgaggagtgtgggaagcccatcggctgtgactgcaaggacttgtcttacaaggaccggcactggcatgaagcctgtttccactgctcgcagtgcagaaactcactggtggacaagccctttgctgccaaggaggaccagctgctctgtacagactgctattccaacgagtactcatccaagtgccaggaatgcaagaagaccatcatgccaggtacccgcaagatggagtacaagggcagcagctggcatgagacctgcttcatctgccaccgctgccagcagccaattggaaccaagagtttcatccccaaagacaatcagaatttctgtgtgccctgctatgagaaacaacatgccatgcagtgcgttcagtgcaaaaagcccatcaccacgggaggggtcacttaccgggagcagccctggcacaaggagtgcttcgtgtgcaccgcctgcaggaagcagctgtctgggcagcgcttcacagctcgcgatgactttgcctactgcctgaactgcttctgtgacttgtatgccaagaagtgtgctgggtgcaccaaccccatcagcggacttggtggcacaaaatacatctcctttgaggaacggcagtggcataacgactgctttaactgtaagaagtgctccctctcactggtggggcgtggcttcctcacagagagggacgacatcctgtgccccgactgtgggaaagacatctgaattcaacacagagaagttgctgcttgtgatctcacacacagatttttatgttttctttctcacccaggcaatcttgccttctggtttcttccagccacattgagactttcttctagtgcttttcagtgatactcacgtttgcttaaaccctttagtgctttgtgatagttcagtcccagggaaagagaaaactcgccctaggccctaggtgggaagatggtttgaaatttttgtaatcgagtaaggcacacccaaatgtaaaaatccttttgaatgatgcctttataaatctttctctcactgtctatttaagtgcaattaacatatgtcacgaacttgaaagttttctaaactcaataaggtaatgaccagttgttatttacagctctgtaacctcccgttgcgtcaagtctaaaccaagattatgtgacttgcaataaagttattcagaacagaa

SEQ ID NO: 438006 - DNA, 1585 bp, Homo sapiens
ggcacgaggagggtacgggccgggaccgccgcagcccggggcgggggcacggcaaccgcgaggcctgggggcgcccgccccccgcgccccacgcccggtgccagcgagccgaggcgtgcatctccttatatggtcaaatgacacggcggggtttctcgagggcgggagctgcgcagcgctccactcggccggcagcggagccgcagccaccagccgcccgcgccctccagccccgtccgggagtccccggcccgctgcggtgccgttgctgaaaagccaggagtcaaaatgactgagcgctttgactgccaccattgcaacgaatctctctttggcaagaagtacatcctgcgggaggagagcccctactgcgtggtgtgctttgagaccctgttcgccaacacctgcgaggagtgtgggaagcccatcggctgtgactgcaaggacttgtcttacaaggaccggcactggcatgaagcctgtttccactgctcgcagtgcagaaactcactggtggacaagccctttgctgccaaggaggaccagctgctctgtacagactgctattccaacgagtactcatccaagtgccaggaatgcaagaagaccatcatgccaggtacccgcaagatggagtacaagggcagcagctggcatgagacctgcttcatctgccaccgctgccagcagccaattggaaccaagagtttcatccccaaagacaatcagaatttctgtgtgccctgctatgagaaacaacatgccatgcagtgcgttcagtgcaaaaagcccatcaccacgggaggggtcacttaccgggagcagccctggcacaaggagtgcttcgtgtgcaccgcctgcaggaagcagctgtctgggcagcgcttcacagctcgcgatgactttgcctactgcctgaactgcttctgtgacttgtatgccaagaagtgtgctgggtgcaccaaccccatcagcggacttggtggcacaaaatacatctcctttgaggaacggcagtggcataacgactgctttaactgtaagaagtgctccctctcactggtggggcgtggcttcctcacagagagggacgacatcctgtgccccgactgtgggaaagacatctgaattcaacacagagaagttgctgcttgtgatctcacacacagatttttatgttttctttctcacccaggcaatcttgccttctggtttcttccagccacattgagactttcttctagtgcttttcagtgatactcacgtttgcttaaaccctttagtgctttgtgatagttcagtcccagggaaagagaaaactcgccctaggccctaggtgggaagatggtttgaaatttttgtaatcgagtaaggcacacccaaatgtaaaaatccttttgaatgatgcctttataaatctttctctcactgtctatttaagtgcaattaacatatgtcacgaacttgaaagttttctaaactcaataaggtaatgaccagttgttatttacagctctgtaacctcccgttgcgtcaagtctaaaccaagattatgtgacttgcaataaagttattcagaacagaa

SEQ ID NO: 438007 - DNA, 1626 bp, Homo sapiens
  misc_feature (161)..(161): n is a, c, g, or t
  misc_feature (193)..(193): n is a, c, g, or t
  misc_feature (262)..(262): n is a, c, g, or t
gcagtgactcaggcagcctcctttgtcagcaccgggcctgagtcgctaagcggctctctgactcagatgccctgaggtacaaagttccttgagcttgggtgaatggaaacattagacattgggttcttctgtgcggttttattatgagaatttgatcaaanccacatttattaagtgtccatctcaagttgcnttatactgagttcgcttcctcaagatgaccatctgaaacaaaacacgtgtgctttctctagtggctganaactgtgtcttcctggagactaggctggcattttgactttggggttgctgaaaagccaggagtcaaaatgactgagcgctttgactgccaccattgcaacgaatctctctttggcaagaagtacatcctgcgggaggagagcccctactgcgtggtgtgctttgagaccctgttcgccaacacctgcgaggagtgtgggaagcccatcggctgtgactgcaaggacttgtcttacaaggaccggcactggcatgaagcctgtttccactgctcgcagtgcagaaactcactggtggacaagccctttgctgccaaggaggaccagctgctctgtacagactgctattccaacgagtactcatccaagtgccaggaatgcaagaagaccatcatgccaggtacccgcaagatggagtacaagggcagcagctggcatgagacctgcttcatctgccaccgctgccagcagccaattggaaccaagagtttcatccccaaagacaatcagaatttctgtgtgccctgctatgagaaacaacatgccatgcagtgcgttcagtgcaaaaagcccatcaccacgggaggggtcacttaccgggagcagccctggcacaaggagtgcttcgtgtgcaccgcctgcaggaagcagctgtctgggcagcgcttcacagctcgcgatgactttgcctactgcctgaactgcttctgtgacttgtatgccaagaagtgtgctgggtgcaccaaccccatcagcggacttggtggcacaaaatacatctcctttgaggaacggcagtggcataacgactgctttaactgtaagaagtgctccctctcactggtggggcgtggcttcctcacagagagggacgacatcctgtgccccgactgtgggaaagacatctgaattcaacacagagaagttgctgcttgtgatctcacacacagatttttatgttttctttctcacccaggcaatcttgccttctggtttcttccagccacattgagactttcttctagtgcttttcagtgatactcacgtttgcttaaaccctttagtgctttgtgatagttcagtcccagggaaagagaaaactcgccctaggccctaggtgggaagatggtttgaaatttttgtaatcgagtaaggcacacccaaatgtaaaaatccttttgaatgatgcctttataaatctttctctcactgtctatttaagtgcaattaacatatgtcacgaacttgaaagttttctaaactcaataaggtaatgaccagttgttatttacagctctgtaacctcccgttgcgtcaagtctaaaccaagattatgtgacttgcaataaagttattcagaacagaa

SEQ ID NO: 438008 - DNA, 1510 bp, Homo sapiens
agtctgtttctctgtcaccggatgtggtgtgagacgaattgataggtgttcatgttttctgtttctctttcttgcaggcaatacataagggaaatccctttgttttttagaagcatctctcacacacagacatgtgcatacatgcacatctgtctaacctgttgctctaaaatgcagcaagagaaaagcagcctagtcttaattgatttcagcagttaggtggtcctggggcatgaatgtgggtgcgccagggtgcctcggcccaacttctttccttgtttgccctgcagattcgcaaggggcccctatgctgtgggtccaagccctcctgtcctgcctctgactgtcttgtgtggtctggccccacaggacttgtcttacaaggaccggcactggcatgaagcctgtttccactgctcgcagtgcagaaactcactggtggacaagccctttgctgccaaggaggaccagctgctctgtacagactgctattccaacgagtactcatccaagtgccaggaatgcaagaagaccatcatgccaggtacccgcaagatggagtacaagggcagcagctggcatgagacctgcttcatctgccaccgctgccagcagccaattggaaccaagagtttcatccccaaagacaatcagaatttctgtgtgccctgctatgagaaacaacatgccatgcagtgcgttcagtgcaaaaagcccatcaccacgggaggggtcacttaccgggagcagccctggcacaaggagtgcttcgtgtgcaccgcctgcaggaagcagctgtctgggcagcgcttcacagctcgcgatgactttgcctactgcctgaactgcttctgtgacttgtatgccaagaagtgtgctgggtgcaccaaccccatcagcggacttggtggcacaaaatacatctcctttgaggaacggcagtggcataacgactgctttaactgtaagaagtgctccctctcactggtggggcgtggcttcctcacagagagggacgacatcctgtgccccgactgtgggaaagacatctgaattcaacacagagaagttgctgcttgtgatctcacacacagatttttatgttttctttctcacccaggcaatcttgccttctggtttcttccagccacattgagactttcttctagtgcttttcagtgatactcacgtttgcttaaaccctttagtgctttgtgatagttcagtcccagggaaagagaaaactcgccctaggccctaggtgggaagatggtttgaaatttttgtaatcgagtaaggcacacccaaatgtaaaaatccttttgaatgatgcctttataaatctttctctcactgtctatttaagtgcaattaacatatgtcacgaacttgaaagttttctaaactcaataaggtaatgaccagttgttatttacagctctgtaacctcccgttgcgtcaagtctaaaccaagattatgtgacttgcaataaagttattcagaacagaa

SEQ ID NO: 438009 - DNA, 1588 bp, Homo sapiens
ggcacgaggagggtacgggccgggaccgccgcagcccggggcgggggcacggcaaccgcgaggcctgggggcgcccgccccccgcgccccacgcccggtgccagcgagccgaggcgtgcatctccttatatggtcaaatgacacggcggggtttctcgagggcgggagctgcgcagcgctccactcggccggcagcggagccgcagccaccagccgcccgcgccctccagccccgtccgggagtccccggcccgctgcggtgccgtgagtacctccaaccccctgcgccccggagggaggccgaggggcttagccaccagggctcggaagtgggggccgaatccggtgcgagacccaaggagaggggagcagagccggagttggggagactggttgctgaaaactgtgtcttcctggagactaggctggcattttgactttggggttgctgaaaagccaggagtcaaaatgactgagcgctttgactgccaccattgcaacgaatctctctttggcaagaagtacatcctgcgggaggagagcccctactgcgtggtgtgctttgagaccctgttcgccaacacctgcgaggagtgtgggaagcccatcggctgtgactgcagtacccgcaagatggagtacaagggcagcagctggcatgagacctgcttcatctgccaccgctgccagcagccaattggaaccaagagtttcatccccaaagacaatcagaatttctgtgtgccctgctatgagaaacaacatgccatgcagtgcgttcagtgcaaaaagcccatcaccacgggaggggtcacttaccgggagcagccctggcacaaggagtgcttcgtgtgcaccgcctgcaggaagcagctgtctgggcagcgcttcacagctcgcgatgactttgcctactgcctgaactgcttctgtgacttgtatgccaagaagtgtgctgggtgcaccaaccccatcagcggacttggtggcacaaaatacatctcctttgaggaacggcagtggcataacgactgctttaactgtaagaagtgctccctctcactggtggggcgtggcttcctcacagagagggacgacatcctgtgccccgactgtgggaaagacatctgaattcaacacagagaagttgctgcttgtgatctcacacacagatttttatgttttctttctcacccaggcaatcttgccttctggtttcttccagccacattgagactttcttctagtgcttttcagtgatactcacgtttgcttaaaccctttagtgctttgtgatagttcagtcccagggaaagagaaaactcgccctaggccctaggtgggaagatggtttgaaatttttgtaatcgagtaaggcacacccaaatgtaaaaatccttttgaatgatgcctttataaatctttctctcactgtctatttaagtgcaattaacatatgtcacgaacttgaaagttttctaaactcaataaggtaatgaccagttgttatttacagctctgtaacctcccgttgcgtcaagtctaaaccaagattatgtgacttgcaataaagttattcagaacagaa

SEQ ID NO: 438010 - DNA, 2226 bp, Homo sapiens
  misc_feature (1737)..(1737): n is a, c, g, or t
  misc_feature (1787)..(1787): n is a, c, g, or t
ggcacgaggagggtacgggccgggaccgccgcagcccggggcgggggcacggcaaccgcgaggcctgggggcgcccgccccccgcgccccacgcccggtgccagcgagccgaggcgtgcatctccttatatggtcaaatgacacggcggggtttctcgagggcgggagctgcgcagcgctccactcggccggcagcggagccgcagccaccagccgcccgcgccctccagccccgtccgggagtccccggcccgctgcggtgccgtgagtacctccaaccccctgcgccccggagggaggccgaggggcttagccaccagggctcggaagtgggggccgaatccggtgcgagacccaaggagaggggagcagagccggagttggggagactggttgctgaaaatgctgaaaagccaggagtcaaaatgactgagcgctttgactgccaccattgcaacgaatctctctttggcaagaagtacatcctgcgggaggagagcccctactgcgtggtgtgctttgagaccctgttcgccaacacctgcgaggagtgtgggaagcccatcggctgtgactgcaaggacttgtcttacaaggaccggcactggcatgaagcctgtttccactgctcgcagtgcagaaactcactggtggacaagccctttgctgccaaggaggaccagctgctctgtacagactgctattccaacgagtactcatccaagtgccaggaatgcaagaagaccatcatgccaggtacccgcaagatggagtacaagggcagcagctggcatgagacctgcttcatctgccaccgctgccagcagccaattggaaccaagagtttcatccccaaagacaatcagaatttctgtgtgccctgctatgagaaacaacatgccatgcagtgcgttcagtgcaaaaagcccatcaccacgggaggggtcacttaccgggagcagccctggcacaaggagtgcttcgtgtgcaccgcctgcaggaagcagctgtctgggcagcgcttcacagctcgcgatgactttgcctactgcctgaactgcttctgtgacttgtatgccaagaagtgtgctgggtgcaccaaccccatcagcggacttggtggcacaaaatacatctcctttgaggaacggcagtggcataacgactgctttaactgtaagaagtgctccctctcactggtggggcgtggcttcctcacagagagggacgacatcctgtgccccgactgtgggaaagacatctgaattcaacacagagaagttgctgcttgtgatctcacacacagatttttatgttttctttctcacccaggcaatcttgccttctggtttcttccagccacattgagactttcttctagtgcttttcagtgatactcacgtttgcttaaaccctttagtgctttgtgatagttcagtcccagggaaagagaaaactcgccctaggccctaggtgggaagatggtttgaaatttttgtaatcgagtaaggcacacccaaatgtaaaaatccttttgaatgatgcctttataaatctttctctcactgtctatttaagtgcaattaacatatgtcacgaacttgaaagttttctaaactcaataaggtaatgaccagttgttatttacagctctgtaacctcccgttgcgtcaagtctaaaccaagattatgtgacttgcaataaagttattcagaacagaaaaaaaaaaaaaaaanaaaaaaaaaaaaaaaaaaaaaaaaaaaaaaaaaaaaaaaaaaaaaaaaanaaaaaaaaaaaaaaaaaaaaaaaaaaaaaaaaaaaaaaaaaaaaaaaaaaaaaaaaaaaaaaataaggggggcggaggcgcgcggcgcgccacgaaaaaaaataataacaaaacacacctaggggggggcgggccgcgcggcggcagtagtagagaacagagctacgacaacaacgggtgatacgcaaagcacgacacgccgcggacgagccaagacaggcaggggggggctgacccgaccaacaaaaaaaaaagcggcggcggcggggaggagaagacaagcggagagtaaagaaaaacaaacacatacaagggaggacggtatcgccggacaacgagaggtggaagagagctacaaaagaggaggcaggaagaacgaagagggggagagagaaatcaaaaacagaatgatcacgccgcgccggggggtgagatgaat

SEQ ID NO: 438011 - DNA, 1746 bp, Homo sapiens
ggcacgaggagggtacgggccgggaccgccgcagcccggggcgggggcacggcaaccgcgaggcctgggggcgcccgccccccgcgccccacgcccggtgccagcgagccgaggcgtgcatctccttatatggtcaaatgacacggcggggtttctcgagggcgggagctgcgcagcgctccactcggccggcagcggagccgcagccaccagccgcccgcgccctccagccccgtccgggagtccccggcccgctgcggtgccgtgagtacctccaaccccctgcgccccggagggaggccgaggggcttagccaccagggctcggaagtgggggccgaatccggtgcgagacccaaggagaggggagcagagccggagttggggagactggttgctgaaaatgctgaaaagccaggagtcaaaatgactgagcgctttgactgccaccattgcaacgaatctctctttggcaagaagtacatcctgcgggaggagagcccctactgcgtggtgtgctttgagaccctgttcgccaacacctgcgaggagtgtgggaagcccatcggctgtgactgcaaggacttgtcttacaaggaccggcactggcatgaagcctgtttccactgctcgcagtgcagaaactcactggtggacaagccctttgctgccaaggaggaccagctgctctgtacagactgctattccaacgagtactcatccaagtgccaggaatgcaagaagaccatcatgccaggtacccgcaagatggagtacaagggcagcagctggcatgagacctgcttcatctgccaccgctgccagcagccaattggaaccaagagtttcatccccaaagacaatcagaatttctgtgtgccctgctatgagaaacaacatgccatgcagtgcgttcagtgcaaaaagcccatcaccacgggaggggtcacttaccgggagcagccctggcacaaggagtgcttcgtgtgcaccgcctgcaggaagcagctgtctgggcagcgcttcacagctcgcgatgactttgcctactgcctgaactgcttctgtgacttgtatgccaagaagtgtgctgggtgcaccaaccccatcagcggacttggtggcacaaaatacatctcctttgaggaacggcagtggcataacgactgctttaactgtaagaagtgctccctctcactggtggggcgtggcttcctcacagagagggacgacatcctgtgccccgactgtgggaaagacatctgaattcaacacagagaagttgctgcttgtgatctcacacacagatttttatgttttctttctcacccaggcaatcttgccttctggtttcttccagccacattgagactttcttctagtgcttttcagtgatactcacgtttgcttaaaccctttagtgctttgtgatagttcagtcccagggaaagagaaaactcgccctaggccctaggtgggaagatggtttgaaatttttgtaatcgagtaaggcacacccaaatgtaaaaatccttttgaatgatgcctttataaatctttctctcactgtctatttaagtgcaattaacatatgtcacgaacttgaaagttttctaaactcaataaggtaatgaccagttgttatttacagctctgtaacctcccgttgcgtcaagtctaaaccaagattatgtgacttgcaataaagttattcagaacagaaaacaaatgccaggcacagagtgtg

SEQ ID NO: 438012 - DNA, 639 bp, Homo sapiens
  misc_feature (36)..(36): n is a, c, g, or t
  misc_feature (62)..(62): n is a, c, g, or t
  misc_feature (65)..(66): n is a, c, g, or t
  misc_feature (89)..(89): n is a, c, g, or t
  misc_feature (100)..(100): n is a, c, g, or t
  misc_feature (111)..(111): n is a, c, g, or t
  misc_feature (113)..(113): n is a, c, g, or t
  misc_feature (118)..(118): n is a, c, g, or t
  misc_feature (120)..(120): n is a, c, g, or t
  misc_feature (122)..(123): n is a, c, g, or t
  misc_feature (131)..(132): n is a, c, g, or t
  misc_feature (134)..(134): n is a, c, g, or t
  misc_feature (136)..(136): n is a, c, g, or t
  misc_feature (142)..(142): n is a, c, g, or t
  misc_feature (146)..(146): n is a, c, g, or t
  misc_feature (149)..(149): n is a, c, g, or t
tgcacggccgaaggctcggtagtggcgttttaaagncgcccctcagaatgatggttttcttncgnngcattaagcaacgacgtagttancgtttccaccnagatggatatncntagananannttttctanntncnaactanttcntanatcctgtgccccgactgtgggaaagacatctgaattcaacacagagaagttgctgcttgtgatctcacacacagatttttatgttttctttctcacccaggcaatcttgccttctggtttcttccagccacattgagactttcttctagtgcttttcagtgatactcacgtttgcttaaaccctttagtgctttgtgatagttcagtcccagggaaagagaaaactcgccctaggccctaggtgggaagatggtttgaaatttttgtaatcgagtaaggcacacccaaatgtaaaaatccttttgaatgatgcctttataaatctttctctcactgtctatttaagtgcaattaacatatgtcacgaacttgaaagttttctaaactcaataaggtaatgaccagttgttatttacagctctgtaacctcccgttgcgtcaagtctaaaccaagattatgtgacttgcaataaagttattcagaacagaa

SEQ ID NO: 438013 - DNA, 1295 bp, Homo sapiens
  misc_feature (1115)..(1115): n is a, c, g, or t
  misc_feature (1127)..(1127): n is a, c, g, or t
ggcacgaggagggtacgggccgggaccgccgcagcccggggcgggggcacggcaaccgcgaggcctgggggcgcccgccccccgcgccccacgcccggtgccagcgagccgaggcgtgcatctccttatatggtcaaatgacacggcggggtttctcgagggcgggagctgcgcagcgctccactcggccggcagcggagccgcagccaccagccgcccgcgccctccagccccgtccgggagtccccggcccgctgcggtgccgtgagtacctccaaccccctgcgccccggagggaggccgaggggcttagccaccagggctcggaagtgggggccgaatccggtgcgagacccaaggagaggggagcagagccggagttggggagactggttgctgaaaatgctgaaaagccaggagtcaaaatgactgagcgctttgactgccaccattgcaacgaatctctctttggcaagaagtacatcctgcgggaggagagcccctactgcgtggtgtgctttgagaccctgttcgccaacacctgcgaggagtgtgggaagcccatcggctgtgactgcaaggacttgtcttacaaggaccggcactggcatgaagcctgtttccactgctcgcagtgcagaaactcactggtggacaagccctttgctgccaaggaggaccagctgctctgtacagactgctattccaacgagtactcatccaagtgccaggaatgcaagaagaccatcatgccaggtacccgcaagatggagtacaagggcagcagctggcatgagacctgcttcatctgccaccgctgccagcagccaattggaaccaagagtttcatccccaaagacaatcagaatttctgtgtgccctgctatgagaaacaacatgccatgcagtgcgttcagtgcaaaaagcccatcaccacgggaggggtcacttaccgggagcagccctggcacaaggagtgcttcgtgtgcaccgcctgcaggaagcagctgtctgggcagcgcttcacagctcgcgatgactttgcctactgcctgaactgcttctgtgacttgtatgccaagaagtgtgctgggtgcaccaaccccatcagcgantggggccaatanttcttgaggaaggggggtacgatggttcgtgaaatgccctcccggggggggggtctccaaaaggggtctcggccgtgggggactcttcccgattgctggcctcccttgtttctccgacgcgttccccggattgtggacctgccgtgtgcaccccggttgccatttttc

SEQ ID NO: 438014 - DNA, 1628 bp, Homo sapiens
ggcacgaggagggtacgggccgggaccgccgcagcccggggcgggggcacggcaaccgcgaggcctgggggcgcccgccccccgcgccccacgcccggtgccagcgagccgaggcgtgcatctccttatatggtcaaatgacacggcggggtttctcgagggcgggagctgcgcagcgctccactcggccggcagcggagccgcagccaccagccgcccgcgccctccagccccgtccgggagtccccggcccgctgcggtgccgtctgtgtcttcctggagactaggctggcattttgactttggggttgctgaaaagccaggagtcaaaatgactgagcgctttgactgccaccattgcaacgaatctctctttggcaagaagtacatcctgcgggaggagagcccctactgcgtggtgtgctttgagaccctgttcgccaacacctgcgaggagtgtgggaagcccatcggctgtgactgcaaggacttgtcttacaaggaccggcactggcatgaagcctgtttccactgctcgcagtgcagaaactcactggtggacaagccctttgctgccaaggaggaccagctgctctgtacagactgctattccaacgagtactcatccaagtgccaggaatgcaagaagaccatcatgccaggtacccgcaagatggagtacaagggcagcagctggcatgagacctgcttcatctgccaccgctgccagcagccaattggaaccaagagtttcatccccaaagacaatcagaatttctgtgtgccctgctatgagaaacaacatgccatgcagtgcgttcagtgcaaaaagcccatcaccacgggaggggtcacttaccgggagcagccctggcacaaggagtgcttcgtgtgcaccgcctgcaggaagcagctgtctgggcagcgcttcacagctcgcgatgactttgcctactgcctgaactgcttctgtgacttgtatgccaagaagtgtgctgggtgcaccaaccccatcagcggacttggtggcacaaaatacatctcctttgaggaacggcagtggcataacgactgctttaactgtaagaagtgctccctctcactggtggggcgtggcttcctcacagagagggacgacatcctgtgccccgactgtgggaaagacatctgaattcaacacagagaagttgctgcttgtgatctcacacacagatttttatgttttctttctcacccaggcaatcttgccttctggtttcttccagccacattgagactttcttctagtgcttttcagtgatactcacgtttgcttaaaccctttagtgctttgtgatagttcagtcccagggaaagagaaaactcgccctaggccctaggtgggaagatggtttgaaatttttgtaatcgagtaaggcacacccaaatgtaaaaatccttttgaatgatgcctttataaatctttctctcactgtctatttaagtgcaattaacatatgtcacgaacttgaaagttttctaaactcaataaggtaatgaccagttgttatttacagctctgtaacctcccgttgcgtcaagtctaaaccaagattatgtgacttgcaataaagttattcagaacagaa

SEQ ID NO: 438015 - DNA, 263 bp, Homo sapiens
gctgcacagaaggttggggccatccaaccaggcagtccgcctgcacagcagctgtccctgctcatcgggctggaggacagaagacagaaccctaaaaccacaggtaagggccactggttcccctgtgcccttctctcacccttgccatccttcccagcctgtctctgcagcagctctgtaggcatcttgttgcatgcagagggagtgtccagccctgggaggaagctctcaggcactgggagctcgctgaccccagcagagat

SEQ ID NO: 438016 - DNA, 1765 bp, Homo sapiens
ggcacgaggagggtacgggccgggaccgccgcagcccggggcgggggcacggcaaccgcgaggcctgggggcgcccgccccccgcgccccacgcccggtgccagcgagccgaggcgtgcatctccttatatggtcaaatgacacggcggggtttctcgagggcgggagctgcgcagcgctccactcggccggcagcggagccgcagccaccagccgcccgcgccctccagccccgtccgggagtccccggcccgctgcggtgccgtgagtacctccaaccccctgcgccccggagggaggccgaggggcttagccaccagggctcggaagtgggggccgaatccggtgcgagacccaaggagaggggagcagagccggagttggggagactggttgctgaaaactgtgtcttcctggagactaggctggcattttgactttggggttgctgaaaagccaggagtcaaaatgactgagcgctttgactgccaccattgcaacgaatctctctttggcaagaagtacatcctgcgggaggagagcccctactgcgtggtgtgctttgagaccctgttcgccaacacctgcgaggagtgtgggaagcccatcggctgtgactgcaaggacttgtcttacaaggaccggcactggcatgaagcctgtttccactgctcgcagtgcagaaactcactggtggacaagccctttgctgccaaggaggaccagctgctctgtacagactgctattccaacgagtactcatccaagtgccaggaatgcaagaagaccatcatgccaggtacccgcaagatggagtacaagggcagcagctggcatgagacctgcttcatctgccaccgctgccagcagccaattggaaccaagagtttcatccccaaagacaatcagaatttctgtgtgccctgctatgagaaacaacatgccatgcagtgcgttcagtgcaaaaagcccatcaccacgggaggggtcacttaccgggagcagccctggcacaaggagtgcttcgtgtgcaccgcctgcaggaagcagctgtctgggcagcgcttcacagctcgcgatgactttgcctactgcctgaactgcttctgtgacttgtatgccaagaagtgtgctgggtgcaccaaccccatcagcggacttggtggcacaaaatacatctcctttgaggaacggcagtggcataacgactgctttaactgtaagaagtgctccctctcactggtggggcgtggcttcctcacagagagggacgacatcctgtgccccgactgtgggaaagacatctgaattcaacacagagaagttgctgcttgtgatctcacacacagatttttatgttttctttctcacccaggcaatcttgccttctggtttcttccagccacattgagactttcttctagtgcttttcagtgatactcacgtttgcttaaaccctttagtgctttgtgatagttcagtcccagggaaagagaaaactcgccctaggccctaggtgggaagatggtttgaaatttttgtaatcgagtaaggcacacccaaatgtaaaaatccttttgaatgatgcctttataaatctttctctcactgtctatttaagtgcaattaacatatgtcacgaacttgaaagttttctaaactcaataaggtaatgaccagttgttatttacagctctgtaacctcccgttgcgtcaagtctaaaccaagattatgtgacttgcaataaagttattcagaacagaa

SEQ ID NO: 438017 - DNA, 1351 bp, Homo sapiens
gctgcacagaaggttggggccatccaaccaggcagtccgcctgcacagcagctgtccctgctcatcgggctggaggacagaagacagaaccctaaaaccacaggtaagtacatcctgcgggaggagagcccctactgcgtggtgtgctttgagaccctgttcgccaacacctgcgaggagtgtgggaagcccatcggctgtgactgcaaggacttgtcttacaaggaccggcactggcatgaagcctgtttccactgctcgcagtgcagaaactcactggtggacaagccctttgctgccaaggaggaccagctgctctgtacagactgctattccaacgagtactcatccaagtgccaggaatgcaagaagaccatcatgccaggtacccgcaagatggagtacaagggcagcagctggcatgagacctgcttcatctgccaccgctgccagcagccaattggaaccaagagtttcatccccaaagacaatcagaatttctgtgtgccctgctatgagaaacaacatgccatgcagtgcgttcagtgcaaaaagcccatcaccacgggaggggtcacttaccgggagcagccctggcacaaggagtgcttcgtgtgcaccgcctgcaggaagcagctgtctgggcagcgcttcacagctcgcgatgactttgcctactgcctgaactgcttctgtgacttgtatgccaagaagtgtgctgggtgcaccaaccccatcagcggacttggtggcacaaaatacatctcctttgaggaacggcagtggcataacgactgctttaactgtaagaagtgctccctctcactggtggggcgtggcttcctcacagagagggacgacatcctgtgccccgactgtgggaaagacatctgaattcaacacagagaagttgctgcttgtgatctcacacacagatttttatgttttctttctcacccaggcaatcttgccttctggtttcttccagccacattgagactttcttctagtgcttttcagtgatactcacgtttgcttaaaccctttagtgctttgtgatagttcagtcccagggaaagagaaaactcgccctaggccctaggtgggaagatggtttgaaatttttgtaatcgagtaaggcacacccaaatgtaaaaatccttttgaatgatgcctttataaatctttctctcactgtctatttaagtgcaattaacatatgtcacgaacttgaaagttttctaaactcaataaggtaatgaccagttgttatttacagctctgtaacctcccgttgcgtcaagtctaaaccaagattatgtgacttgcaataaagttattcagaacagaa

SEQ ID NO: 438018 - DNA, 1501 bp, Homo sapiens
gctgcacagaaggttggggccatccaaccaggcagtccgcctgcacagcagctgtccctgctcatcgggctggaggacagaagacagaaccctaaaaccacaggttgctgaaaagccaggagtcaaaatgactgagcgctttgactgccaccattgcaacgaatctctctttggcaagaagtacatcctgcgggaggagagcccctactgcgtggtgtgctttgagaccctgttcgccaacacctgcgaggagtgtgggaagcccatcggctgtgactgcaaggacaagcatgagagctcagccaccagactgcccagtccagcccaggctctgtgtctcacttgctgtgtgccttggaggacttgtcttacaaggaccggcactggcatgaagcctgtttccactgctcgcagtgcagaaactcactggtggacaagccctttgctgccaaggaggaccagctgctctgtacagactgctattccaacgagtactcatccaagtgccaggaatgcaagaagaccatcatgccaggtacccgcaagatggagtacaagggcagcagctggcatgagacctgcttcatctgccaccgctgccagcagccaattggaaccaagagtttcatccccaaagacaatcagaatttctgtgtgccctgctatgagaaacaacatgccatgcagtgcgttcagtgcaaaaagcccatcaccacgggaggggtcacttaccgggagcagccctggcacaaggagtgcttcgtgtgcaccgcctgcaggaagcagctgtctgggcagcgcttcacagctcgcgatgactttgcctactgcctgaactgcttctgtgacttgtatgccaagaagtgtgctgggtgcaccaaccccatcagcggacttggtggcacaaaatacatctcctttgaggaacggcagtggcataacgactgctttaactgtaagaagtgctccctctcactggtggggcgtggcttcctcacagagagggacgacatcctgtgccccgactgtgggaaagacatctgaattcaacacagagaagttgctgcttgtgatctcacacacagatttttatgttttctttctcacccaggcaatcttgccttctggtttcttccagccacattgagactttcttctagtgcttttcagtgatactcacgtttgcttaaaccctttagtgctttgtgatagttcagtcccagggaaagagaaaactcgccctaggccctaggtgggaagatggtttgaaatttttgtaatcgagtaaggcacacccaaatgtaaaaatccttttgaatgatgcctttataaatctttctctcactgtctatttaagtgcaattaacatatgtcacgaacttgaaagttttctaaactcaataaggtaatgaccagttgttatttacagctctgtaacctcccgttgcgtcaagtctaaaccaagattatgtgacttgcaataaagttattcagaacagaa

SEQ ID NO: 438019 - DNA, 2303 bp, Homo sapiens
  misc_feature (1737)..(1737): n is a, c, g, or t
  misc_feature (1787)..(1787): n is a, c, g, or t
ggcacgaggagggtacgggccgggaccgccgcagcccggggcgggggcacggcaaccgcgaggcctgggggcgcccgccccccgcgccccacgcccggtgccagcgagccgaggcgtgcatctccttatatggtcaaatgacacggcggggtttctcgagggcgggagctgcgcagcgctccactcggccggcagcggagccgcagccaccagccgcccgcgccctccagccccgtccgggagtccccggcccgctgcggtgccgtgagtacctccaaccccctgcgccccggagggaggccgaggggcttagccaccagggctcggaagtgggggccgaatccggtgcgagacccaaggagaggggagcagagccggagttggggagactggttgctgaaaatgctgaaaagccaggagtcaaaatgactgagcgctttgactgccaccattgcaacgaatctctctttggcaagaagtacatcctgcgggaggagagcccctactgcgtggtgtgctttgagaccctgttcgccaacacctgcgaggagtgtgggaagcccatcggctgtgactgcaaggacttgtcttacaaggaccggcactggcatgaagcctgtttccactgctcgcagtgcagaaactcactggtggacaagccctttgctgccaaggaggaccagctgctctgtacagactgctattccaacgagtactcatccaagtgccaggaatgcaagaagaccatcatgccaggtacccgcaagatggagtacaagggcagcagctggcatgagacctgcttcatctgccaccgctgccagcagccaattggaaccaagagtttcatccccaaagacaatcagaatttctgtgtgccctgctatgagaaacaacatgccatgcagtgcgttcagtgcaaaaagcccatcaccacgggaggggtcacttaccgggagcagccctggcacaaggagtgcttcgtgtgcaccgcctgcaggaagcagctgtctgggcagcgcttcacagctcgcgatgactttgcctactgcctgaactgcttctgtgacttgtatgccaagaagtgtgctgggtgcaccaaccccatcagcggacttggtggcacaaaatacatctcctttgaggaacggcagtggcataacgactgctttaactgtaagaagtgctccctctcactggtggggcgtggcttcctcacagagagggacgacatcctgtgccccgactgtgggaaagacatctgaattcaacacagagaagttgctgcttgtgatctcacacacagatttttatgttttctttctcacccaggcaatcttgccttctggtttcttccagccacattgagactttcttctagtgcttttcagtgatactcacgtttgcttaaaccctttagtgctttgtgatagttcagtcccagggaaagagaaaactcgccctaggccctaggtgggaagatggtttgaaatttttgtaatcgagtaaggcacacccaaatgtaaaaatccttttgaatgatgcctttataaatctttctctcactgtctatttaagtgcaattaacatatgtcacgaacttgaaagttttctaaactcaataaggtaatgaccagttgttatttacagctctgtaacctcccgttgcgtcaagtctaaaccaagattatgtgacttgcaataaagttattcagaacagaaaaaaaaaaaaaaaanaaaaaaaaaaaaaaaaaaaaaaaaaaaaaaaaaaaaaaaaaaaaaaaaanaaaaaaaaaagggggggggggggaaaaaaaaaaacacaccggagggggcgaacacagtcacacggcaccccgacacacatgttgatagtaggacaaagagggcgccacaatataacgaagcgcagcgcctctaatagtaaaacaccagaggcagcaggcgaccggagctatctataacaaagctgcgtcgatatgagagcaaaacaacaagactaaaggaaggaaatacattgtagaagagagcaaaccccacaaaccatcgggcgggggagcgcgcgcaacaacaaaagcggaggcaacaaaagcaccaccccgagacaaaagaagaaaacacgcaccagcgcaagcagagtaaaataacaaaaagacaaacagagcgcagcagcaagacgtgagagagccaaacacaacgagacacggcaagtacagacacgccacacaagcgaagcagaacaattagcgtgccacgaacaagacaagaacacaacgaacgagaacgacgaccacgacggggga

SEQ ID NO: 438020 - DNA, 1504 bp, Homo sapiens
ggcacgaggagggtacgggccgggaccgccgcagcccggggcgggggcacggcaaccgcgaggcctgggggcgcccgccccccgcgccccacgcccggtgccagcgagccgaggcgtgcatctccttatatggtcaaatgacacggcggggtttctcgagggcgggagctgcgcagcgctccactcggccggcagcggagccgcagccaccagccgcccgcgccctccagccccgtccgggagtccccggcccgctgcggtgccgtgagtacctccaaccccctgcgccccggagggaggccgaggggcttagccaccagggctcggaagtgggggccgaatccggtgcgagacccaaggagaggggagcagagccggagttggggagactggttgctgaaaatgctgaaaagccaggagtcaaaatgactgagcgctttgactgccaccattgcaacgaatctctctttggcaagaagtacatcctgcgggaggagagcccctactgcgtggtgtgctttgagaccctgttcgccaacacctgcgaggagtgtgggaagcccatcggctgtgactgcaaggacttgtcttacaaggaccggcactggcatgaagcctgtttccactgctcgcagtgcagaaactcactggtggacaagccctttgctgccaaggaggaccagctgctctgtacagactgctattccaacgagtactcatccaagtgccaggaatgcaagaagaccatcatgccaggtacccgcaagatggagtacaagggcagcagctggcatgagacctgcttcatctgccaccgctgccagcagccaattggaaccaagagtttcatccccaaagacaatcagaatttctgtgtgccctgctatgagaaacaacatgccatgcagtgcgttcagtgcaaaaagcccatcaccacgggaggggtcacttaccgggagcagccctggcacaaggagtgcttcgtgtgcaccgcctgcaggaagcagctgtctgggcagcgcttcacagctcgcgatgactttgcctactgcctgaactgcttctgtgacttgtatgccaagaagtgtgctgggtgcaccaaccccatcagcggacttggtggcacaaaatacatctcctttgaggaacggcagtggcataacgactgctttaactgtaagaagtgctccctctcactggtggggcgtggcttcctcacagagagggacgacatcctgtgccccgactgtgggaaagacatctgaattcaacacagagaagttgctgcttgtgatctcacacacagatttttatgttttctttctcacccaggcaatcttgccttctggtttcttccagccacattgagactttcttctagtgcttttcagtgatactcacgtttgcttaaaccctttagtgctttgtgatagttcagtcccagggaaagagaaaactcgccctaggccctaggtgggaaacatgcgaaccggtaccgagctgg

SEQ ID NO: 438021 - DNA, 988 bp, Homo sapiens
ttttttttttttaggaatgaaaggtcataagccattagaaatagtggcattattatgcaataacaacaccctagctaacctgcttttgtcatctgtagcacttacaataaagaatgatgaccttccaaccctggacactacctcgataaagcaaaccagagatcctctctacactttctatggaagccataaaagttgccatcaatatatccactttcatattctggctttgtccacaagggagcaataaagtacgttagctttattctcaaccttctaaagaaagatcccacttttaaatctcttctggaatagcctcttagctcaaagcttattcatgtattttgattatttaagaaattttcccttattacaaagtccagtcgtcgttcatccctcatgatgccaagcaatgattgatgtgtgggtgtggagtccttgtgggtcaggcatcttaattaattagactttttacatattgatgatccccagattgaaagccaggaccttcccataggggcgcctttgtgtgctaaaggcagagcaggcaggcttctccactcctatctcctccgcaggccaccaccatcacatctatagggaactgcagtgaggtggaactgagctccgctcctgaatctccaaaggagcccatgctgcccggcttccctgagtcattttttccagcatcctgtcagatccctcaatgtactgatttcccccttgtgttaactataccgatattatttttttagcaattgaaatgcacttttttatttcaactcaatcatgattttaagtataaaaaatttatagattgttaaaactacttttttgtgtatttttaaccactcaatgtagcattgtatattttattcttgtgagactctggtacaggtgtgccgcctaatgatttttctgagatgctgggcctttggatgtgtacggtaaccaacttaatgctaatgttcaaagtaaaaaaaaaaaa

SEQ ID NO: 438022 - DNA, 4449 bp, Homo sapiens
ttttttttttttaggaatgaaaggtcataagccattagaaatagtggcattattatgcaataacaacaccctagctaacctgcttttgtcatctgtagcacttacaataaagaatgatgaccttccaaccctggacactacctcgataaagcaaaccagagatcctctctacactttctatggaagccataaaagttgccatcaatatatccactttcatagttctatacttttatactttctagacttttttatagactttatgatcagatctttttgtctcagaggataggttttgcaagattcaaaggaaaatcaaactccttggttgttccagctttgaagcttttgcttcagtaaatttgtttaaagaaccagatcacataccatttatcaaattctttacttaagtcagaatactttgcagacatacatatttggaaaacaaactgtttcttgttcactagatagaatctgtattgtagtaagaaactacttacaaggtggctttctttctgctttgttactctatgtattactcaataatatatgtatggtcacaggttcctggagttgttttatttctttatgacagacacatgagtatgcacctctctctaatcctctgatgtcactgcagcttcagtctctctcactctgtttttgagtgccttcaaaatgccagcatcctggaacattcttttcctgatctaaatcctacctctgactatttcattatccatgaatattggaattcacccatattccaatgggcttaactctacaaactagctaaaaccttggacaagaattttgaccgtatttctgttttgttcctccatgtcatttttaggttatatttttaacttttatttatatcttatttcttcacatatttcgtctctctgttgaaagattttatccttatttgactcttcactttttttactttcaccagaaatttgacgttcctttaaaattaaaggtcattgaatgtcttttgaacacctttttctcaactgaagtcttcctgaatgcctcccctttctgatgaaaggatcctgagtgctgctgttgctctgccctgttcccatgtgcccactcccttccgtacacattttgcaagactatactctttattttagtcaaattaatttaaaattgctccctgggtttctgctctctcatggccctgtccctcaaaaacttctgtttactttttctagctgttttcatctaatttgtttaaaatgtatgatggatccataatatatgaaggatgtaatgaaaaggaggttgcagtgttttatataatatgatcgagcacctccgtgatgaaacatttagcaattggctagtccttcacagccagagtggaagtttgtgctgtggacaggtctttttactcccttccagttctcctccaaaactggagaaaaaggaaaaaacaaaaagaactctttcaaatgaggagatttgattgcatttttttaggtgaatgaaagcttggagttgagcatttgggccttagtcagcatttttcctttctgacttaaaatctcatgtccttttccttaaagttaatagtactcaggtttttaagactaataaccacacaaggtgggtatctaagaaggcagctgttaatacattctccatctttcctgtctggcaacaggaaagatattattggtgagatagtgcaaaattgtgagaattggttatgtttgatgatgaataaattcaagatttttgaaggcttcactgctatttgggatgggaaggtgagtttacaaaatgaaaaaggtagatttttatgttacagaaatcagtaacgggtttcttgttgtgttaattacctttcacttgatttgccatgatgtttcttcctcattattgatctagaagtttgcctcttggatagtaactagtaacttagtatctactttaaaatttgtggcttttctcttcagggtcccaggccataaaacaacggagagctgtacttgcttgtcacttggaggaaccacatccttgagacagcctgctgtcttgtatgtcttcagtaggaaacttctgacacacacattcaagggagttcctgcccctgagaagtgttcccatagctttccagtcgcaggttactttcacactacgtcagcttctctggtgagatcagggatgttacatattacttgaaaatgatttcataggaagtgaggatggggcaagaaaggaggtagaagctgaattttgcttaacttcagaaggaaatctgatacttgccttggctagttctgatcaactaaagagcctgtgtctgtactggatgtgccaaagagtcaagttgtttctggaatatccagctcctctgaatgaacacagcttcctccctacctgtcttttatgggtgaaaagggaccgtctgatgagcatgatagacatcctgtacaggactcaagactgtttcattgcatttgaaagttggtgggaagtattttattctgctagagctcctaaccctcctagaaatatcttttcatgctctattaattcaattcattagtttaaaaagaaacagtgtgacataattttggtgtttacttcttaagttgtctccccaagggcatatatgtagcctctgaaaatgggatgatttcttctcaatcttccataaatttgaatatgcattttattcatttcttgacatgggctgtgtgactgttttccatcagcagttctggctttgtccacaagggagcaataaagtacgttagctttattctcaaccttctaaagaaagatcccacttttaaatctcttctggaatagcctcttagctcaaagcttattcatgtattttgattatttaagaaattttcccttattacaaagtccagtcgtcgttcatccctcatgatgccaagcaatgattgatgtgtgggtgtggagtccttgtgggtcaggcatcttaattaattagactttttacatattgatgatccccagattgaaagccaggaccttcccataggggcgcctttgtgtgctaaaggcagagcaggcaggcttctccactcctatctcctccgcaggccaccaccatcacatctataggaggaacaagagcactgggggaactctggagtatgagtaaggaaatgcttctcaccttctctgctccaaagagatatctgttacatcagggaacaagtcctctaggtcaggcacttcctcctgaccagtgcaacgggcactccaggttagaaactgtgtgtgctccctctctgtcagttacttgtctaagggctcctatccgtggtcatcagctctctggccatgagttctgtttgtgcttattgcagcagcatcttcacaacaaacaggtcagtaatcaacctgggaagggaaaagacgacagtaaatattaccccctgtagagccgggaggcatttacacctggaatggccttcttaactgatttctgcctggccacctcacccccagccaagtctgaacctgagcaataccaggcacagagaggtgtctacttgtaactccaacacttgacaaaaaacaaaactgaagctgtgattggtttaggcagcaagtggccaggtgcaacttgtttgtttttatttttgttttccccaacagtactgagatcacttgcacttttcctcatttcttaagaaaatccagtttgcttgccatgacttgtttagcgttaggtttacaaagcttgttgttgaatgttgaatatttgtccaaaggagtttgacaaaatagaagctgcttggtccctgttctgcctgctaggtcataaggatgaaggccatgtggctggggtacttatgtcaagtccagaatggggcagtgtccctctcctacctctctgcggagacgcaattgaaggtcaagtagactcagtgtagggcaggcagctgtcatgctgcaaagaagtttagaggagtctttgggttggggaggtgacaggtaggtaggacaggatctcttaagatgggaaagatactggggagaggagggctgcttggccccagggaactgcagtgaggtggaactgagctccgctcctgaatctccaaaggagcccatgctgcccggcttccctgagtcattttttccagcatcctgtcagatccctcaatgtactgatttcccccttgtgttaactataccgatattatttttttagcaattgaaatgcacttttttatttcaactcaatcatgattttaagtataaaaaatttatagattgttaaaactacttttttgtgtatttttaaccactcaatgtagcattgtatattttattcttgtgagactctggtacaggtgtgccgcctaatgatttttctgagatgctgggcctttggatgtgtacggtaaccaacttaatgctaatgttcaaagtaaaaaaaaaaaa

SEQ ID NO: 438023 - DNA, 3548 bp, Homo sapiens
  misc_feature (23)..(23): n is a, c, g, or t
  misc_feature (60)..(60): n is a, c, g, or t
tacccgggggtttttttttaacncccccttttttttaaaaaaaaaaattttaaaaaaaangggggtttcccaatttttggaaaaatggttccttttttgaaaccaccctttttctcaactgaagtcttcctgaatgcctcccctttctgatgaaaggatcctgagtgctgctgttgctctgccctgttcccatgtgcccactcccttccgtacacattttgcaagactatactctttattttagtcaaattaatttaaaattgctccctgggtttctgctctctcatggccctgtccctcaaaaacttctgtttactttttctagctgttttcatctaatttgtttaaaatgtatgatggatccataatatatgaaggatgtaatgaaaaggaggttgcagtgttttatataatatgatcgagcacctccgtgatgaaacatttagcaattggctagtccttcacagccagagtggaagtttgtgctgtggacaggtctttttactcccttccagttctcctccaaaactggagaaaaaggaaaaaacaaaaagaactctttcaaatgaggagatttgattgcatttttttaggtgaatgaaagcttggagttgagcatttgggccttagtcagcatttttcctttctgacttaaaatctcatgtccttttccttaaagttaatagtactcaggtttttaagactaataaccacacaaggtgggtatctaagaaggcagctgttaatacattctccatctttcctgtctggcaacaggaaagatattattggtgagatagtgcaaaattgtgagaattggttatgtttgatgatgaataaattcaagatttttgaaggcttcactgctatttgggatgggaaggtgagtttacaaaatgaaaaaggtagatttttatgttacagaaatcagtaacgggtttcttgttgtgttaattacctttcacttgatttgccatgatgtttcttcctcattattgatctagaagtttgcctcttggatagtaactagtaacttagtatctactttaaaatttgtggcttttctcttcagggtcccaggccataaaacaacggagagctgtacttgcttgtcacttggaggaaccacatccttgagacagcctgctgtcttgtatgtcttcagtaggaaacttctgacacacacattcaagggagttcctgcccctgagaagtgttcccatagctttccagtcgcaggttactttcacactacgtcagcttctctggtgagatcagggatgttacatattacttgaaaatgatttcataggaagtgaggatggggcaagaaaggaggtagaagctgaattttgcttaacttcagaaggaaatctgatacttgccttggctagttctgatcaactaaagagcctgtgtctgtactggatgtgccaaagagtcaagttgtttctggaatatccagctcctctgaatgaacacagcttcctccctacctgtcttttatgggtgaaaagggaccgtctgatgagcatgatagacatcctgtacaggactcaagactgtttcattgcatttgaaagttggtgggaagtattttattctgctagagctcctaaccctcctagaaatatcttttcatgctctattaattcaattcattagtttaaaaagaaacagtgtgacataattttggtgtttacttcttaagttgtctccccaagggcatatatgtagcctctgaaaatgggatgatttcttctcaatcttccataaatttgaatatgcattttattcatttcttgacatgggctgtgtgactgttttccatcagcagttctggctttgtccacaagggagcaataaagtacgttagctttattctcaaccttctaaagaaagatcccacttttaaatctcttctggaatagcctcttagctcaaagcttattcatgtattttgattatttaagaaattttcccttattacaaagtccagtcgtcgttcatccctcatgatgccaagcaatgattgatgtgtgggtgtggagtccttgtgggtcaggcatcttaattaattagactttttacatattgatgatccccagattgaaagccaggaccttcccataggggcgcctttgtgtgctaaaggcagagcaggcaggcttctccactcctatctcctccgcaggccaccaccatcacatctataggaggaacaagagcactgggggaactctggagtatgagtaaggaaatgcttctcaccttctctgctccaaagagatatctgttacatcagggaacaagtcctctaggtcaggcacttcctcctgaccagtgcaacgggcactccaggttagaaactgtgtgtgctccctctctgtcagttacttgtctaagggctcctatccgtggtcatcagctctctggccatgagttctgtttgtgcttattgcagcagcatcttcacaacaaacaggtcagtaatcaacctgggaagggaaaagacgacagtaaatattaccccctgtagagccgggaggcatttacacctggaatggccttcttaactgatttctgcctggccacctcacccccagccaagtctgaacctgagcaataccaggcacagagaggtgtctacttgtaactccaacacttgacaaaaaacaaaactgaagctgtgattggtttaggcagcaagtggccaggtgcaacttgtttgtttttatttttgttttccccaacagtactgagatcacttgcacttttcctcatttcttaagaaaatccagtttgcttgccatgacttgtttagcgttaggtttacaaagcttgttgttgaatgttgaatatttgtccaaaggagtttgacaaaatagaagctgcttggtccctgttctgcctgctaggtcataaggatgaaggccatgtggctggggtacttatgtcaagtccagaatggggcagtgtccctctcctacctctctgcggagacgcaattgaaggtcaagtagactcagtgtagggcaggcagctgtcatgctgcaaagaagtttagaggagtctttgggttggggaggtgacaggtaggtaggacaggatctcttaagatgggaaagatactggggagaggagggctgcttggccccagggaactgcagtgaggtggaactgagctccgctcctgaatctccaaaggagcccatgctgcccggcttccctgagtcattttttccagcatcctgtcagatccctcaatgtactgatttcccccttgtgttaactataccgatattatttttttagcaattgaaatgcacttttttatttcaactcaatcatgattttaagtataaaaaatttatagattgttaaaactacttttttgtgtatttttaaccactcaatgtagcattgtatattttattcttgtgagactctggtacaggtgtgccgcctaatgatttttctgagatgctgggcctttggatgtgtacggtaaccaacttaatgctaatgttcaaagtaaaaaaaaaaaa

SEQ ID NO: 438024 - DNA, 4256 bp, Homo sapiens
ttttttttttttaggaatgaaaggtcataagccattagaaatagtggcattattatgcaataacaacaccctagctaacctgcttttgtcatctgtagcacttacaataaagaatgatgaccttccaaccctggacactacctcgataaagcaaaccagagatcctctctacactttctatggaagccataaaagttgccatcaatatatccactttcatagttctatacttttatactttctagacttttttatagactttatgatcagatctttttgtctcagaggataggttttgcaagattcaaaggaaaatcaaactccttggttgttccagctttgaagcttttgcttcagtaaatttgtttaaagaaccagatcacataccatttatcaaattctttacttaagtcagaatactttgcagacatacatatttggaaaacaaactgtttcttgttcactagatagaatctgtattgtagtaagaaactacttacaaggtggctttctttctgctttgttactctatgtattactcaataatatatgtatggtcacaggttcctggagttgttttatttctttatgacagacacatgagtatgcacctctctctaatcctctgatgtcactgcagcttcagtctctctcactctgtttttgagtgccttcaaaatgccagcatcctggaacattcttttcctgatctaaatcctacctctgactatttcattatccatgaatattggaattcacccatattccaatgggcttaactctacaaactagctaaaaccttggacaagaattttgaccgtatttctgttttgttcctccatgtcatttttaggttatatttttaacttttatttatatcttatttcttcacatatttcgtctctctgttgaaagattttatccttatttgactcttcactttttttactttcaccagaaatttgacgttcctttaaaattaaaggtcattgaatgtcttttgaacacctttttctcaactgaagtcttcctgaatgcctcccctttctgatgaaaggatcctgagtgctgctgttgctctgccctgttcccatgtgcccactcccttccgtacacattttgcaagactatactctttattttagtcaaattaatttaaaattgctccctgggtttctgctctctcatggccctgtccctcaaaaacttctgtttactttttctagctgttttcatctaatttgtttaaaatgtatgatggatccataatatatgaaggatgtaatgaaaaggaggttgcagtgttttatataatatgatcgagcacctccgtgatgaaacatttagcaattggctagtccttcacagccagagtggaagtttgtgctgtggacaggtctttttactcccttccagttctcctccaaaactggagaaaaaggaaaaaacaaaaagaactctttcaaatgaggagatttgattgcatttttttaggtgaatgaaagcttggagttgagcatttgggccttagtcagcatttttcctttctgacttaaaatctcatgtccttttccttaaagttaatagtactcaggtttttaagactaataaccacacaaggtgggtatctaagaaggcagctgttaatacattctccatctttcctgtctggcaacaggaaagatattattggtgagatagtgcaaaattgtgagaattggttatgtttgatgatgaataaattcaagatttttgaaggcttcactgctatttgggatgggaaggtgagtttacaaaatgaaaaaggtagatttttatgttacagaaatcagtaacgggtttcttgttgtgttaattacctttcacttgatttgccatgatgtttcttcctcattattgatctagaagtttgcctcttggatagtaactagtaacttagtatctactttaaaatttgtggcttttctcttcagggtcccaggccataaaacaacggagagctgtacttgcttgtcacttggaggaaccacatccttgagacagcctgctgtcttgtatgtcttcagtaggaaacttctgacacacacattcaagggagttcctgcccctgagaagtgttcccatagctttccagtcgcaggttactttcacactacgtcagcttctctggtgagatcagggatgttacatattacttgaaaatgatttcataggaagtgaggatggggcaagaaaggaggtagaagctgaattttgcttaacttcagaaggaaatctgatacttgccttggctagttctgatcaactaaagagcctgtgtctgtactggatgtgccaaagagtcaagttgtttctggaatatccagctcctctgaatgaacacagcttcctccctacctgtcttttatgggtgaaaagggaccgtctgatgagcatgatagacatcctgtacaggactcaagactgtttcattgcatttgaaagttggtgggaagtattttattctgctagagctcctaaccctcctagaaatatcttttcatgctctattaattcaattcattagtttaaaaagaaacagtgtgacataattttggtgtttacttcttaagttgtctccccaagggcatatatgtagcctctgaaaatgggatgatttcttctcaatcttccataaatttgaatatgcattttattcatttcttgacatgggctgtgtgactgttttccatcagcagttctggctttgtccacaagggagcaataaagtacgttagctttattctcaaccttctaaagaaagatcccacttttaaatctcttctggaatagcctcttagctcaaagcttattcatgtattttgattatttaagaaattttcccttattacaaagtccagtcgtcgttcatccctcatgatgccaagcaatgattgatgtgtgggtgtggagtccttgtgggtcaggcatcttaattaattagactttttacatattgatgatccccagattgaaagccaggaccttcccataggggcgcctttgtgtgctaaaggcagagcaggcaggcttctccactcctatctcctccgcaggccaccaccatcacatctataggaggaacaagagcactgggggaactctggagtatgagtaaggaaatgcttctcaccttctctgctccaaagagatatctgttacatcagggaacaagtcctctaggtcaggcacttcctcctgaccagtgcaacgggcactccaggttagaaactgtgtgtgctccctctctgtcagttacttgtctaagggctcctatccgtggtcatcagctctctggccatgagttctgtttgtgcttattgcagcagcatcttcacaacaaacaggtcagtaatcaacctgggaagggaaaagacgacagtaaatattaccccctgtagagccgggaggcatttacacctggaatggccttcttaactgatttctgcctggccacctcacccccagccaagtctgaacctgagcaataccaggcacagagaggtgtctacttgtaactccaacacttgacaaaaaacaaaactgaagctgtgattggtttaggcagcaagtggccaggtgcaacttgtttgtttttatttttgttttccccaacagtactgagatcacttgcacttttcctcatttcttaagaaaatccagtttgcttgccatgacttgtttagcgttaggtttacaaagcttgttgttgaatgttgaatatttgtccaaaggagtttgacaaaatagaagctgcttggtccctgttctgcctgctaggtcataaggatgaaggccatgtggctggggtacttatgtcaagtccagaatggggcagtgtccctctcctacctctctgcggagacgcaattgaaggtcaagtagactcagtgtagggcaggcagctgtcatgctgcaaagaagtttagaggagtctttgggttggggaggtgacaggtaggtaggacaggatctcttaagatgggaaagatactggggagaggagggctgcttggccccagggaactgcagtgaggtggaactgagctccgctcctgaatctccaaaggagcccatgctgcccggcttccctgagtcattttttccagcatcctgtcagatccctaacccaaagactcctctaaacttctttgcaacatgacagctgcctgccctacactgagtctacttgaccttcaattgcgtctccgtcgacg

SEQ ID NO: 438025 - DNA, 3505 bp, Homo sapiens
ttttttttttttaggaatgaaaggtcataagccattagaaatagtggcattattatgcaataacaacaccctagctaacctgcttttgtcatctgtagcacttacaataaagaatgatgaccttccaaccctggacactacctcgataaagcaaaccagagatcctctctacactttctatggaagccataaaagttgccatcaatatatccactttcatagttctatacttttatactttctagacttttttatagactttatgatcagatctttttgtctcagaggataggttttgcaagattcaaaggaaaatcaaactccttggttgttccagctttgaagcttttgcttcagtaaatttgtttaaagaaccagatcacataccatttatcaaattctttacttaagtcagaatactttgcagacatacatatttggaaaacaaactgtttcttgttcactagatagaatctgtattgtagtaagaaactacttacaaggtggctttctttctgctttgttactctatgtattactcaataatatatgtatggtcacaggttcctggagttgttttatttctttatgacagacacatgagtatgcacctctctctaatcctctgatgtcactgcagcttcagtctctctcactctgtttttgagtgccttcaaaatgccagcatcctggaacattcttttcctgatctaaatcctacctctgactatttcattatccatgaatattggaattcacccatattccaatgggcttaactctacaaactagctaaaaccttggacaagaattttgaccgtatttctgttttgttcctccatgtcatttttaggttatatttttaacttttatttatatcttatttcttcacatatttcgtctctctgttgaaagattttatccttatttgactcttcactttttttactttcaccagaaatttgacgttcctttaaaattaaaggtcattgaatgtcttttgaacacctttttctcaactgaagtcttcctgaatgcctcccctttctgatgaaaggatcctgagtgctgctgttgctctgccctgttcccatgtgcccactcccttccgtacacattttgcaagactatactctttattttagtcaaattaatttaaaattgctccctgggtttctgctctctcatggccctgtccctcaaaaacttctgtttactttttctagctgttttcatctaatttgtttaaaatgtatgatggatccataatatatgaaggatgtaatgaaaaggaggttgcagtgttttatataatatgatcgagcacctccgtgatgaaacatttagcaattggctagtccttcacagccagagtggaagtttgtgctgtggacaggtctttttactcccttccagttctcctccaaaactggagaaaaaggaaaaaacaaaaagaactctttcaaatgaggagatttgattgcatttttttaggtgaatgaaagcttggagttgagcatttgggccttagtcagcatttttcctttctgacttaaaatctcatgtccttttccttaaagttaatagtactcaggtttttaagactaataaccacacaaggtgggtatctaagaaggcagctgttaatacattctccatctttcctgtctggcaacaggaaagatattattggtgagatagtgcaaaattgtgagaattggttatgtttgatgatgaataaattcaagatttttgaaggcttcactgctatttgggatgggaaggtgagtttacaaaatgaaaaaggtagatttttatgttacagaaatcagtaacgggtttcttgttgtgttaattacctttcacttgatttgccatgatgtttcttcctcattattgatctagaagtttgcctcttggatagtaactagtaacttagtatctactttaaaatttgtggcttttctcttcagggtcccaggccataaaacaacggagagctgtacttgcttgtcacttggaggaaccacatccttgagacagcctgctgtcttgtatgtcttcagtaggaaacttctgacacacacattcaagggagttcctgcccctgagaagtgttcccatagctttccagtcgcaggttactttcacactacgtcagcttctctggtgagatcagggatgttacatattacttgaaaatgatttcataggaagtgaggatggggcaagaaaggaggtagaagctgaattttgcttaacttcagaaggaaatctgatacttgccttggctagttctgatcaactaaagagcctgtgtctgtactggatgtgccaaagagtcaagttgtttctggaatatccagctcctctgaatgaacacagcttcctccctacctgtcttttatgggtgaaaagggaccgtctgatgagcatgatagacatcctgtacaggactcaagactgtttcattgcatttgaaagttggtgggaagtattttattctgctagagctcctaaccctcctagaaatatcttttcatgctctattaattcaattcattagtttaaaaagaaacagtgtgacataattttggtgtttacttcttaagttgtctccccaagggcatatatgtagcctctgaaaatgggatgatttcttctcaatcttccataaatttgaatatgcattttattcatttcttgacatgggctgtgtgactgttttccatcagcagttctggctttgtccacaagggagcaataaagtacgttagctttattctcaaccttctaaagaaagatcccacttttaaatctcttctggaatagcctcttagctcaaagcttattcatgtattttgattatttaagaaattttcccttattacaaagtccagtcgtcgttcatccctcatgatgccaagcaatgattgatgtgtgggtgtggagtccttgtgggtcaggcatcttaattaattagactttttacatattgatgatccccagattgaaagccaggaccttcccataggggcgcctttgtgtgctaaaggcagagcaggcaggcttctccactcctatctcctccgcaggccaccaccatcacatctatagggaactgcagtgaggtggaactgagctccgctcctgaatctccaaaggagcccatgctgcccggcttccctgagtcattttttccagcatcctgtcagatccctcaatgtactgatttcccccttgtgttaactataccgatattatttttttagcaattgaaatgcacttttttatttcaactcaatcatgattttaagtataaaaaatttatagattgttaaaactacttttttgtgtatttttaaccactcaatgtagcattgtatattttattcttgtgagactctggtacaggtgtgccgcctaatgatttttctgagatgctgggcctttggatgtgtacggtaaccaacttaatgctaatgttcaaagtaaaaaaaaaaaa

SEQ ID NO: 438026 - DNA, 3569 bp, Homo sapiens
gttcggtcgaagccctccccttaattatgtgcaattcaagtccccactgcccgcccgcaagcccccactcatcctcgctgcgggcagggtggcccctgcactttacaagggggtgcaggagcgggagacggtcgtccgaacaccggctccccggcatgcgtagaccggcgggcggagcgggctcactttgcgccaatcctacgagaactcccagaactccgcttccctagtccaacccaagccagagttgcccacacctaagatggcggcggggggcggaccccgccccgcccggtccagccagctcggcccgggggcttcgggctgtcgggccggcgctcccttctctgccaggtggcgagtacacctgctcacgtaggcgtcatgaggtctccggttcgagacctggcccggaacgatggcgaggagagcacggaccgcacgcctcttctaccgggcgccccacgggccgaagccgctccagtgtgctgctctgctcgttacaacttagcaattttggccttttttggtttcttcattgtgtatgcattacgtgtgaatctgagtgttgcgttagtggatatggtagattcaaatacaactttagaagataatagaacttccaaggcgtgtccagagcattctgctcccataaaagttcatcataatcaaacgggtaagaagtaccaatgggatgcagaaactcaaggatggattctcggttcctttttttatggctacatcatcacacagattcctggaggatatgttgccagcaaaataggggggaaaatgctgctaggatttgggatccttggcactgctgtcctcaccctgttcactcccattgctgcagatttaggagttggaccactcattgtactcagagcactagaaggactaggagagggtgttacatttccagccatgcatgccatgtggtcttcttgggctccccctcttgaaagaagcaaacttcttagcatttcatatgcaggagcacagcttgggacagtaatttctcttcctctttctggaataatttgctactatatgaattggacttatgtcttctacttttttggtactattggaatattttggtttcttttgtggatctggttagttagtgacacaccacaaaaacacaagagaatttcccattatgaaaaggaatacattctttcatcattaagaaatcagctttcttcacagaagtcagtgccgtgggtacccattttaaaatccctgccactttgggctatcgtagttgcacacttttcttacaactggactttttatactttattgacattattgcctacttatatgaaggagatcctaaggttcaatgttcaagagaatgggtttttatcttcattgccttatttaggctcttggttatgtatgatcctgtctggtcaagctgctgacaatttaagggcaaaatggaatttttcaactttatgtgttcgcagaatttttagccttataggaatgattggacctgcagtattcctggtagctgctggcttcattggctgtgattattctttggccgttgctttcctaactatatcaacaacactgggaggcttttgctcttctggatttagcatcaaccatctggatattgctccttcgtatgctggtatcctcctgggcatcacaaatacatttgccactattccaggaatggttgggcccgtcattgctaaaagtctgacccctgataacactgttggagaatggcaaaccgtgttctatattgctgctgctattaatgtttttggtgccattttctttacactattcgccaaaggtgaagtacaaaactgggctctcaatgatcaccatggacacagacactgaaggaaccaataaataatcctgcctctattaatgtatttttatttatcatgtaacctcaaagtgccttctgtattgtgtaagcattctatgtctttttttaattgtacttgtattagatttttaaggcctataatcatgaaatatcactagttgccagaataataaaatgaactgtgtttaattatgaataatatgtaagctaggacttctactttaggttcacatacctgcctgctagtcgggcaacatgaagtaggacagttctgttgattttttagggccatactaaagggaatgagctgaaacagacctcctgatacctttgcttaattaaactagatgataattctcaggtactgataaacacctgttgttgttcactttcctcataaaaattgtcagctctctctgacacttagacctcaaactttagcatctctgtggagctgccatccactgtataatttcgcctggcaactggactgaggggagtgtgcccaggcagctgccaagcactccctccctggcttcagggtcagagtgcccagcgtttatcagaggcagcatccaagcccagagccagtgtcgactcttcggctggtgcctttcctctgaggggctatcaatgtgtagataaagccctgagtaggcaagagcagtgagatccactgctatggtcttgatacatcctcaaactttcccttcccagcacagaggaatattggctggcatgcaacctgcaaaagaaaaatgcgaagcggccgggcacggtggctcatgcctgtaatcccagcactttggggggctgaggtgggcgaatcatgagatcaggagttcgagaccagcctggccagcatggtgaaaccccatctctactaaaaatacaaaaaattagctgggcgtggtgacgggcgcctgtaatcccagatactcaggaggctgaggtaggagaatcacttgaacctgggaggtggaagttgcagtgaaccaagatcacgccactgcactccagcctgggcgatggagcgagactccaactcaaaaaaaaaaaagaataaagaaagaaaagtgcgatgcccagtcaatcacaaataagatcatcctggtttaaatctactctcacatggatcacagtataaatttctatgtgctgtgttttgttcgtttgtattttgtagagatggggtctcgttttgtcgcccaggctggttttgaactcctggcttcaagcgatcctcctgtctcggcctcacaaagtgttgagactacaggcatgagccactgtgcccagcctgttctatgtttttaagctacacgagaattttttttttaattaattctcactgtttgttcagtctgtcttcatctaagtttgtgttgcagtttaaagttaaagtgacttttaaaggccacatcacctgagactagggtaatcatctttacttctggttcctgaaatcatatttttccagtggaccatcctccagtggctgtggttgttgagcatgctttcagaacacctatgtggcttaaaacttagtttatgttttgtgttcaacactacgtgtaatattttaaaactgtttaatgtgatgtgaatacatttatgtacatttatttttaaatttgtaaatagctttaaattgctatggcaatgtttcttttataaatcatcaaaataaacctttgtgaattga

SEQ ID NO: 438027 - DNA, 2760 bp, Homo sapiens
gttcccacctatatcacaacactgggaggcttttctcttctggatttaccatcaaccatctggatattgctccttcgtgagtactaatataaagattgctgtgattgactttaaattatattttttaaaaatcctgataaaagccagagcggtgactcacacctgtaatcccagcactttgggagccaaggcaggcagataacctgaggtcaggagtttgagaccagcctcctaacgtgctgggattacaggtgtgagctgccacacccaggcaagatggagtattattctaacctcatccaacagagtttattattcagtttatctcctttggttatatgtattttaaaccacattctgtgtcagctattgcttctctctagaaacatatttttaagttgttcttgtcttgttcttctctaacaccatggaattttagctgagttttggccacatgtagatttaataacattgcataatgagattttccttttatagtatattagttgtattacgcccatgttttccagcattttttttttctcatgaaatttgttagtcttccaggcaatatagtgtttctacagtaggtggcagcaatttcaaatttcagatttataccatattaaggtagagcaaatattaatgctgggtgttttttcccttttataactttttaactccaggaatgattggacctgcagtattcctggtagctgctggcttcattggctgtgattattctttggccgttgctttcctaactatatcaacaacactgggaggcttttgctcttctggatttagcatcaaccatctggatattgctccttcgtatgctggtatcctcctgggcatcacaaatacatttgccactattccaggaatggttgggcccgtcattgctaaaagtctgacccctgataacactgttggagaatggcaaaccgtgttctatattgctgctgctattaatgtttttggtgccattttctttacactattcgccaaaggtgaagtacaaaactgggctctcaatgatcaccatggacacagacactgaaggaaccaataaataatcctgcctctattaatgtatttttatttatcatgtaacctcaaagtgccttctgtattgtgtaagcattctatgtctttttttaattgtacttgtattagatttttaaggcctataatcatgaaatatcactagttgccagaataataaaatgaactgtgtttaattatgaataatatgtaagctaggacttctactttaggttcacatacctgcctgctagtcgggcaacatgaagtaggacagttctgttgattttttagggccatactaaagggaatgagctgaaacagacctcctgatacctttgcttaattaaactagatgataattctcaggtactgataaacacctgttgttgttcactttcctcataaaaattgtcagctctctctgacacttagacctcaaactttagcatctctgtggagctgccatccactgtataatttcgcctggcaactggactgaggggagtgtgcccaggcagctgccaagcactccctccctggcttcagggtcagagtgcccagcgtttatcagaggcagcatccaagcccagagccagtgtcgactcttcggctggtgcctttcctctgaggggctatcaatgtgtagataaagccctgagtaggcaagagcagtgagatccactgctatggtcttgatacatcctcaaactttcccttcccagcacagaggaatattggctggcatgcaacctgcaaaagaaaaatgcgaagcggccgggcacggtggctcatgcctgtaatcccagcactttggggggctgaggtgggcgaatcatgagatcaggagttcgagaccagcctggccagcatggtgaaaccccatctctactaaaaatacaaaaaattagctgggcgtggtgacgggcgcctgtaatcccagatactcaggaggctgaggtaggagaatcacttgaacctgggaggtggaagttgcagtgaaccaagatcacgccactgcactccagcctgggcgatggagcgagactccaactcaaaaaaaaaaaagaataaagaaagaaaagtgcgatgcccagtcaatcacaaataagatcatcctggtttaaatctactctcacatggatcacagtataaatttctatgtgctgtgttttgttcgtttgtattttgtagagatggggtctcgttttgtcgcccaggctggttttgaactcctggcttcaagcgatcctcctgtctcggcctcacaaagtgttgagactacaggcatgagccactgtgcccagcctgttctatgtttttaagctacacgagaattttttttttaattaattctcactgtttgttcagtctgtcttcatctaagtttgtgttgcagtttaaagttaaagtgacttttaaaggccacatcacctgagactagggtaatcatctttacttctggttcctgaaatcatatttttccagtggaccatcctccagtggctgtggttgttgagcatgctttcagaacacctatgtggcttaaaacttagtttatgttttgtgttcaacactacgtgtaatattttaaaactgtttaatgtgatgtgaatacatttatgtacatttatttttaaatttgtaaatagctttaaattgctatggcaatgtttcttttataaatcatcaaaataaacctttgtgaattga

SEQ ID NO: 438028 - DNA, 1421 bp, Homo sapiens
gttcggtcgaagccctccccttaattatgtgcaattcaagtccccactgcccgcccgcaagcccccactcatcctcgctgcgggcagggtggcccctgcactttacaagggggtgcaggagcgggagacggtcgtccgaacaccggctccccggcatgcgtagaccggcgggcggagcgggctcactttgcgccaatcctacgagaactcccagaactccgcttccctagtccaacccaagccagagttgcccacacctaagatggcggcggggggcggagtcggcgcggccgcctctgggcgggaccgcggggactagacgtggccgcggggcggtgtcatcgcccccgccccgcccggtccagccagctcggcccgggggcttcgggctgtcgggccggcgctcccttctctgccaggtggcgagtacacctgctcacgtaggcgtcatgaggtctccggttcgagacctggcccggaacgatggcgaggagagcacggaccgcacgcctcttctaccgggcgccccacgggccgaagccgctccagtgtgctgctctgctcgttacaacttagcaattttggccttttttggtttcttcattgtgtatgcattacgtgtgaatctgagtgttgcgttagtggatatggtagattcaaatacaactttagaagataatagaacttccaaggcgtgtccagagcattctgctcccataaaagttcatcataatcaaacgggtaagaagtaccaatgggatgcagaaactcaaggatggattctcggttcctttttttatggctacatcatcacacagattcctggaggatatgttgccagcaaaataggggggaaaatgctgctaggatttgggatccttggcactgctgtcctcaccctgttcactcccattgctgcagatttaggagttggaccactcattgtactcagagcactagaaggactaggagagggtgttacatttccagccatgcatgccatgtggtcttcttgggctccccctcttgaaagaagcaaacttcttagcatttcatatgcaggagcacagcttgggacagtaatttctcttcctctttctggaataatttgctactatatgaattggacttatgtcttctacttttttggtactattggaatattttggtttcttttgtggatctggttagttagtgacacaccacaaaaacacaagagaatttcccattatgaaaaggaatacattctttcatcattaagaaatcaggtatggactttgacacattttaaaaataatgtcagaaactttttttcttcagaattaagatatcagtttttaaaaatatatattcctattgtgcatgctctagacaaagtagaataggcaaatgaaatgaacatccaaagtattgtctggctg

SEQ ID NO: 438029 - DNA, 419 bp, Homo sapiens
tttgagacggagtctcactctgttgcccaggctggagtgcagtggcacgatcttggctcactgcaaactccgcctcccgggttcacgccattctcctgcctcagcctcccaagtagctgggattacaggtgcccaccaccacgcctggctaattttttgtctttttagtagagacggggtttcaccttgttagccaggacagtctccattggctgtggttgttgagcatgctttcagaacacctatgtggcttaaaacttagtttatgttttgtgttcaacactacgtgtaatattttaaaactgtttaatgtgatgtgaatacatttatgtacatttatttttaaatttgtaaatagctttaaattgctatggcaatgtttcttttataaatcatcaaaataaacctttgtgaattga

SEQ ID NO: 438030 - DNA, 493 bp, Homo sapiens
gcggccgcctctgggcgggaccgcggggactagacgtggccgcggggcggtgtcatcgcccccgccccgcccggtccagccagctcggcccgggggcttcgggctgtcgggccggcgctcccttctctgccaggtggcgagtacacctgctcacgtaggcgtcatgaggtctccggttcgagacctggcccggaacgatggcgaggagagcacggaccgcacgcctcttctaccgggcgccccacgggccgaagccggtaagcggcggggtcgtccaggggcttcgagtgggcagcggtaccgggggcggcggtctctgggccggcatggcccgggtacccgcaccctgcgccggcgggaccggagctgctcaggcgcgaggggacattaagaggggagcccgttcagagtgccgctcagtcccgcctgcctcggtgcgcagaagcccctcgggaaccccgggggccgcgaccgtgatcgcggagccgagccg

SEQ ID NO: 438031 - DNA, 460 bp, Homo sapiens
tttatcctaattattcctgttttcttcagctttcttcacagaagtcagtgccgtgggtacccattttaaaatccctgccactttgggctatcgtagttgcacacttttcttacaactggactttttatactttattgacattattgcctacttatatgaaggagatcctaaggttcaatgttcaagaggtaagaaaaaataatcatctgcttcttatatatatagtataagaccatacacagaatttgttctcatctgtataaaattcagttattctgtatcttccattttactctgctgtcctaaattttagagattcttatacatcaaaggactattaagaaaatgaaaaacaacccactgaatgggagaaagcatttataaatcaaacatctaataagggtctagtatccagacatattaagaattcttacaattcaataataaaaagacaactcag

SEQ ID NO: 438032 - DNA, 3634 bp, Homo sapiens
gttcggtcgaagccctccccttaattatgtgcaattcaagtccccactgcccgcccgcaagcccccactcatcctcgctgcgggcagggtggcccctgcactttacaagggggtgcaggagcgggagacggtcgtccgaacaccggctccccggcatgcgtagaccggcgggcggagcgggctcactttgcgccaatcctacgagaactcccagaactccgcttccctagtccaacccaagccagagttgcccacacctaagatggcggcggggggcggagtcggcgcggccgcctctgggcgggaccgcggggactagacgtggccgcggggcggtgtcatcgcccccgccccgcccggtccagccagctcggcccgggggcttcgggctgtcgggccggcgctcccttctctgccaggtggcgagtacacctgctcacgtaggcgtcatgaggtctccggttcgagacctggcccggaacgatggcgaggagagcacggaccgcacgcctcttctaccgggcgccccacgggccgaagccgctccagtgtgctgctctgctcgttacaacttagcaattttggccttttttggtttcttcattgtgtatgcattacgtgtgaatctgagtgttgcgttagtggatatggtagattcaaatacaactttagaagataatagaacttccaaggcgtgtccagagcattctgctcccataaaagttcatcataatcaaacgggtaagaagtaccaatgggatgcagaaactcaaggatggattctcggttcctttttttatggctacatcatcacacagattcctggaggatatgttgccagcaaaataggggggaaaatgctgctaggatttgggatccttggcactgctgtcctcaccctgttcactcccattgctgcagatttaggagttggaccactcattgtactcagagcactagaaggactaggagagggtgttacatttccagccatgcatgccatgtggtcttcttgggctccccctcttgaaagaagcaaacttcttagcatttcatatgcaggagcacagcttgggacagtaatttctcttcctctttctggaataatttgctactatatgaattggacttatgtcttctacttttttggtactattggaatattttggtttcttttgtggatctggttagttagtgacacaccacaaaaacacaagagaatttcccattatgaaaaggaatacattctttcatcattaagaaatcagctttcttcacagaagtcagtgccgtgggtacccattttaaaatccctgccactttgggctatcgtagttgcacacttttcttacaactggactttttatactttattgacattattgcctacttatatgaaggagatcctaaggttcaatgttcaagagaatgggtttttatcttcattgccttatttaggctcttggttatgtatgatcctgtctggtcaagctgctgacaatttaagggcaaaatggaatttttcaactttatgtgttcgcagaatttttagccttataggaatgattggacctgcagtattcctggtagctgctggcttcattggctgtgattattctttggccgttgctttcctaactatatcaacaacactgggaggcttttgctcttctggatttagcatcaaccatctggatattgctccttcgtatgctggtatcctcctgggcatcacaaatacatttgccactattccaggaatggttgggcccgtcattgctaaaagtctgacccctgataacactgttggagaatggcaaaccgtgttctatattgctgctgctattaatgtttttggtgccattttctttacactattcgccaaaggtgaagtacaaaactgggctctcaatgatcaccatggacacagacactgaaggaaccaataaataatcctgcctctattaatgtatttttatttatcatgtaacctcaaagtgccttctgtattgtgtaagcattctatgtctttttttaattgtacttgtattagatttttaaggcctataatcatgaaatatcactagttgccagaataataaaatgaactgtgtttaattatgaataatatgtaagctaggacttctactttaggttcacatacctgcctgctagtcgggcaacatgaagtaggacagttctgttgattttttagggccatactaaagggaatgagctgaaacagacctcctgatacctttgcttaattaaactagatgataattctcaggtactgataaacacctgttgttgttcactttcctcataaaaattgtcagctctctctgacacttagacctcaaactttagcatctctgtggagctgccatccactgtataatttcgcctggcaactggactgaggggagtgtgcccaggcagctgccaagcactccctccctggcttcagggtcagagtgcccagcgtttatcagaggcagcatccaagcccagagccagtgtcgactcttcggctggtgcctttcctctgaggggctatcaatgtgtagataaagccctgagtaggcaagagcagtgagatccactgctatggtcttgatacatcctcaaactttcccttcccagcacagaggaatattggctggcatgcaacctgcaaaagaaaaatgcgaagcggccgggcacggtggctcatgcctgtaatcccagcactttggggggctgaggtgggcgaatcatgagatcaggagttcgagaccagcctggccagcatggtgaaaccccatctctactaaaaatacaaaaaattagctgggcgtggtgacgggcgcctgtaatcccagatactcaggaggctgaggtaggagaatcacttgaacctgggaggtggaagttgcagtgaaccaagatcacgccactgcactccagcctgggcgatggagcgagactccaactcaaaaaaaaaaaagaataaagaaagaaaagtgcgatgcccagtcaatcacaaataagatcatcctggtttaaatctactctcacatggatcacagtataaatttctatgtgctgtgttttgttcgtttgtattttgtagagatggggtctcgttttgtcgcccaggctggttttgaactcctggcttcaagcgatcctcctgtctcggcctcacaaagtgttgagactacaggcatgagccactgtgcccagcctgttctatgtttttaagctacacgagaattttttttttaattaattctcactgtttgttcagtctgtcttcatctaagtttgtgttgcagtttaaagttaaagtgacttttaaaggccacatcacctgagactagggtaatcatctttacttctggttcctgaaatcatatttttccagtggaccatcctccagtggctgtggttgttgagcatgctttcagaacacctatgtggcttaaaacttagtttatgttttgtgttcaacactacgtgtaatattttaaaactgtttaatgtgatgtgaatacatttatgtacatttatttttaaatttgtaaatagctttaaattgctatggcaatgtttcttttataaatcatcaaaataaacctttgtgaattga

SEQ ID NO: 438033 - DNA, 3475 bp, Homo sapiens
gttcggtcgaagccctccccttaattatgtgcaattcaagtccccactgcccgcccgcaagcccccactcatcctcgctgcgggcagggtggcccctgcactttacaagggggtgcaggagcgggagacggtcgtccgaacaccggctccccggcatgcgtagaccggcgggcggagcgggctcactttgcgccaatcctacgagaactcccagaactccgcttccctagtccaacccaagccagagttgcccacacctaagatggcggcggggggcggagtcggcgcggccgcctctgggcgggaccgcggggactagacgtggccgcggggcggtgtcatcgcccccgccccgcccggtccagccagctcggcccgggggcttcgggctgtcgggccggcgctcccttctctgccaggtggcgagtacacctgctcacgtaggcgtcatgaggtctccggttcgagacctggcccggaacgatggcgaggagagcacggaccgcacgcctcttctaccgggcgccccacgggccgaagccgctccagtgtgctgctctgctcgttacaacttagcaattttggccttttttggtttcttcattgtgtatgcattacgtgtgaatctgagtgttgcgttagtggatatggtagattcaaatacaactttagaagataatagaacttccaaggcgtgtccagagcattctgctcccataaaagttcatcataatcaaacgggtaagaagtaccaatgggatgcagaaactcaaggatggattctcggttcctttttttatggctacatcatcacacagattcctggaggatatgttgccagcaaaataggggggaaaatgctgctaggatttgggatccttggcactgctgtcctcaccctgttcactcccattgctgcagatttaggagttggaccactcattgtactcagagcactagaaggactaggagagggtgttacatttccagccatgcatgccatgtggtcttcttgggctccccctcttgaaagaagcaaacttcttagcatttcatatgcaggagcacagcttgggacagtaatttctcttcctctttctggaataatttgctactatatgaattggacttatgtcttctacttttttggtactattggaatattttggtttcttttgtggatctggttagttagtgacacaccacaaaaacacaagagaatttcccattatgaaaaggaatacattctttcatcattaagaaatcagaatgggtttttatcttcattgccttatttaggctcttggttatgtatgatcctgtctggtcaagctgctgacaatttaagggcaaaatggaatttttcaactttatgtgttcgcagaatttttagccttataggaatgattggacctgcagtattcctggtagctgctggcttcattggctgtgattattctttggccgttgctttcctaactatatcaacaacactgggaggcttttgctcttctggatttagcatcaaccatctggatattgctccttcgtatgctggtatcctcctgggcatcacaaatacatttgccactattccaggaatggttgggcccgtcattgctaaaagtctgacccctgataacactgttggagaatggcaaaccgtgttctatattgctgctgctattaatgtttttggtgccattttctttacactattcgccaaaggtgaagtacaaaactgggctctcaatgatcaccatggacacagacactgaaggaaccaataaataatcctgcctctattaatgtatttttatttatcatgtaacctcaaagtgccttctgtattgtgtaagcattctatgtctttttttaattgtacttgtattagatttttaaggcctataatcatgaaatatcactagttgccagaataataaaatgaactgtgtttaattatgaataatatgtaagctaggacttctactttaggttcacatacctgcctgctagtcgggcaacatgaagtaggacagttctgttgattttttagggccatactaaagggaatgagctgaaacagacctcctgatacctttgcttaattaaactagatgataattctcaggtactgataaacacctgttgttgttcactttcctcataaaaattgtcagctctctctgacacttagacctcaaactttagcatctctgtggagctgccatccactgtataatttcgcctggcaactggactgaggggagtgtgcccaggcagctgccaagcactccctccctggcttcagggtcagagtgcccagcgtttatcagaggcagcatccaagcccagagccagtgtcgactcttcggctggtgcctttcctctgaggggctatcaatgtgtagataaagccctgagtaggcaagagcagtgagatccactgctatggtcttgatacatcctcaaactttcccttcccagcacagaggaatattggctggcatgcaacctgcaaaagaaaaatgcgaagcggccgggcacggtggctcatgcctgtaatcccagcactttggggggctgaggtgggcgaatcatgagatcaggagttcgagaccagcctggccagcatggtgaaaccccatctctactaaaaatacaaaaaattagctgggcgtggtgacgggcgcctgtaatcccagatactcaggaggctgaggtaggagaatcacttgaacctgggaggtggaagttgcagtgaaccaagatcacgccactgcactccagcctgggcgatggagcgagactccaactcaaaaaaaaaaaagaataaagaaagaaaagtgcgatgcccagtcaatcacaaataagatcatcctggtttaaatctactctcacatggatcacagtataaatttctatgtgctgtgttttgttcgtttgtattttgtagagatggggtctcgttttgtcgcccaggctggttttgaactcctggcttcaagcgatcctcctgtctcggcctcacaaagtgttgagactacaggcatgagccactgtgcccagcctgttctatgtttttaagctacacgagaattttttttttaattaattctcactgtttgttcagtctgtcttcatctaagtttgtgttgcagtttaaagttaaagtgacttttaaaggccacatcacctgagactagggtaatcatctttacttctggttcctgaaatcatatttttccagtggaccatcctccagtggctgtggttgttgagcatgctttcagaacacctatgtggcttaaaacttagtttatgttttgtgttcaacactacgtgtaatattttaaaactgtttaatgtgatgtgaatacatttatgtacatttatttttaaatttgtaaatagctttaaattgctatggcaatgtttcttttataaatcatcaaaataaacctttgtgaattga

SEQ ID NO: 438034 - DNA, 3618 bp, Homo sapiens
ggggctcgggacggccgggctgggagctggagcccacagcgggaagcggccgccgcccgggcctcgcagggctaggcgaggcgagggggggcggggccgggcgctacgggaaggggaggccgcgcggaccgggagccgcaccgcgccagccgggctgcagcggccgcgcaccaaggctgcgatggggctggagacggagaaggcggacgtacagctcttcatggacgacgactcctacagccaccacagcggcctcgagtacgccgaccccgagaagttcgcggactcggaccaggaccgggatccccaccggctcaactcgcatctcaagctgggcttcgaggatgtgatcgcagagccggtgactacgcactcctttgacaaagtgtggatctgcagccatgccctctttgaaatcagcaaatacgtaatgtacaagttcctgacggtgttcctggccattcccctggccttcattgcgggaattctctttgccaccctcagctgtctgcacatctggattttaatgccttttgtaaagacctgcctaatggttctgccttcagtgcagacaatatggaagagtgtgacagatgttatcattgctccattgtgtacgagcgtaggacgatgcttctcttctgtcagcctgcaactgagccaggattgaatacttggaccccaggtctggagattgggatactgtaatacttctttgttattataacataaaagcaccactgttctgttcatttcctagctgttctaattaagaaaactattaagatgagcaaccacatttagaaatgtttattgacaggtcttttcaaataatgcttttctaattaatagccaaagatttcatatctaactttgtaaccagaattatacagtaagttgacaccacttagatttaaaggcagacagttttgctttagtacaatagtatacattttataatgatgaacttataatgattaagggacatttctataaaaatactacaatagttttatgcacaacttcccattaaaaatgagatttcttatttgtttgtctgtttttactctgggagtaatactttttaaattacctttacatatatagtcactggcatactgagaatatacaatgatcctggaaattgcagtaacaaaagcacacaacgattatagtaactataagatacaataaaacaaataaatgtgaaagtagattcatgaaaatgtattcctttttttgtagttaatataaatgttgctctaatcagattgcttaaaagcatttttattatatttatgttgttgaactaatatatgaaataagtaaatgtagctcccacaaggtaaacttcattggtaagattgcactgttctgattatgtaagcatttgtacatcttctttggaaataaaagataaaagagcgatacacaaagctttcttttctaacttttccaagcaaaatctaaaatgttttatgacatttttctggctgtgatcttaaaataattcatatctaaatagtattttgtctaggagatgctttctctctagtagttagaaattaaatctgtgtcagcattcctattaatgtctcactttactttcaagtaatattggtgctatttaacattttacagtaaatgttacttctgatactttagtacaatttcaactacagtgattcatgtagagagacaggggagttgtcaacttgggctactgaactacatgcataaactaaaaactaacagctacaaacttttaagatttctctaatattggtatgtaacacaggataaagttattcttgtcattttgaactgtagagtcctatttcagtgtgatgaatcactgttgctttgaaaaatctcattatttctgggccgggcatggtggctcacccctgtaatcccagcactttgggaggccaaggcgggtggatcatgaggtcaggagatcaagaccatcctggccaacatggtgataccccgtctctactaaaaatacaaaaaaattagttgggcatggtggcatgcacctgtagtcccagctacctgggaggctgaggcaggagaattgcttgaacctgggaggcagaggttgcagtgagccaaaatcatgccactgcactcccgcctggcaacagagcaagagtctgtctcaaaaaaaaaaaagaaaaaaagaaaaaagaaaaatctcattatttcaaaatgatagacatataccaaaaacaagtctataatgtgagtagttactaaaatttacacatcttaaaagtgtgtaaatgcttaaatttcagaattaccatcagaacctcaattgacattcctttgaataggctaataagtgacaaataagattaataagatttttcaaaatcgccaggactggtgaatataaatgatgattgaactggaataatattggggaccaaatcaaatgaatgattaaattatgaagctcatatccttttgaaggtagttgcaaagagacatttcaaaactgccctaggccattgcagcatccttagatgggacgcataatcattaccttaaagcatcaccactcattttgaccatatagattttattatgttagtttaaaaggtcaatcagcctcatgactttatagttatgtcttgtatttaaaaacattttttatacatttggttatgttgataaaccaaaaacatttgattaataaaatatctatttgaataaattatgagctatcctttcaaacagctattggcaagttttaaacccaaaatatatacacatagttctgtaataaaactgtttgacttctcaagtaacatgacttccttatttctgaacagtactggttactttcaaaatgaatttttattgagattttccattaactatttttttcaaagactcaaattttgtaccaagtaaatccaggctttatgtacaaacatgttgtttgttttatttggggctgggggaggtatatgatgagcagacttctcggaattcataataaattttctaaaagcctaaaaaaaaaaaaaaaaaaaaaaaaaaaaaaaaaaaaaaaaaaaaaaaaaaaaaaaaaaaaaaaaaaaaaaaagaaaaaaaaaaaaaaaagagacaaaccgaacaagcacaaacaaacgacaaaacaccaacaagaagaaggcggggcaccccgcacaaaatcacccgcagacgcaacacaagcactcatcacctgtcacgaaagcacagcccccaccgagctatcctccaacacagcagcgagccgcaaccaaacaacaaacagatcaacaaaaaaatcacagagcgcacaccagaggcacccccacaggtgggggagacacacgaggccaccccacaacaaccgaaaaaccacccgaccaacaaacaacaccgacagcagagcacccacccacagacgcggagagaaaccgcccgcagacaacaacaaacaacacgaccgcccacacacacgcccgccagacatcacgacaccgacaagctgagcgcaaccacgacaaccaccacgaccgcccccccaccgcacaagaaacggcagccgaccggcacaacccaccaagccaccacccgacaccgaaccagaccacccgc

SEQ ID NO: 438035 - DNA, 3535 bp, Homo sapiens
aacagatgccacagcccccattttgccaacgaggcagctgaggttcccagaggctcaataccagcaccatgagccgcagcacgcaaggcaaacacagccggagccaccacagcggcctcgagtacgccgaccccgagaagttcgcggactcggaccaggaccgggatccccaccggctcaactcgcatctcaagctgggcttcgaggatgtgatcgcagagccggtgactacgcactcctttgacaaagtgtggatctgcagccatgccctctttgaaatcagcaaatacgtaatgtacaagttcctgacggtgttcctggccattcccctggccttcattgcgggaattctctttgccaccctcagctgtctgcacatctggattttaatgccttttgtaaagacctgcctaatggttctgccttcagtgcagacaatatggaagagtgtgacagatgttatcattgctccattgtgtacgagcgtaggacgatgcttctcttctgtcagcctgcaactgagccaggattgaatacttggaccccaggtctggagattgggatactgtaatacttctttgttattataacataaaagcaccactgttctgttcatttcctagctgttctaattaagaaaactattaagatgagcaaccacatttagaaatgtttattgacaggtcttttcaaataatgcttttctaattaatagccaaagatttcatatctaactttgtaaccagaattatacagtaagttgacaccacttagatttaaaggcagacagttttgctttagtacaatagtatacattttataatgatgaacttataatgattaagggacatttctataaaaatactacaatagttttatgcacaacttcccattaaaaatgagatttcttatttgtttgtctgtttttactctgggagtaatactttttaaattacctttacatatatagtcactggcatactgagaatatacaatgatcctggaaattgcagtaacaaaagcacacaacgattatagtaactataagatacaataaaacaaataaatgtgaaagtagattcatgaaaatgtattcctttaaaatattgttttcctacaggcctatttaacaagatgtttcattttactgtatattttgtagttaatataaatgttgctctaatcagattgcttaaaagcatttttattatatttatgttgttgaactaatatatgaaataagtaaatgtagctcccacaaggtaaacttcattggtaagattgcactgttctgattatgtaagcatttgtacatcttctttggaaataaaagataaaagagcgatacacaaagctttcttttctaacttttccaagcaaaatctaaaatgttttatgacatttttctggctgtgatcttaaaataattcatatctaaatagtattttgtctaggagatgctttctctctagtagttagaaattaaatctgtgtcagcattcctattaatgtctcactttactttcaagtaatattggtgctatttaacattttacagtaaatgttacttctgatactttagtacaatttcaactacagtgattcatgtagagagacaggggagttgtcaacttgggctactgaactacatgcataaactaaaaactaacagctacaaacttttaagatttctctaatattggtatgtaacacaggataaagttattcttgtcattttgaactgtagagtcctatttcagtgtgatgaatcactgttgctttgaaaaatctcattatttctgggccgggcatggtggctcacccctgtaatcccagcactttgggaggccaaggcgggtggatcatgaggtcaggagatcaagaccatcctggccaacatggtgataccccgtctctactaaaaatacaaaaaaattagttgggcatggtggcatgcacctgtagtcccagctacctgggaggctgaggcaggagaattgcttgaacctgggaggcagaggttgcagtgagccaaaatcatgccactgcactcccgcctggcaacagagcaagagtctgtctcaaaaaaaaaaaagaaaaaaagaaaaaagaaaaatctcattatttcaaaatgatagacatataccaaaaacaagtctataatgtgagtagttactaaaatttacacatcttaaaagtgtgtaaatgcttaaatttcagaattaccatcagaacctcaattgacattcctttgaataggctaataagtgacaaataagattaataagatttttcaaaatcgccaggactggtgaatataaatgatgattgaactggaataatattggggaccaaatcaaatgaatgattaaattatgaagctcatatccttttgaaggtagttgcaaagagacatttcaaaactgccctaggccattgcagcatccttagatgggacgcataatcattaccttaaagcatcaccactcattttgaccatatagattttattatgttagtttaaaaggtcaatcagcctcatgactttatagttatgtcttgtatttaaaaacattttttatacatttggttatgttgataaaccaaaaacatttgattaataaaatatctatttgaataaattatgagctatcctttcaaacagctattggcaagttttaaacccaaaatatatacacatagttctgtaataaaactgtttgacttctcaagtaacatgacttccttatttctgaacagtactggttactttcaaaatgaatttttattgagattttccattaactatttttttcaaagactcaaattttgtaccaagtaaatccaggctttatgtacaaacatgttgtttgttttatttggggctgggggaggtatatgatgagcagacttctcggaattcataataaattttctaaaagcctaaaaaaaaaaaaaaaaaaaaaaaaaaaaaaaaaaaaaaaaaaaaaaaaaaaaaaaaaaaaaaaaaaaaaaaagaaaaaaaaaaaaaaaagagacaaaccgaacaagcacaaacaaacgacaaaacaccaacaagaagaaggcggggcaccccgcacaaaatcacccgcagacgcaacacaagcactcatcacctgtcacgaaagcacagcccccaccgagctatcctccaacacagcagcgagccgcaaccaaacaacaaacagatcaacaaaaaaatcacagagcgcacaccagaggcacccccacaggtgggggagacacacgaggccaccccacaacaaccgaaaaaccacccgaccaacaaacaacaccgacagcagagcacccacccacagacgcggagagaaaccgcccgcagacaacaacaaacaacacgaccgcccacacacacgcccgccagacatcacgacaccgacaagctgagcgcaaccacgacaaccaccacgaccgcccccccaccgcacaagaaacggcagccgaccggcacaacccaccaagccaccacccgacaccgaaccagaccacccgc

SEQ ID NO: 438036 - DNA, 3484 bp, Homo sapiens
ggggctcgggacggccgggctgggagctggagcccacagcgggaagcggccgccgcccgggcctcgcagggctaggcgaggcgagggggggcggggccgggcgctacgggaaggggaggccgcgcggaccgggagccgcaccgcgccagccgggctgcagcggccgcgcaccaaggctgcgatggggctggagacggagaaggcggacgtacagctcttcatggacgacgactcctacagccaccacagcggcctcgagtacgccgaccccgagaagttcgcggactcggaccaggaccgggatccccaccggctcaactcgcatctcaaggattttaatgccttttgtaaagacctgcctaatggttctgccttcagtgcagacaatatggaagagtgtgacagatgttatcattgctccattgtgtacgagcgtaggacgatgcttctcttctgtcagcctgcaactgagccaggattgaatacttggaccccaggtctggagattgggatactgtaatacttctttgttattataacataaaagcaccactgttctgttcatttcctagctgttctaattaagaaaactattaagatgagcaaccacatttagaaatgtttattgacaggtcttttcaaataatgcttttctaattaatagccaaagatttcatatctaactttgtaaccagaattatacagtaagttgacaccacttagatttaaaggcagacagttttgctttagtacaatagtatacattttataatgatgaacttataatgattaagggacatttctataaaaatactacaatagttttatgcacaacttcccattaaaaatgagatttcttatttgtttgtctgtttttactctgggagtaatactttttaaattacctttacatatatagtcactggcatactgagaatatacaatgatcctggaaattgcagtaacaaaagcacacaacgattatagtaactataagatacaataaaacaaataaatgtgaaagtagattcatgaaaatgtattcctttaaaatattgttttcctacaggcctatttaacaagatgtttcattttactgtatattttgtagttaatataaatgttgctctaatcagattgcttaaaagcatttttattatatttatgttgttgaactaatatatgaaataagtaaatgtagctcccacaaggtaaacttcattggtaagattgcactgttctgattatgtaagcatttgtacatcttctttggaaataaaagataaaagagcgatacacaaagctttcttttctaacttttccaagcaaaatctaaaatgttttatgacatttttctggctgtgatcttaaaataattcatatctaaatagtattttgtctaggagatgctttctctctagtagttagaaattaaatctgtgtcagcattcctattaatgtctcactttactttcaagtaatattggtgctatttaacattttacagtaaatgttacttctgatactttagtacaatttcaactacagtgattcatgtagagagacaggggagttgtcaacttgggctactgaactacatgcataaactaaaaactaacagctacaaacttttaagatttctctaatattggtatgtaacacaggataaagttattcttgtcattttgaactgtagagtcctatttcagtgtgatgaatcactgttgctttgaaaaatctcattatttctgggccgggcatggtggctcacccctgtaatcccagcactttgggaggccaaggcgggtggatcatgaggtcaggagatcaagaccatcctggccaacatggtgataccccgtctctactaaaaatacaaaaaaattagttgggcatggtggcatgcacctgtagtcccagctacctgggaggctgaggcaggagaattgcttgaacctgggaggcagaggttgcagtgagccaaaatcatgccactgcactcccgcctggcaacagagcaagagtctgtctcaaaaaaaaaaaagaaaaaaagaaaaaagaaaaatctcattatttcaaaatgatagacatataccaaaaacaagtctataatgtgagtagttactaaaatttacacatcttaaaagtgtgtaaatgcttaaatttcagaattaccatcagaacctcaattgacattcctttgaataggctaataagtgacaaataagattaataagatttttcaaaatcgccaggactggtgaatataaatgatgattgaactggaataatattggggaccaaatcaaatgaatgattaaattatgaagctcatatccttttgaaggtagttgcaaagagacatttcaaaactgccctaggccattgcagcatccttagatgggacgcataatcattaccttaaagcatcaccactcattttgaccatatagattttattatgttagtttaaaaggtcaatcagcctcatgactttatagttatgtcttgtatttaaaaacattttttatacatttggttatgttgataaaccaaaaacatttgattaataaaatatctatttgaataaattatgagctatcctttcaaacagctattggcaagttttaaacccaaaatatatacacatagttctgtaataaaactgtttgacttctcaagtaacatgacttccttatttctgaacagtactggttactttcaaaatgaatttttattgagattttccattaactatttttttcaaagactcaaattttgtaccaagtaaatccaggctttatgtacaaacatgttgtttgttttatttggggctgggggaggtatatgatgagcagacttctcggaattcataataaattttctaaaagcctaaaaaaaaaaaaaaaaaaaaaaaaaaaaaaaaaaaaaaaaaaaaaaaaaaaaaaaaaaaaaaaaaaaaaaaagaaaaaaaaaaaaaaaagagacaaaccgaacaagcacaaacaaacgacaaaacaccaacaagaagaaggcggggcaccccgcacaaaatcacccgcagacgcaacacaagcactcatcacctgtcacgaaagcacagcccccaccgagctatcctccaacacagcagcgagccgcaaccaaacaacaaacagatcaacaaaaaaatcacagagcgcacaccagaggcacccccacaggtgggggagacacacgaggccaccccacaacaaccgaaaaaccacccgaccaacaaacaacaccgacagcagagcacccacccacagacgcggagagaaaccgcccgcagacaacaacaaacaacacgaccgcccacacacacgcccgccagacatcacgacaccgacaagctgagcgcaaccacgacaaccaccacgaccgcccccccaccgcacaagaaacggcagccgaccggcacaacccaccaagccaccacccgacaccgaaccagaccacccgc

SEQ ID NO: 438037 - DNA, 2894 bp, Homo sapiens
cttagatttaaaggcagacagtttgctttagtacaatagtatacattttataatgatgaacttataattaatagccaaagatttcatatctaactttgtaaccagaattatacagtaagttgacaccacttagatttaaaggcagacagttttgctttagtacaatagtatacattttataatgatgaacttataatgattaagggacatttctataaaaatactacaatagttttatgcacaacttcccattaaaaatgagatttcttatttgtttgtctgtttttactctgggagtaatactttttaaattacctttacatatatagtcactggcatactgagaatatacaatgatcctggaaattgcagtaacaaaagcacacaacgattatagtaactataagatacaataaaacaaataaatgtgaaagtagattcatgaaaatgtattcctttaaaatattgttttcctacaggcctatttaacaagatgtttcattttactgtatattttgtagttaatataaatgttgctctaatcagattgcttaaaagcatttttattatatttatgttgttgaactaatatatgaaataagtaaatgtagctcccacaaggtaaacttcattggtaagattgcactgttctgattatgtaagcatttgtacatcttctttggaaataaaagataaaagagcgatacacaaagctttcttttctaacttttccaagcaaaatctaaaatgttttatgacatttttctggctgtgatcttaaaataattcatatctaaatagtattttgtctaggagatgctttctctctagtagttagaaattaaatctgtgtcagcattcctattaatgtctcactttactttcaagtaatattggtgctatttaacattttacagtaaatgttacttctgatactttagtacaatttcaactacagtgattcatgtagagagacaggggagttgtcaacttgggctactgaactacatgcataaactaaaaactaacagctacaaacttttaagatttctctaatattggtatgtaacacaggataaagttattcttgtcattttgaactgtagagtcctatttcagtgtgatgaatcactgttgctttgaaaaatctcattatttctgggccgggcatggtggctcacccctgtaatcccagcactttgggaggccaaggcgggtggatcatgaggtcaggagatcaagaccatcctggccaacatggtgataccccgtctctactaaaaatacaaaaaaattagttgggcatggtggcatgcacctgtagtcccagctacctgggaggctgaggcaggagaattgcttgaacctgggaggcagaggttgcagtgagccaaaatcatgccactgcactcccgcctggcaacagagcaagagtctgtctcaaaaaaaaaaaagaaaaaaagaaaaaagaaaaatctcattatttcaaaatgatagacatataccaaaaacaagtctataatgtgagtagttactaaaatttacacatcttaaaagtgtgtaaatgcttaaatttcagaattaccatcagaacctcaattgacattcctttgaataggctaataagtgacaaataagattaataagatttttcaaaatcgccaggactggtgaatataaatgatgattgaactggaataatattggggaccaaatcaaatgaatgattaaattatgaagctcatatccttttgaaggtagttgcaaagagacatttcaaaactgccctaggccattgcagcatccttagatgggacgcataatcattaccttaaagcatcaccactcattttgaccatatagattttattatgttagtttaaaaggtcaatcagcctcatgactttatagttatgtcttgtatttaaaaacattttttatacatttggttatgttgataaaccaaaaacatttgattaataaaatatctatttgaataaattatgagctatcctttcaaacagctattggcaagttttaaacccaaaatatatacacatagttctgtaataaaactgtttgacttctcaagtaacatgacttccttatttctgaacagtactggttactttcaaaatgaatttttattgagattttccattaactatttttttcaaagactcaaattttgtaccaagtaaatccaggctttatgtacaaacatgttgtttgttttatttggggctgggggaggtatatgatgagcagacttctcggaattcataataaattttctaaaagcctaaaaaaaaaaaaaaaaaaaaaaaaaaaaaaaaaaaaaaaaaaaaaaaaaaaaaaaaaaaaaaaaaaaaaaaagaaaaaaaaaaaaaaaagagacaaaccgaacaagcacaaacaaacgacaaaacaccaacaagaagaaggcggggcaccccgcacaaaatcacccgcagacgcaacacaagcactcatcacctgtcacgaaagcacagcccccaccgagctatcctccaacacagcagcgagccgcaaccaaacaacaaacagatcaacaaaaaaatcacagagcgcacaccagaggcacccccacaggtgggggagacacacgaggccaccccacaacaaccgaaaaaccacccgaccaacaaacaacaccgacagcagagcacccacccacagacgcggagagaaaccgcccgcagacaacaacaaacaacacgaccgcccacacacacgcccgccagacatcacgacaccgacaagctgagcgcaaccacgacaaccaccacgaccgcccccccaccgcacaagaaacggcagccgaccggcacaacccaccaagccaccacccgacaccgaaccagaccacccgc

SEQ ID NO: 438038 - DNA, 1277 bp, Homo sapiens
aaaaaaaaaaaaaaaaaaaaaaaaaaaaaaaaaaaaattaaggtgttccagtggtgaatataaatgatgattgaactggaataatattggggaccaaatcaaatgaatgattaaattatgaagctcatatccttttgaaggtagttgcaaagagacatttcaaaactgccctaggccattgcagcatccttagatgggacgcataatcattaccttaaagcatcaccactcattttgaccatatagattttattatgttagtttaaaaggtcaatcagcctcatgactttatagttatgtcttgtatttaaaaacattttttatacatttggttatgttgataaaccaaaaacatttgattaataaaatatctatttgaataaattatgagctatcctttcaaacagctattggcaagttttaaacccaaaatatatacacatagttctgtaataaaactgtttgacttctcaagtaacatgacttccttatttctgaacagtactggttactttcaaaatgaatttttattgagattttccattaactatttttttcaaagactcaaattttgtaccaagtaaatccaggctttatgtacaaacatgttgtttgttttatttggggctgggggaggtatatgatgagcagacttctcggaattcataataaattttctaaaagcctaaaaaaaaaaaaaaaaaaaaaaaaaaaaaaaaaaaaaaaaaaaaaaaaaaaaaaaaaaaaaaaaaaaaaaaagaaaaaaaaaaaaaaaagagacaaaccgaacaagcacaaacaaacgacaaaacaccaacaagaagaaggcggggcaccccgcacaaaatcacccgcagacgcaacacaagcactcatcacctgtcacgaaagcacagcccccaccgagctatcctccaacacagcagcgagccgcaaccaaacaacaaacagatcaacaaaaaaatcacagagcgcacaccagaggcacccccacaggtgggggagacacacgaggccaccccacaacaaccgaaaaaccacccgaccaacaaacaacaccgacagcagagcacccacccacagacgcggagagaaaccgcccgcagacaacaacaaacaacacgaccgcccacacacacgcccgccagacatcacgacaccgacaagctgagcgcaaccacgacaaccaccacgaccgcccccccaccgcacaagaaacggcagccgaccggcacaacccaccaagccaccacccgacaccgaaccagaccacccgc

SEQ ID NO: 438039 - DNA, 3672 bp, Homo sapiens
ggggctcgggacggccgggctgggagctggagcccacagcgggaagcggccgccgcccgggcctcgcagggctaggcgaggcgagggggggcggggccgggcgctacgggaaggggaggccgcgcggaccgggagccgcaccgcgccagccgggctgcagcggccgcgcaccaaggctgcgatggggctggagacggagaaggcggacgtacagctcttcatggacgacgactcctacagccaccacagcggcctcgagtacgccgaccccgagaagttcgcggactcggaccaggaccgggatccccaccggctcaactcgcatctcaagctgggcttcgaggatgtgatcgcagagccggtgactacgcactcctttgacaaagtgtggatctgcagccatgccctctttgaaatcagcaaatacgtaatgtacaagttcctgacggtgttcctggccattcccctggccttcattgcgggaattctctttgccaccctcagctgtctgcacatctggattttaatgccttttgtaaagacctgcctaatggttctgccttcagtgcagacaatatggaagagtgtgacagatgttatcattgctccattgtgtacgagcgtaggacgatgcttctcttctgtcagcctgcaactgagccaggattgaatacttggaccccaggtctggagattgggatactgtaatacttctttgttattataacataaaagcaccactgttctgttcatttcctagctgttctaattaagaaaactattaagatgagcaaccacatttagaaatgtttattgacaggtcttttcaaataatgcttttctaattaatagccaaagatttcatatctaactttgtaaccagaattatacagtaagttgacaccacttagatttaaaggcagacagttttgctttagtacaatagtatacattttataatgatgaacttataatgattaagggacatttctataaaaatactacaatagttttatgcacaacttcccattaaaaatgagatttcttatttgtttgtctgtttttactctgggagtaatactttttaaattacctttacatatatagtcactggcatactgagaatatacaatgatcctggaaattgcagtaacaaaagcacacaacgattatagtaactataagatacaataaaacaaataaatgtgaaagtagattcatgaaaatgtattcctttaaaatattgttttcctacaggcctatttaacaagatgtttcattttactgtatattttgtagttaatataaatgttgctctaatcagattgcttaaaagcatttttattatatttatgttgttgaactaatatatgaaataagtaaatgtagctcccacaaggtaaacttcattggtaagattgcactgttctgattatgtaagcatttgtacatcttctttggaaataaaagataaaagagcgatacacaaagctttcttttctaacttttccaagcaaaatctaaaatgttttatgacatttttctggctgtgatcttaaaataattcatatctaaatagtattttgtctaggagatgctttctctctagtagttagaaattaaatctgtgtcagcattcctattaatgtctcactttactttcaagtaatattggtgctatttaacattttacagtaaatgttacttctgatactttagtacaatttcaactacagtgattcatgtagagagacaggggagttgtcaacttgggctactgaactacatgcataaactaaaaactaacagctacaaacttttaagatttctctaatattggtatgtaacacaggataaagttattcttgtcattttgaactgtagagtcctatttcagtgtgatgaatcactgttgctttgaaaaatctcattatttctgggccgggcatggtggctcacccctgtaatcccagcactttgggaggccaaggcgggtggatcatgaggtcaggagatcaagaccatcctggccaacatggtgataccccgtctctactaaaaatacaaaaaaattagttgggcatggtggcatgcacctgtagtcccagctacctgggaggctgaggcaggagaattgcttgaacctgggaggcagaggttgcagtgagccaaaatcatgccactgcactcccgcctggcaacagagcaagagtctgtctcaaaaaaaaaaaagaaaaaaagaaaaaagaaaaatctcattatttcaaaatgatagacatataccaaaaacaagtctataatgtgagtagttactaaaatttacacatcttaaaagtgtgtaaatgcttaaatttcagaattaccatcagaacctcaattgacattcctttgaataggctaataagtgacaaataagattaataagatttttcaaaatcgccaggactggtgaatataaatgatgattgaactggaataatattggggaccaaatcaaatgaatgattaaattatgaagctcatatccttttgaaggtagttgcaaagagacatttcaaaactgccctaggccattgcagcatccttagatgggacgcataatcattaccttaaagcatcaccactcattttgaccatatagattttattatgttagtttaaaaggtcaatcagcctcatgactttatagttatgtcttgtatttaaaaacattttttatacatttggttatgttgataaaccaaaaacatttgattaataaaatatctatttgaataaattatgagctatcctttcaaacagctattggcaagttttaaacccaaaatatatacacatagttctgtaataaaactgtttgacttctcaagtaacatgacttccttatttctgaacagtactggttactttcaaaatgaatttttattgagattttccattaactatttttttcaaagactcaaattttgtaccaagtaaatccaggctttatgtacaaacatgttgtttgttttatttggggctgggggaggtatatgatgagcagacttctcggaattcataataaattttctaaaagcctaaaaaaaaaaaaaaaaaaaaaaaaaaaaaaaaaaaaaaaaaaaaaaaaaaaaaaaaaaaaaaaaaaaaaaaagaaaaaaaaaaaaaaaagagacaaaccgaacaagcacaaacaaacgacaaaacaccaacaagaagaaggcggggcaccccgcacaaaatcacccgcagacgcaacacaagcactcatcacctgtcacgaaagcacagcccccaccgagctatcctccaacacagcagcgagccgcaaccaaacaacaaacagatcaacaaaaaaatcacagagcgcacaccagaggcacccccacaggtgggggagacacacgaggccaccccacaacaaccgaaaaaccacccgaccaacaaacaacaccgacagcagagcacccacccacagacgcggagagaaaccgcccgcagacaacaacaaacaacacgaccgcccacacacacgcccgccagacatcacgacaccgacaagctgagcgcaaccacgacaaccaccacgaccgcccccccaccgcacaagaaacggcagccgaccggcacaacccaccaagccaccacccgacaccgaaccagaccacccgc

SEQ ID NO: 438040 - DNA, 3504 bp, Homo sapiens
caggaattcttagccaggttcctgtgcgcccaccgtgaccctaagagaagaggcggacgccctggcacgtccttccctcctgcttcccccgcccaaagcgctcccggttcccggggcgtcaggttggctgacagttcggggtccctgcgtcctgtctcctcagctgggcttcgaggatgtgatcgcagagccggtgactacgcactcctttgacaaagtgtggatctgcagccatgccctctttgaaatcagcaaatacgtaatgtacaagttcctgacggtgttcctggccattcccctggccttcattgcgggaattctctttgccaccctcagctgtctgcacatctggattttaatgccttttgtaaagacctgcctaatggttctgccttcagtgcagacaatatggaagagtgtgacagatgttatcattgctccattgtgtacgagcgtaggacgatgcttctcttctgtcagcctgcaactgagccaggattgaatacttggaccccaggtctggagattgggatactgtaatacttctttgttattataacataaaagcaccactgttctgttcatttcctagctgttctaattaagaaaactattaagatgagcaaccacatttagaaatgtttattgacaggtcttttcaaataatgcttttctaattaatagccaaagatttcatatctaactttgtaaccagaattatacagtaagttgacaccacttagatttaaaggcagacagttttgctttagtacaatagtatacattttataatgatgaacttataatgattaagggacatttctataaaaatactacaatagttttatgcacaacttcccattaaaaatgagatttcttatttgtttgtctgtttttactctgggagtaatactttttaaattacctttacatatatagtcactggcatactgagaatatacaatgatcctggaaattgcagtaacaaaagcacacaacgattatagtaactataagatacaataaaacaaataaatgtgaaagtagattcatgaaaatgtattcctttaaaatattgttttcctacaggcctatttaacaagatgtttcattttactgtatattttgtagttaatataaatgttgctctaatcagattgcttaaaagcatttttattatatttatgttgttgaactaatatatgaaataagtaaatgtagctcccacaaggtaaacttcattggtaagattgcactgttctgattatgtaagcatttgtacatcttctttggaaataaaagataaaagagcgatacacaaagctttcttttctaacttttccaagcaaaatctaaaatgttttatgacatttttctggctgtgatcttaaaataattcatatctaaatagtattttgtctaggagatgctttctctctagtagttagaaattaaatctgtgtcagcattcctattaatgtctcactttactttcaagtaatattggtgctatttaacattttacagtaaatgttacttctgatactttagtacaatttcaactacagtgattcatgtagagagacaggggagttgtcaacttgggctactgaactacatgcataaactaaaaactaacagctacaaacttttaagatttctctaatattggtatgtaacacaggataaagttattcttgtcattttgaactgtagagtcctatttcagtgtgatgaatcactgttgctttgaaaaatctcattatttctgggccgggcatggtggctcacccctgtaatcccagcactttgggaggccaaggcgggtggatcatgaggtcaggagatcaagaccatcctggccaacatggtgataccccgtctctactaaaaatacaaaaaaattagttgggcatggtggcatgcacctgtagtcccagctacctgggaggctgaggcaggagaattgcttgaacctgggaggcagaggttgcagtgagccaaaatcatgccactgcactcccgcctggcaacagagcaagagtctgtctcaaaaaaaaaaaagaaaaaaagaaaaaagaaaaatctcattatttcaaaatgatagacatataccaaaaacaagtctataatgtgagtagttactaaaatttacacatcttaaaagtgtgtaaatgcttaaatttcagaattaccatcagaacctcaattgacattcctttgaataggctaataagtgacaaataagattaataagatttttcaaaatcgccaggactggtgaatataaatgatgattgaactggaataatattggggaccaaatcaaatgaatgattaaattatgaagctcatatccttttgaaggtagttgcaaagagacatttcaaaactgccctaggccattgcagcatccttagatgggacgcataatcattaccttaaagcatcaccactcattttgaccatatagattttattatgttagtttaaaaggtcaatcagcctcatgactttatagttatgtcttgtatttaaaaacattttttatacatttggttatgttgataaaccaaaaacatttgattaataaaatatctatttgaataaattatgagctatcctttcaaacagctattggcaagttttaaacccaaaatatatacacatagttctgtaataaaactgtttgacttctcaagtaacatgacttccttatttctgaacagtactggttactttcaaaatgaatttttattgagattttccattaactatttttttcaaagactcaaattttgtaccaagtaaatccaggctttatgtacaaacatgttgtttgttttatttggggctgggggaggtatatgatgagcagacttctcggaattcataataaattttctaaaagcctaaaaaaaaaaaaaaaaaaaaaaaaaaaaaaaaaaaaaaaaaaaaaaaaaaaaaaaaaaaaaaaaaaaaaaaagaaaaaaaaaaaaaaaagagacaaaccgaacaagcacaaacaaacgacaaaacaccaacaagaagaaggcggggcaccccgcacaaaatcacccgcagacgcaacacaagcactcatcacctgtcacgaaagcacagcccccaccgagctatcctccaacacagcagcgagccgcaaccaaacaacaaacagatcaacaaaaaaatcacagagcgcacaccagaggcacccccacaggtgggggagacacacgaggccaccccacaacaaccgaaaaaccacccgaccaacaaacaacaccgacagcagagcacccacccacagacgcggagagaaaccgcccgcagacaacaacaaacaacacgaccgcccacacacacgcccgccagacatcacgacaccgacaagctgagcgcaaccacgacaaccaccacgaccgcccccccaccgcacaagaaacggcagccgaccggcacaacccaccaagccaccacccgacaccgaaccagaccacccgc

SEQ ID NO: 438041 - DNA, 1297 bp, Homo sapiens
ggggctcgggacggccgggctgggagctggagcccacagcgggaagcggccgccgcccgggcctcgcagggctaggcgaggcgagggggggcggggccgggcgctacgggaaggggaggccgcgcggaccgggagccgcaccgcgccagccgggctgcagcggccgcgcaccaaggctgcgatggggctggagacggagaaggcggacgtacagctcttcatggacgacgactcctacagccaccacagcggcctcgagtacgccgaccccgagaagttcgcggactcggaccaggaccgggatccccaccggctcaactcgcatctcaagctgggcttcgaggatgtgatcgcagagccggtgactacgcactcctttgacaaagtgtggatctgcagccatgccctctttgaaatcagcaaatacgtaatgtacaagttcctgacggtgttcctggccattcccctggccttcattgcgggaattctctttgccaccctcagctgtctgcacatctggattttaatgccttttgtaaagacctgcctaatggttctgccttcagtgcagacaatatggaagagtgtgacagatgttatcattgctccattgtgtacgagcgtaggacgatgcttctcttctgtcagcctgcaactgagccaggattgaatacttggaccccaggtctggagattgggatactgtaatacttctttgttattataacataaaagcaccactgttctgttcatttcctagctgttctaattaagaaaactattaagatgagcaaccacatttagaaatgtttattgacaggtcttttcaaataatgcttttctaattaatagccaaagatttcatatctaactttgtaaccagaattatacagtaagttgacaccacttagatttaaaggcagacagttttgctttagtacaatagtatacattttataatgatgaacttataatgattaagggacatttctataaaaatactacaatagttttatgcacaacttcccattaaaaatgagatttcttatttgtttgtctgtttttactctgggagtaatactttttaaattacctttacatatccgcgcctcggctactgcaaattaccgccatcctgcaattgcgccgggccaacccacccgcgcgtttgcgcctttgccaccgccgccgagctcactggcacagtccctcccgaaaggatcccgctgagctgcgatgtccccggactctaccccacgtgctagcctatcctcttccagccgcccgccgcccgccc

SEQ ID NO: 438042 - DNA, 114 bp, Homo sapiens
gtggctggatgctgaagatgactcagacacaggagcaagacagtggcctctactcatgcctggcaagcaacgaggctggggaggcacggaggaacttcagtgtggaggtgctgg

SEQ ID NO: 438043 - DNA, 688 bp, Homo sapiens
  misc_feature (28)..(28): n is a, c, g, or t
atttgccaataaaaaagggggagggttnaggggggggctaatgagttttttttaaaaagaaactggggaccatgtggggttttctcaaaaaaacttccaatgccatttttgagaactaacctaactagtcatgctaaccagaaaatccactggggaggaggttccttttgaaacaaaatgctgttcagttagtaaccaagttactttgattgcaaaagcagctgtgtttctgataagtactgaacaaatgtgtgtaattttctgtgccagacttatgactttgttttcaagcactgtaatgtgggatggatggttagaaacaataatatattagggtttctgtttaaccctttcaggactgaactgtatctccttttgttaattttcccctgtgttgtgataaatgtttgccagcattcagtactgtgttggtccagatgtaggtttatatgctcatttttagcttatttcttgtaccttgcagcatgctctacgcattcagtccttaaggggtttattttacaaactgtgcgcctgtaaggtttattagcaataagatagaaaattgagcaagtttataccataattttgtagaaaaaaagaatctgctcagttccatatttcatccgtgaaaaacttgcaatacgagcagtttcaaggaataaataaaaaggaaatgtaaaccatt

SEQ ID NO: 438044 - DNA, 900 bp, Homo sapiens
  misc_feature (700)..(700): n is a, c, g, or t
  misc_feature (706)..(707): n is a, c, g, or t
  misc_feature (711)..(711): n is a, c, g, or t
  misc_feature (716)..(716): n is a, c, g, or t
  misc_feature (723)..(723): n is a, c, g, or t
  misc_feature (732)..(732): n is a, c, g, or t
gtagcgtgagactggactgcccgcattgggtacatgcgcagtgccgctcgcgcgggccgcgccaatcctgcagcgccttcaacaggtttcgggcggcgaattccagttctccgggttttggggctccctgcgggaggcagtgctggatctgggaatctctaggaaaggaaagagcaaaggaggggaaagatggggggctgcaggaaatttggtgagcggcctccacctaaacgacttactagggaagctatgcgaaattatttaaaagagcgaggggatcaaacagtacttattcttcatgcaaaagttgcacagaagtcatatggaaatgaaaaaaggtttttttgcccacctccttgtgtatatcttatgggcagcggatggaagaaaaaaaaagaacaaatggaacgcgatggttgttctgaacaagagtctcaaccgtgtgcatttattgggataggaaatagtgaccaagaaatgcagcagctaaacttggaaggaaagaactattgcacagccaaaacattgtatatatctgactcagacaagcgaaagcacttcatgttgtctgtaaagatgttctatggcaacagtgatgacattggtgtgttcctcagcaagcggataaaagtcatctccaaaccttccaaaaagaagcagtcattgaaaaatgctgactcattgctcaggaacaaggggnctgttnnatcnactangatccanaaaggtagnacagatacttgctgggaagggggacattcgcgcgcaggcacaggcggggggagcccggtatccctcttggggtggtggaccagggggaaaaaaggggcgaggcgcccttatgggccgcgtgggtggcaggcggcgggacccccatgtttgaaggggacctctggtggc

SEQ ID NO: 438045 - DNA, 851 bp, Homo sapiens
  misc_feature (714)..(714): n is a, c, g, or t
  misc_feature (732)..(732): n is a, c, g, or t
  misc_feature (779)..(779): n is a, c, g, or t
  misc_feature (816)..(816): n is a, c, g, or t
  misc_feature (839)..(839): n is a, c, g, or t
cttaagagggacggccgggggcattcgtattgcgccggaccttattaaaatgaacttgtgtttttttaacaaacgtgtatgttttattttgatagtttctttccgtaagataattgaaatattatactgtaaacccttttcttttctttttttgaaaagtccaagaatgtacttatacaggcatttttccccacctatttttggccattctcataccacagactaaagagtgaaatgatttgtccattgtagcttattgtttatcagtagttcttttggcgccgactgcagagccgggaggctggtggtcatgccggggttcctggttcgcatcctccttctgctgctggttctgctgcttctgggccctacgcgcggcttgcgcgcagcaacatcacagatgctttcctaagccagaggaagtgtgagcccaaaggacccttgatcaattctgaattctatactggctggctagatcactggggccaacctcactccacaatcaagaccgaagcagtggcttcctccctctatgatatacttgcccgtggggcgagtgtgaacttgtacatgtttataggtgggaccaattttgcctattggaatggggccaactcaccctatgcagcacagcccaccagctacgactatgatgccccactgagtgaggctggggacctcactgagaagtattttgctctgctaaacatcatncagaagtttgaaaaagtnccagaaggcctatcccttcatctacaccaaagtttgcatatggaaangtcactttggaaaagttaaagaccgtgggaaccactntgggacatctgggtcctttgggnccatcaaaagcc

SEQ ID NO: 438046 - DNA, 672 bp, Homo sapiens
tcagaacctgtgtttttcacaagaaccccagctcatttatgtgcacattaatgtttgaaaaacactgatctagaaaacaagtgcctgcctgcctgattttttttttttagatgttcagggaagagggtaacagtttctacattctgacatgcttgcaatctaaaagtgttttttattcctagtctttttgtttgtgaatgtttttatatatgtaggcataggacaaataactgtgatgtattattatgcagtatatagcttctatgtacttttgatgttttacacaaggaaaatcctttccatgtgtggatgaccttttatttcttaattgttaaatatagataattaggaaagttgataagcagaccgcattattggatgcagatgatcctgtgtcacaactccataaatgtgcattttaccttaaggatacagaaagaatgtatttgtgcctttctcaagaaagaataattcaatttcaggtatgtttttaaattactggtgaaatctaaaatgtacaaactgtgaggttagcagcttgcaaaaatatgaaattttcatttgctgttaattatatacaaatacatgaagctatacacagatatttatctcaggtatgagcatccttaacacacaatcctcagacatgcaagcaatccttcctcaaggaag

SEQ ID NO: 438047 - DNA, 5655 bp, Homo sapiens
gccaccagattgggtggaaggggctctttctacggcatttcatgactgagcctccaagaacaacctgtattgagtttctctttgagatgattggactgctctatccagcatcattgagtcattgaaattatgagactatcattcaaatggaagcattatagttcttcggaaccattatgatctcaaaacgaaaggagaatgatacagatacactggctgaggtgttttgaggtgcatcgaagtgttccaagctgtgacttaccttaacatgttcttgaagtaccatggcgtggattaaaaggaaatttggtgagcggcctccacctaaacgacttactagggaagctatgcgaaattatttaaaagagcgaggggatcaaacagtacttattcttcatgcaaaagttgcacagaagtcatatggaaatgaaaaaaggtttttttgcccacctccttgtgtatatcttatgggcagcggatggaagaaaaaaaaagaacaaatggaacgcgatggttgttctgaacaagagtctcaaccgtgtgcatttattgggataggaaatagtgaccaagaaatgcagcagctaaacttggaaggaaagaactattgcacagccaaaacattgtatatatctgactcagacaagcgaaagcacttcatgttgtctgtaaagatgttctatggcaacagtgatgacattggtgtgttcctcagcaagcggataaaagtcatctccaaaccttccaaaaagaagcagtcattgaaaaatgctgacttatgcattgcctcaggaacaaaggtggctctgtttaatcgactacgatcccagacagttagtaccagatacttgcatgtagaaggaggtaattttcatgccagttcacagcagtggggagccttttttattcatctcttggatgatgatgaatcagaaggagaagaattcacagtccgagatggctacatccattatggacaaacagtcaaacttgtgtgctcagttactggcatggcactcccaagattgataattaggaaagttgataagcagaccgcattattggatgcagatgatcctgtgtcacaactccataaatgtgcattttaccttaaggatacagaaagaatgtatttgtgcctttctcaagaaagaataattcaatttcaggccactccatgtccaaaagaaccaaataaagagatgataaatgatggcgcttcctggacaatcattagcacagataaggcagagtatacattttatgagggaatgggccctgtccttgccccagtcactcctgtgcctgtggtagagagccttcagttgaatggcggtggggacgtagcaatgcttgaacttacaggacagaatttcactccaaatttacgagtgtggtttggggatgtagaagctgaaactatgtacaggtgtggagagagtatgctctgtgtcgtcccagacatttctgcattccgagaaggttggagatgggtccggcaaccagtccaggttccagtaactttggtccgaaatgatggaatcatttattccaccagccttacctttacctacacaccagaaccagggccgcggccacattgcagtgcagcaggagcaatccttcgagccaattcaagccaggtgccccctaacgaatcaaacacaaacagcgagggaagttacacaaacgccagcacaaattcaaccagtgtcacatcatctacagccacagtggtatcctaactaccgtctttttgctaggacttaaactgacttgagtgtggcaaaaagttaacaaaaaaggagaaaaaatgaacaatcgtttgtggtttcttgggaaaacttttcataccaggtgatactattcaaaaaccccgttgtctccctgcaagtgctgatttgaaatgcagaagccacagtaaaaaaaaaaaaaaaaaaaaaaaaaaaagaaaaaaaaatcaaaatgtataaatattggaaatcaagtttttcagctgttttgttggttggttggttggtttttgtttggttttgtttaaatgggcaagaagtaaataatgtggctggaatacaagttgaacaaactagaagacacaaatctaacatagtttttatggaccaaggaacttgtatattgtataagctttagtaaaaggtacattttcaccatacctttttttatatcacggtattatagtacaccttgttaccaaataggttgttctcttccccacccacctttgagcttttgctctaaaatacattcaggttccaagcctgaccatccttgtttaatctatcatactcttccaggttttttttttttggtctaaggctggaacttttttcttttttttcagctgaagtcttatgacttttcatgagtcaaaattgtttggatttcagcaagtcaaatcttgcaaaggcctgcatattttttttaagattatatgaagtctgtgcaaaagctttaaaaaaatgcctctgccttgcctgcaatacatgcaatgtatgttaacttagtctctcttctcagacactgttggtagttatttctgtgttttcctttttttaaaaaaaaatatggacttattgtggttatctgagaggttctaacattcacatgcaatttggtgtggccatttagctattaatgagttaatggcgcagaacttgttgatatttgaagtgttctctccccttttcccatgacgtaaatacataggtgtgttccaggatttgttcaggtttttcccccctcctaatcttgtacataacttgtattatgtgtaagttaaacattttattttgaacttggaatgttcccagtgatttcattcagcagggtattttctgccttgttggcaagtgacaaaaaatatgggaagtatttgctaccagttggtagatggtgcccttaatggtagaatgaggaaaatgtccgcaaaagcatgttttattatctttacttttttggggggttggagggggtagcctagccagaacatcattgtaatcttaaaacataagatgcttttattagatgatcaactaaaatagctggaagacagtactttagaaacagatagttgtaagattataaaatgcaaatgtaacttatgttttcatttttttctctgccttttttgtttgtttgttttctcttttccagtactgagcatctccacaaatgtctcctaactcagaaaatgtttcttttcttttcagttgagatttggttgcattcagggttgtaggttggccttgcttgctaaccccgccggttttaccgtgctttcattcctgaactttgtttatgcctttgtttggtttcttcgaaattgcagcagactcattgggctacatttagtacaggaaccacgtgtgtaatgttatacaacacagtctagtaatacaatcatccctcttagagtaaaaactacctctagattgtggtaagcttttactgtcccataaaacaggagccacagtaccttatgaatgcaaaactgtaacttcctacagtgtttccctacagaacattgtctttctggtgtcctgggctgttttgaaaaagtttccattaatagactttttagaaattattattagtagcattttttttccagctttgctgtcttcatcactcactctatgctcagactatgccactgtaaatattcttcctaacatctttaaatcgccttttcctcagttttcaaggggaaggtcatttgtaaagcacgttaggtggttaaatcagttattgcggttttctcttactgcaagcctttttaatcacccccaggctgcattttattctatatcgccttttttcttcaaatctgctccaatcactcacttctctcttataagctaatcctgcctcacaccttaaatctgtttcagtgatcaagggcagaactcattgtggccttatctttctttgttgtaattgttcactgtctctttcttacagaccacttatttctgagtagtagttattcctctctatggagtcatggcaggaatcattacacagtgcttttgttcagagcatggacatgttcctagtgctgctttgctttaacggccacaagtttcctccacttcctaggtttggtatttagttaaggaatcatattaaattaaccaataacaaaagagatacttttgaagaacaaactattccttacccatttttgtagctcaaaaataatttttcaagttcatgaccttattaaaatgaacttgtgtttttttaacaaacgtgtatgttttattttgatagtttctttccgtaagataattgaaatattatactgtaaacccttttcttttctttttttgaaaagtccaagaatgtacttatacaggcatttttccccacctatttttggccattctcataccacagactaaagagtgaaatgatttgtccattgtagcttattgtttatcagtagttcttttgtcagctgcttacattttttctttcatggttttgtgaatcattttcagtatgtaatttataggaaccttgtcctctggttatagtagactgtgtgccctcctccagtgatggcattattagacatgctggtcatttaccctcagaaagactctcttattagaatggtgagtgcttcagttatagtatgtttgaatttttaaaaaattctgttttagaaatgtatcttatgctctcatgactatgcagtttctaaacatacacatagaagctgagtctctgatccaatatgtttttatttgttccatttaatttatcacatagattgggaaggcaagctaaaagccttaaaaatgccctttatattttgagtgatttcagcgttgaacactagtatactatctaaatttgctgctcactttctttaaactgtggcaattaaaggcatgtttatacatgacttaatcgtgaaatgtttgtcactcttactgcacagacttatctgcaatcataactggttagtttttttgttttgtttgttttattgtttttaatgaaactggtaccatctgtgctttcacaaaaaacttccaatgccatttttgagaactaacctaactagtcatgctaaccagaaaatccactggggaggaggttccttttgaaacaaaatgctgttcagttagtaaccaagttactttgattgcaaaagcagctgtgtttctgataagtactgaacaaatgtgtgtaattttctgtgccagacttatgactttgttttcaagcactgtaatgtgggatggatggttagaaacaataatatattagggtttctgtttaaccctttcaggactgaactgtatctccttttgttaattttcccctgtgttgtgataaatgtttgccagcattcagtactgtgttggtccagatgtaggtttatatgctcatttttagcttatttcttgtaccttgcagcatgctctacgcattcagtccttaaggggtttattttacaaactgtgcgcctgtaaggtttattagcaataagatagaaaattgagcaagtttataccataattttgtagaaaaaaagaatctgctcagttccatatttcatccgtgaaaaacttgcaatacgagcagtttcaaggaataaataaaaaggaaatgtaaaccatt

SEQ ID NO: 438048 - DNA, 5579 bp, Homo sapiens
gtgcctctgtttgtggacgatgctgccttgtttgtgattctctcattgaaattatgagactatcattcaaatggaagcattatagttcttcggaaccattatgatctcaaaacgaaaggagaatgatacagatacactggctgaggtgttttgaggtgcatcgaagtgttccaagctgtgacttaccttaacatgttcttgaagtaccatggcgtggattaaaaggaaatttggtgagcggcctccacctaaacgacttactagggaagctatgcgaaattatttaaaagagcgaggggatcaaacagtacttattcttcatgcaaaagttgcacagaagtcatatggaaatgaaaaaaggtttttttgcccacctccttgtgtatatcttatgggcagcggatggaagaaaaaaaaagaacaaatggaacgcgatggttgttctgaacaagagtctcaaccgtgtgcatttattgggataggaaatagtgaccaagaaatgcagcagctaaacttggaaggaaagaactattgcacagccaaaacattgtatatatctgactcagacaagcgaaagcacttcatgttgtctgtaaagatgttctatggcaacagtgatgacattggtgtgttcctcagcaagcggataaaagtcatctccaaaccttccaaaaagaagcagtcattgaaaaatgctgacttatgcattgcctcaggaacaaaggtggctctgtttaatcgactacgatcccagacagttagtaccagatacttgcatgtagaaggaggtaattttcatgccagttcacagcagtggggagccttttttattcatctcttggatgatgatgaatcagaaggagaagaattcacagtccgagatggctacatccattatggacaaacagtcaaacttgtgtgctcagttactggcatggcactcccaagattgataattaggaaagttgataagcagaccgcattattggatgcagatgatcctgtgtcacaactccataaatgtgcattttaccttaaggatacagaaagaatgtatttgtgcctttctcaagaaagaataattcaatttcaggccactccatgtccaaaagaaccaaataaagagatgataaatgatggcgcttcctggacaatcattagcacagataaggcagagtatacattttatgagggaatgggccctgtccttgccccagtcactcctgtgcctgtggtagagagccttcagttgaatggcggtggggacgtagcaatgcttgaacttacaggacagaatttcactccaaatttacgagtgtggtttggggatgtagaagctgaaactatgtacaggtgtggagagagtatgctctgtgtcgtcccagacatttctgcattccgagaaggttggagatgggtccggcaaccagtccaggttccagtaactttggtccgaaatgatggaatcatttattccaccagccttacctttacctacacaccagaaccagggccgcggccacattgcagtgcagcaggagcaatccttcgagccaattcaagccaggtgccccctaacgaatcaaacacaaacagcgagggaagttacacaaacgccagcacaaattcaaccagtgtcacatcatctacagccacagtggtatcctaactaccgtctttttgctaggacttaaactgacttgagtgtggcaaaaagttaacaaaaaaggagaaaaaatgaacaatcgtttgtggtttcttgggaaaacttttcataccaggtgatactattcaaaaaccccgttgtctccctgcaagtgctgatttgaaatgcagaagccacagtaaaaaaaaaaaaaaaaaaaaaaaaaaaagaaaaaaaaatcaaaatgtataaatattggaaatcaagtttttcagctgttttgttggttggttggttggtttttgtttggttttgtttaaatgggcaagaagtaaataatgtggctggaatacaagttgaacaaactagaagacacaaatctaacatagtttttatggaccaaggaacttgtatattgtataagctttagtaaaaggtacattttcaccatacctttttttatatcacggtattatagtacaccttgttaccaaataggttgttctcttccccacccacctttgagcttttgctctaaaatacattcaggttccaagcctgaccatccttgtttaatctatcatactcttccaggttttttttttttggtctaaggctggaacttttttcttttttttcagctgaagtcttatgacttttcatgagtcaaaattgtttggatttcagcaagtcaaatcttgcaaaggcctgcatattttttttaagattatatgaagtctgtgcaaaagctttaaaaaaatgcctctgccttgcctgcaatacatgcaatgtatgttaacttagtctctcttctcagacactgttggtagttatttctgtgttttcctttttttaaaaaaaaatatggacttattgtggttatctgagaggttctaacattcacatgcaatttggtgtggccatttagctattaatgagttaatggcgcagaacttgttgatatttgaagtgttctctccccttttcccatgacgtaaatacataggtgtgttccaggatttgttcaggtttttcccccctcctaatcttgtacataacttgtattatgtgtaagttaaacattttattttgaacttggaatgttcccagtgatttcattcagcagggtattttctgccttgttggcaagtgacaaaaaatatgggaagtatttgctaccagttggtagatggtgcccttaatggtagaatgaggaaaatgtccgcaaaagcatgttttattatctttacttttttggggggttggagggggtagcctagccagaacatcattgtaatcttaaaacataagatgcttttattagatgatcaactaaaatagctggaagacagtactttagaaacagatagttgtaagattataaaatgcaaatgtaacttatgttttcatttttttctctgccttttttgtttgtttgttttctcttttccagtactgagcatctccacaaatgtctcctaactcagaaaatgtttcttttcttttcagttgagatttggttgcattcagggttgtaggttggccttgcttgctaaccccgccggttttaccgtgctttcattcctgaactttgtttatgcctttgtttggtttcttcgaaattgcagcagactcattgggctacatttagtacaggaaccacgtgtgtaatgttatacaacacagtctagtaatacaatcatccctcttagagtaaaaactacctctagattgtggtaagcttttactgtcccataaaacaggagccacagtaccttatgaatgcaaaactgtaacttcctacagtgtttccctacagaacattgtctttctggtgtcctgggctgttttgaaaaagtttccattaatagactttttagaaattattattagtagcattttttttccagctttgctgtcttcatcactcactctatgctcagactatgccactgtaaatattcttcctaacatctttaaatcgccttttcctcagttttcaaggggaaggtcatttgtaaagcacgttaggtggttaaatcagttattgcggttttctcttactgcaagcctttttaatcacccccaggctgcattttattctatatcgccttttttcttcaaatctgctccaatcactcacttctctcttataagctaatcctgcctcacaccttaaatctgtttcagtgatcaagggcagaactcattgtggccttatctttctttgttgtaattgttcactgtctctttcttacagaccacttatttctgagtagtagttattcctctctatggagtcatggcaggaatcattacacagtgcttttgttcagagcatggacatgttcctagtgctgctttgctttaacggccacaagtttcctccacttcctaggtttggtatttagttaaggaatcatattaaattaaccaataacaaaagagatacttttgaagaacaaactattccttacccatttttgtagctcaaaaataatttttcaagttcatgaccttattaaaatgaacttgtgtttttttaacaaacgtgtatgttttattttgatagtttctttccgtaagataattgaaatattatactgtaaacccttttcttttctttttttgaaaagtccaagaatgtacttatacaggcatttttccccacctatttttggccattctcataccacagactaaagagtgaaatgatttgtccattgtagcttattgtttatcagtagttcttttgtcagctgcttacattttttctttcatggttttgtgaatcattttcagtatgtaatttataggaaccttgtcctctggttatagtagactgtgtgccctcctccagtgatggcattattagacatgctggtcatttaccctcagaaagactctcttattagaatggtgagtgcttcagttatagtatgtttgaatttttaaaaaattctgttttagaaatgtatcttatgctctcatgactatgcagtttctaaacatacacatagaagctgagtctctgatccaatatgtttttatttgttccatttaatttatcacatagattgggaaggcaagctaaaagccttaaaaatgccctttatattttgagtgatttcagcgttgaacactagtatactatctaaatttgctgctcactttctttaaactgtggcaattaaaggcatgtttatacatgacttaatcgtgaaatgtttgtcactcttactgcacagacttatctgcaatcataactggttagtttttttgttttgtttgttttattgtttttaatgaaactggtaccatctgtgctttcacaaaaaacttccaatgccatttttgagaactaacctaactagtcatgctaaccagaaaatccactggggaggaggttccttttgaaacaaaatgctgttcagttagtaaccaagttactttgattgcaaaagcagctgtgtttctgataagtactgaacaaatgtgtgtaattttctgtgccagacttatgactttgttttcaagcactgtaatgtgggatggatggttagaaacaataatatattagggtttctgtttaaccctttcaggactgaactgtatctccttttgttaattttcccctgtgttgtgataaatgtttgccagcattcagtactgtgttggtccagatgtaggtttatatgctcatttttagcttatttcttgtaccttgcagcatgctctacgcattcagtccttaaggggtttattttacaaactgtgcgcctgtaaggtttattagcaataagatagaaaattgagcaagtttataccataattttgtagaaaaaaagaatctgctcagttccatatttcatccgtgaaaaacttgcaatacgagcagtttcaaggaataaataaaaaggaaatgtaaaccatt

SEQ ID NO: 438049 - DNA, 6018 bp, Homo sapiens
tgtaaaaaaagcaggcggtaccggaccggaaaacccggtaggtttccagggaaggcagcgagcaggatcccctactctgcgggcggcgcgaggcgtctggctcttcgcggcggcggcgaggggaaagggagcgcgggggctgggtggaatcgaggagtgaggaaaaagggaaggggcgggggagagggaccagggaaggcgtcggggggaatctcgcgagggttggagttttggcgagagtttgtggaagatggcgcctgttgtgacaggtcattgaaattatgagactatcattcaaatggaagcattatagttcttcggaaccattatgatctcaaaacgaaaggagaatgatacagatacactggctgaggtgttttgaggtgcatcgaagtgttccaagctgtgacttaccttaacatgttcttgaagtaccatggcgtggattaaaaggaaatttggtgagcggcctccacctaaacgacttactagggaagctatgcgaaattatttaaaagagcgaggggatcaaacagtacttattcttcatgcaaaagttgcacagaagtcatatggaaatgaaaaaaggtttttttgcccacctccttgtgtatatcttatgggcagcggatggaagaaaaaaaaagaacaaatggaacgcgatggttgttctgaacaagagtctcaaccgtgtgcatttattgggataggaaatagtgaccaagaaatgcagcagctaaacttggaaggaaagaactattgcacagccaaaacattgtatatatctgactcagacaagcgaaagcacttcatgttgtctgtaaagatgttctatggcaacagtgatgacattggtgtgttcctcagcaagcggataaaagtcatctccaaaccttccaaaaagaagcagtcattgaaaaatgctgacttatgcattgcctcaggaacaaaggtggctctgtttaatcgactacgatcccagacagttagtaccagatacttgcatgtagaaggaggtaattttcatgccagttcacagcagtggggagccttttttattcatctcttggatgatgatgaatcagaaggagaagaattcacagtccgagatggctacatccattatggacaaacagtcaaacttgtgtgctcagttactggcatggcactcccaagattgataattaggaaagttgataagcagaccgcattattggatgcagatgatcctgtgtcacaactccataaatgtgcattttaccttaaggatacagaaagaatgtatttgtgcctttctcaagaaagaataattcaatttcaggccactccatgtccaaaagaaccaaataaagagatgataaatgatggcgcttcctggacaatcattagcacagataaggcagagtatacattttatgagggaatgggccctgtccttgccccagtcactcctgtgcctgtggtagagagccttcagttgaatggcggtggggacgtagcaatgcttgaacttacaggacagaatttcactccaaatttacgagtgtggtttggggatgtagaagctgaaactatgtacaggtgtggagagagtatgctctgtgtcgtcccagacatttctgcattccgagaaggttggagatgggtccggcaaccagtccaggttccagtaactttggtccgaaatgatggaatcatttattccaccagccttacctttacctacacaccagaaccagggccgcggccacattgcagtgcagcaggagcaatccttcgagccaattcaagccaggtgccccctaacgaatcaaacacaaacagcgagggaagttacacaaacgccagcacaaattcaaccagtgtcacatcatctacagccacagtggtatcctaactaccgtctttttgctaggacttaaactgacttgagtgtggcaaaaagttaacaaaaaaggagaaaaaatgaacaatcgtttgtggtttcttgggaaaacttttcataccaggtgatactattcaaaaaccccgttgtctccctgcaagtgctgatttgaaatgcagaagccacagtaaaaaaaaaaaaaaaaaaaaaaaaaaaagaaaaaaaaatcaaaatgtataaatattggaaatcaagtttttcagctgttttgttggttggttggttggtttttgtttggttttgtttaaatgggcaagaagtaaataatgtggctggaatacaagttgaacaaactagaagacacaaatctaacatagtttttatggaccaaggaacttgtatattgtataagctttagtaaaaggtacattttcaccatacctttttttatatcacggtattatagtacaccttgttaccaaataggttgttctcttccccacccacctttgagcttttgctctaaaatacattcaggttccaagcctgaccatccttgtttaatctatcatactcttccaggttttttttttttggtctaaggctggaacttttttcttttttttcagctgaagtcttatgacttttcatgagtcaaaattgtttggatttcagcaagtcaaatcttgcaaaggcctgcatattttttttaagattatatgaagtctgtgcaaaagctttaaaaaaatgcctctgccttgcctgcaatacatgcaatgtatgttaacttagtctctcttctcagacactgttggtagttatttctgtgttttcctttttttaaaaaaaaatatggacttattgtggttatctgagaggttctaacattcacatgcaatttggtgtggccatttagctattaatgagttaatggcgcagaacttgttgatatttgaagtgttctctccccttttcccatgacgtaaatacataggtgtgttccaggatttgttcaggtttttcccccctcctaatcttgtacataacttgtattatgtgtaagttaaacattttattttgaacttggaatgttcccagtgatttcattcagcagggtattttctgccttgttggcaagtgacaaaaaatatgggaagtatttgctaccagttggtagatggtgcccttaatggtagaatgaggaaaatgtccgcaaaagcatgttttattatctttacttttttggggggttggagggggtagcctagccagaacatcattgtaatcttaaaacataagatgcttttattagatgatcaactaaaatagctggaagacagtactttagaaacagatagttgtaagattataaaatgcaaatgtaacttatgttttcatttttttctctgccttttttgtttgtttgttttctcttttccagtactgagcatctccacaaatgtctcctaactcagaaaatgtttcttttcttttcagttgagatttggttgcattcagggttgtaggttggccttgcttgctaaccccgccggttttaccgtgctttcattcctgaactttgtttatgcctttgtttggtttcttcgaaattgcagcagactcattgggctacatttagtacaggaaccacgtgtgtaatgttatacaacacagtctagtaatacaatcatccctcttagagtaaaaactacctctagattgtggtaagcttttactgtcccataaaacaggagccacagtaccttatgaatgcaaaactgtaacttcctacagtgtttccctacagaacattgtctttctggtgtcctgggctgttttgaaaaagtttccattaatagactttttagaaattattattagtagcattttttttccagctttgctgtcttcatcactcactctatgctcagactatgccactgtaaatattcttcctaacatctttaaatcgccttttcctcagttttcaaggggaaggtcatttgtaaagcacgttaggtggttaaatcagttattgcggttttctcttactgcaagcctttttaatcacccccaggctgcattttattctatatcgccttttttcttcaaatctgctccaatcactcacttctctcttataagctaatcctgcctcacaccttaaatctgtttcagtgatcaagggcagaactcattgtggccttatctttctttgttgtaattgttcactgtctctttcttacagaccacttatttctgagtagtagttattcctctctatggagtcatggcaggaatcattacacagtgcttttgttcagagcatggacatgttcctagtgctgctttgctttaacggccacaagtttcctccacttcctaggtttggtatttagttaaggaatcatattaaattaaccaataacaaaagagatacttttgaagaacaaactattccttacccatttttgtagctcaaaaataatttttcaagttcatgaccttattaaaatgaacttgtgtttttttaacaaacgtgtatgttttattttgatagtttctttccgtaagataattgaaatattatactgtaaacccttttcttttctttttttgaaaagtccaagaatgtacttatacaggcatttttccccacctatttttggccattctcataccacagactaaagagtgaaatgatttgtccattgtagcttattgtttatcagtagttcttttgtcagctgcttacattttttctttcatggttttgtgaatcattttcagtatgtaatttataggaaccttgtcctctggttatagtagactgtgtgccctcctccagtgatggcattattagacatgctggtcatttaccctcagaaagactctcttattagaatggtgagtgcttcagttatagtatgtttgaatttttaaaaaattctgttttagaaatgtatcttatgctctcatgactatgcagtttctaaacatacacatagaagctgagtctctgatccaatatgtttttatttgttccatttaatttatcacatagattgggaaggcaagctaaaagccttaaaaatgccctttatattttgagtgatttcagcgttgaacactagtatactatctaaatttgctgctcactttctttaaactgtggcaattaaaggcatgtttatacatgacttaatcgtgaaatgtttgtcactcttactgcacagacttatctgcaatcataactggttagtttttttgttttgtttgttttattgtttttaatgaaactggtaccatctgtgctttcacaaaaaacttccaatgccatttttgagaactaacctaactagtcatgctaaccagaaaatccactggggaggaggttccttttgaaacaaaatgctgttcagttagtaaccaagttactttgattgcaaaagcagctgtgtttctgataagtactgaacaaatgtgtgtaattttctgtgccagacttatgactttgttttcaagcactgtaatgtgggatggatggttagaaacaataatatattagggtttctgtttaaccctttcaggactgaactgtatctccttttgttaattttcccctgtgttgtgataaatgtttgccagcattcagtactgtgttggtccagatgtaggtttatatgctcatttttagcttatttcttgtaccttgcagcatgctctacgcattcagtccttaaggggtttattttacaaactgtgcgcctgtaaggtttattagcaataagatagaaaattgagcaagtttataccataattttgtagaaaaaaagaatctgctcagttccatatttcatccgtgaaaaacttgcaatacgagcagtttcaaggaataaataaaaaggaaatgtaaaccattgtaaaagtcttctgtcgaatgtgcctgatgcatgtattatcgtcttttatttcagaatacttcataaagataaaattaaattctatattatagttggtgtatttacaatcttaccatgtacatcacatcaaagtgatagctctactaatttaatttccttgtcaatgtttttaactatatagtgctttaaagagattttttttccctgtgt

SEQ ID NO: 438050 - DNA, 5624 bp, Homo sapiens
tgtaaaaaaagcaggcggtaccggaccggaaaacccggtaggtttccagggaaggcagcgagcaggatcccctactctgcgggcggcgcgaggcgtctggctcttcgcggcggcggcgaggggaaagggagcgcgggggctgggtggaatcgaggagtgaggaaaaagggaaggggcgggggagagggaccagggaaggcgtcggggggaatctcgcgagggttggagttttggcgagagtttgtggaagatggcgcctgttgtgacagggaaatttggtgagcggcctccacctaaacgacttactagggaagctatgcgaaattatttaaaagagcgaggggatcaaacagtacttattcttcatgcaaaagttgcacagaagtcatatggaaatgaaaaaaggtttttttgcccacctccttgtgtatatcttatgggcagcggatggaagaaaaaaaaagaacaaatggaacgcgatggttgttctgaacaagagtctcaaccgtgtgcatttattgggataggaaatagtgaccaagaaatgcagcagctaaacttggaaggaaagaactattgcacagccaaaacattgtatatatctgactcagacaagcgaaagcacttcatgttgtctgtaaagatgttctatggcaacagtgatgacattggtgtgttcctcagcaagcggataaaagtcatctccaaaccttccaaaaagaagcagtcattgaaaaatgctgacttatgcattgcctcaggaacaaaggtggctctgtttaatcgactacgatcccagacagttagtaccagatacttgcatgtagaaggaggtaattttcatgccagttcacagcagtggggagccttttttattcatctcttggatgatgatgaatcagaaggagaagaattcacagtccgagatggctacatccattatggacaaacagtcaaacttgtgtgctcagttactggcatggcactcccaagattgataattaggaaagttgataagcagaccgcattattggatgcagatgatcctgtgtcacaactccataaatgtgcattttaccttaaggatacagaaagaatgtatttgtgcctttctcaagaaagaataattcaatttcaggccactccatgtccaaaagaaccaaataaagagatgataaatgatggcgcttcctggacaatcattagcacagataaggcagagtatacattttatgagggaatgggccctgtccttgccccagtcactcctgtgcctgtggtagagagccttcagttgaatggcggtggggacgtagcaatgcttgaacttacaggacagaatttcactccaaatttacgagtgtggtttggggatgtagaagctgaaactatgtacaggtgtggagagagtatgctctgtgtcgtcccagacatttctgcattccgagaaggttggagatgggtccggcaaccagtccaggttccagtaactttggtccgaaatgatggaatcatttattccaccagccttacctttacctacacaccagaaccagggccgcggccacattgcagtgcagcaggagcaatccttcgagccaattcaagccaggtgccccctaacgaatcaaacacaaacagcgagggaagttacacaaacgccagcacaaattcaaccagtgtcacatcatctacagccacagtggtatcctaactaccgtctttttgctaggacttaaactgacttgagtgtggcaaaaagttaacaaaaaaggagaaaaaatgaacaatcgtttgtggtttcttgggaaaacttttcataccaggtgatactattcaaaaaccccgttgtctccctgcaagtgctgatttgaaatgcagaagccacagtaaaaaaaaaaaaaaaaaaaaaaaaaaaagaaaaaaaaatcaaaatgtataaatattggaaatcaagtttttcagctgttttgttggttggttggttggtttttgtttggttttgtttaaatgggcaagaagtaaataatgtggctggaatacaagttgaacaaactagaagacacaaatctaacatagtttttatggaccaaggaacttgtatattgtataagctttagtaaaaggtacattttcaccatacctttttttatatcacggtattatagtacaccttgttaccaaataggttgttctcttccccacccacctttgagcttttgctctaaaatacattcaggttccaagcctgaccatccttgtttaatctatcatactcttccaggttttttttttttggtctaaggctggaacttttttcttttttttcagctgaagtcttatgacttttcatgagtcaaaattgtttggatttcagcaagtcaaatcttgcaaaggcctgcatattttttttaagattatatgaagtctgtgcaaaagctttaaaaaaatgcctctgccttgcctgcaatacatgcaatgtatgttaacttagtctctcttctcagacactgttggtagttatttctgtgttttcctttttttaaaaaaaaatatggacttattgtggttatctgagaggttctaacattcacatgcaatttggtgtggccatttagctattaatgagttaatggcgcagaacttgttgatatttgaagtgttctctccccttttcccatgacgtaaatacataggtgtgttccaggatttgttcaggtttttcccccctcctaatcttgtacataacttgtattatgtgtaagttaaacattttattttgaacttggaatgttcccagtgatttcattcagcagggtattttctgccttgttggcaagtgacaaaaaatatgggaagtatttgctaccagttggtagatggtgcccttaatggtagaatgaggaaaatgtccgcaaaagcatgttttattatctttacttttttggggggttggagggggtagcctagccagaacatcattgtaatcttaaaacataagatgcttttattagatgatcaactaaaatagctggaagacagtactttagaaacagatagttgtaagattataaaatgcaaatgtaacttatgttttcatttttttctctgccttttttgtttgtttgttttctcttttccagtactgagcatctccacaaatgtctcctaactcagaaaatgtttcttttcttttcagttgagatttggttgcattcagggttgtaggttggccttgcttgctaaccccgccggttttaccgtgctttcattcctgaactttgtttatgcctttgtttggtttcttcgaaattgcagcagactcattgggctacatttagtacaggaaccacgtgtgtaatgttatacaacacagtctagtaatacaatcatccctcttagagtaaaaactacctctagattgtggtaagcttttactgtcccataaaacaggagccacagtaccttatgaatgcaaaactgtaacttcctacagtgtttccctacagaacattgtctttctggtgtcctgggctgttttgaaaaagtttccattaatagactttttagaaattattattagtagcattttttttccagctttgctgtcttcatcactcactctatgctcagactatgccactgtaaatattcttcctaacatctttaaatcgccttttcctcagttttcaaggggaaggtcatttgtaaagcacgttaggtggttaaatcagttattgcggttttctcttactgcaagcctttttaatcacccccaggctgcattttattctatatcgccttttttcttcaaatctgctccaatcactcacttctctcttataagctaatcctgcctcacaccttaaatctgtttcagtgatcaagggcagaactcattgtggccttatctttctttgttgtaattgttcactgtctctttcttacagaccacttatttctgagtagtagttattcctctctatggagtcatggcaggaatcattacacagtgcttttgttcagagcatggacatgttcctagtgctgctttgctttaacggccacaagtttcctccacttcctaggtttggtatttagttaaggaatcatattaaattaaccaataacaaaagagatacttttgaagaacaaactattccttacccatttttgtagctcaaaaataatttttcaagttcatgaccttattaaaatgaacttgtgtttttttaacaaacgtgtatgttttattttgatagtttctttccgtaagataattgaaatattatactgtaaacccttttcttttctttttttgaaaagtccaagaatgtacttatacaggcatttttccccacctatttttggccattctcataccacagactaaagagtgaaatgatttgtccattgtagcttattgtttatcagtagttcttttgtcagctgcttacattttttctttcatggttttgtgaatcattttcagtatgtaatttataggaaccttgtcctctggttatagtagactgtgtgccctcctccagtgatggcattattagacatgctggtcatttaccctcagaaagactctcttattagaatggtgagtgcttcagttatagtatgtttgaatttttaaaaaattctgttttagaaatgtatcttatgctctcatgactatgcagtttctaaacatacacatagaagctgagtctctgatccaatatgtttttatttgttccatttaatttatcacatagattgggaaggcaagctaaaagccttaaaaatgccctttatattttgagtgatttcagcgttgaacactagtatactatctaaatttgctgctcactttctttaaactgtggcaattaaaggcatgtttatacatgacttaatcgtgaaatgtttgtcactcttactgcacagacttatctgcaatcataactggttagtttttttgttttgtttgttttattgtttttaatgaaactggtaccatctgtgctttcacaaaaaacttccaatgccatttttgagaactaacctaactagtcatgctaaccagaaaatccactggggaggaggttccttttgaaacaaaatgctgttcagttagtaaccaagttactttgattgcaaaagcagctgtgtttctgataagtactgaacaaatgtgtgtaattttctgtgccagacttatgactttgttttcaagcactgtaatgtgggatggatggttagaaacaataatatattagggtttctgtttaaccctttcaggactgaactgtatctccttttgttaattttcccctgtgttgtgataaatgtttgccagcattcagtactgtgttggtccagatgtaggtttatatgctcatttttagcttatttcttgtaccttgcagcatgctctacgcattcagtccttaaggggtttattttacaaactgtgcgcctgtaaggtttattagcaataagatagaaaattgagcaagtttataccataattttgtagaaaaaaagaatctgctcagttccatatttcatccgtgaaaaacttgcaatacgagcagtttcaaggaataaataaaaaggaaatgtaaaccatt

SEQ ID NO: 438051 - DNA, 5403 bp, Homo sapiens
gcctactactactaaattaaaggccgcgtcgaccgcctgttgtgacagggaaatttggtgagcggcctccacctaaacgacttactagggaagctatgcgaaattatttaaaagagcgaggggatcaaacagtacttattcttcatgcaaaagttgcacagaagtcatatggaaatgaaaaaaggtttttttgcccacctccttgtgtatatcttatgggcagcggatggaagaaaaaaaaagaacaaatggaacgcgatggttgttctgaacaagagtctcaaccgtgtgcatttattgggataggaaatagtgaccaagaaatgcagcagctaaacttggaaggaaagaactattgcacagccaaaacattgtatatatctgactcagacaagcgaaagcacttcatgttgtctgtaaagatgttctatggcaacagtgatgacattggtgtgttcctcagcaagcggataaaagtcatctccaaaccttccaaaaagaagcagtcattgaaaaatgctgacttatgcattgcctcaggaacaaaggtggctctgtttaatcgactacgatcccagacagttagtaccagatacttgcatgtagaaggaggtaattttcatgccagttcacagcagtggggagccttttttattcatctcttggatgatgatgaatcagaaggagaagaattcacagtccgagatggctacatccattatggacaaacagtcaaacttgtgtgctcagttactggcatggcactcccaagattgataattaggaaagttgataagcagaccgcattattggatgcagatgatcctgtgtcacaactccataaatgtgcattttaccttaaggatacagaaagaatgtatttgtgcctttctcaagaaagaataattcaatttcaggccactccatgtccaaaagaaccaaataaagagatgataaatgatggcgcttcctggacaatcattagcacagataaggcagagtatacattttatgagggaatgggccctgtccttgccccagtcactcctgtgcctgtggtagagagccttcagttgaatggcggtggggacgtagcaatgcttgaacttacaggacagaatttcactccaaatttacgagtgtggtttggggatgtagaagctgaaactatgtacaggtgtggagagagtatgctctgtgtcgtcccagacatttctgcattccgagaaggttggagatgggtccggcaaccagtccaggttccagtaactttggtccgaaatgatggaatcatttattccaccagccttacctttacctacacaccagaaccagggccgcggccacattgcagtgcagcaggagcaatccttcgagccaattcaagccaggtgccccctaacgaatcaaacacaaacagcgagggaagttacacaaacgccagcacaaattcaaccagtgtcacatcatctacagccacagtggtatcctaactaccgtctttttgctaggacttaaactgacttgagtgtggcaaaaagttaacaaaaaaggagaaaaaatgaacaatcgtttgtggtttcttgggaaaacttttcataccaggtgatactattcaaaaaccccgttgtctccctgcaagtgctgatttgaaatgcagaagccacagtaaaaaaaaaaaaaaaaaaaaaaaaaaaagaaaaaaaaatcaaaatgtataaatattggaaatcaagtttttcagctgttttgttggttggttggttggtttttgtttggttttgtttaaatgggcaagaagtaaataatgtggctggaatacaagttgaacaaactagaagacacaaatctaacatagtttttatggaccaaggaacttgtatattgtataagctttagtaaaaggtacattttcaccatacctttttttatatcacggtattatagtacaccttgttaccaaataggttgttctcttccccacccacctttgagcttttgctctaaaatacattcaggttccaagcctgaccatccttgtttaatctatcatactcttccaggttttttttttttggtctaaggctggaacttttttcttttttttcagctgaagtcttatgacttttcatgagtcaaaattgtttggatttcagcaagtcaaatcttgcaaaggcctgcatattttttttaagattatatgaagtctgtgcaaaagctttaaaaaaatgcctctgccttgcctgcaatacatgcaatgtatgttaacttagtctctcttctcagacactgttggtagttatttctgtgttttcctttttttaaaaaaaaatatggacttattgtggttatctgagaggttctaacattcacatgcaatttggtgtggccatttagctattaatgagttaatggcgcagaacttgttgatatttgaagtgttctctccccttttcccatgacgtaaatacataggtgtgttccaggatttgttcaggtttttcccccctcctaatcttgtacataacttgtattatgtgtaagttaaacattttattttgaacttggaatgttcccagtgatttcattcagcagggtattttctgccttgttggcaagtgacaaaaaatatgggaagtatttgctaccagttggtagatggtgcccttaatggtagaatgaggaaaatgtccgcaaaagcatgttttattatctttacttttttggggggttggagggggtagcctagccagaacatcattgtaatcttaaaacataagatgcttttattagatgatcaactaaaatagctggaagacagtactttagaaacagatagttgtaagattataaaatgcaaatgtaacttatgttttcatttttttctctgccttttttgtttgtttgttttctcttttccagtactgagcatctccacaaatgtctcctaactcagaaaatgtttcttttcttttcagttgagatttggttgcattcagggttgtaggttggccttgcttgctaaccccgccggttttaccgtgctttcattcctgaactttgtttatgcctttgtttggtttcttcgaaattgcagcagactcattgggctacatttagtacaggaaccacgtgtgtaatgttatacaacacagtctagtaatacaatcatccctcttagagtaaaaactacctctagattgtggtaagcttttactgtcccataaaacaggagccacagtaccttatgaatgcaaaactgtaacttcctacagtgtttccctacagaacattgtctttctggtgtcctgggctgttttgaaaaagtttccattaatagactttttagaaattattattagtagcattttttttccagctttgctgtcttcatcactcactctatgctcagactatgccactgtaaatattcttcctaacatctttaaatcgccttttcctcagttttcaaggggaaggtcatttgtaaagcacgttaggtggttaaatcagttattgcggttttctcttactgcaagcctttttaatcacccccaggctgcattttattctatatcgccttttttcttcaaatctgctccaatcactcacttctctcttataagctaatcctgcctcacaccttaaatctgtttcagtgatcaagggcagaactcattgtggccttatctttctttgttgtaattgttcactgtctctttcttacagaccacttatttctgagtagtagttattcctctctatggagtcatggcaggaatcattacacagtgcttttgttcagagcatggacatgttcctagtgctgctttgctttaacggccacaagtttcctccacttcctaggtttggtatttagttaaggaatcatattaaattaaccaataacaaaagagatacttttgaagaacaaactattccttacccatttttgtagctcaaaaataatttttcaagttcatgaccttattaaaatgaacttgtgtttttttaacaaacgtgtatgttttattttgatagtttctttccgtaagataattgaaatattatactgtaaacccttttcttttctttttttgaaaagtccaagaatgtacttatacaggcatttttccccacctatttttggccattctcataccacagactaaagagtgaaatgatttgtccattgtagcttattgtttatcagtagttcttttgtcagctgcttacattttttctttcatggttttgtgaatcattttcagtatgtaatttataggaaccttgtcctctggttatagtagactgtgtgccctcctccagtgatggcattattagacatgctggtcatttaccctcagaaagactctcttattagaatggtgagtgcttcagttatagtatgtttgaatttttaaaaaattctgttttagaaatgtatcttatgctctcatgactatgcagtttctaaacatacacatagaagctgagtctctgatccaatatgtttttatttgttccatttaatttatcacatagattgggaaggcaagctaaaagccttaaaaatgccctttatattttgagtgatttcagcgttgaacactagtatactatctaaatttgctgctcactttctttaaactgtggcaattaaaggcatgtttatacatgacttaatcgtgaaatgtttgtcactcttactgcacagacttatctgcaatcataactggttagtttttttgttttgtttgttttattgtttttaatgaaactggtaccatctgtgctttcacaaaaaacttccaatgccatttttgagaactaacctaactagtcatgctaaccagaaaatccactggggaggaggttccttttgaaacaaaatgctgttcagttagtaaccaagttactttgattgcaaaagcagctgtgtttctgataagtactgaacaaatgtgtgtaattttctgtgccagacttatgactttgttttcaagcactgtaatgtgggatggatggttagaaacaataatatattagggtttctgtttaaccctttcaggactgaactgtatctccttttgttaattttcccctgtgttgtgataaatgtttgccagcattcagtactgtgttggtccagatgtaggtttatatgctcatttttagcttatttcttgtaccttgcagcatgctctacgcattcagtccttaaggggtttattttacaaactgtgcgcctgtaaggtttattagcaataagatagaaaattgagcaagtttataccataattttgtagaaaaaaagaatctgctcagttccatatttcatccgtgaaaaacttgcaatacgagcagtttcaaggaataaataaaaaggaaatgtaaaccatt

SEQ ID NO: 438052 - DNA, 5665 bp, Homo sapiens
tgcctgggggccccgtgcatctttgttcctcgcggccgttgtcgccgcttcgccccgctagtgcccccggccccgggcgctttgtctttcaccgctaccccctgcgactctctacccccggccctttgtttcgccgccttgggcgctttgtccgacccgtggcgtcccgcatcccctctccatctcctcccctccgctgtccttcctcccgtgcccctttgttgtgccacactcttgtcgttagcccagtgacctgccacagcccgggcaccagatttctgccttaattgttcttccattgtctttctcctgaaatttggtgagcggcctccacctaaacgacttactagggaagctatgcgaaattatttaaaagagcgaggggatcaaacagtacttattcttcatgcaaaagttgcacagaagtcatatggaaatgaaaaaaggtttttttgcccacctccttgtgtatatcttatgggcagcggatggaagaaaaaaaaagaacaaatggaacgcgatggttgttctgaacaagagtctcaaccgtgtgcatttattgggataggaaatagtgaccaagaaatgcagcagctaaacttggaaggaaagaactattgcacagccaaaacattgtatatatctgactcagacaagcgaaagcacttcatgttgtctgtaaagatgttctatggcaacagtgatgacattggtgtgttcctcagcaagcggataaaagtcatctccaaaccttccaaaaagaagcagtcattgaaaaatgctgacttatgcattgcctcaggaacaaaggtggctctgtttaatcgactacgatcccagacagttagtaccagatacttgcatgtagaaggaggtaattttcatgccagttcacagcagtggggagccttttttattcatctcttggatgatgatgaatcagaaggagaagaattcacagtccgagatggctacatccattatggacaaacagtcaaacttgtgtgctcagttactggcatggcactcccaagattgataattaggaaagttgataagcagaccgcattattggatgcagatgatcctgtgtcacaactccataaatgtgcattttaccttaaggatacagaaagaatgtatttgtgcctttctcaagaaagaataattcaatttcaggccactccatgtccaaaagaaccaaataaagagatgataaatgatggcgcttcctggacaatcattagcacagataaggcagagtatacattttatgagggaatgggccctgtccttgccccagtcactcctgtgcctgtggtagagagccttcagttgaatggcggtggggacgtagcaatgcttgaacttacaggacagaatttcactccaaatttacgagtgtggtttggggatgtagaagctgaaactatgtacaggtgtggagagagtatgctctgtgtcgtcccagacatttctgcattccgagaaggttggagatgggtccggcaaccagtccaggttccagtaactttggtccgaaatgatggaatcatttattccaccagccttacctttacctacacaccagaaccagggccgcggccacattgcagtgcagcaggagcaatccttcgagccaattcaagccaggtgccccctaacgaatcaaacacaaacagcgagggaagttacacaaacgccagcacaaattcaaccagtgtcacatcatctacagccacagtggtatcctaactaccgtctttttgctaggacttaaactgacttgagtgtggcaaaaagttaacaaaaaaggagaaaaaatgaacaatcgtttgtggtttcttgggaaaacttttcataccaggtgatactattcaaaaaccccgttgtctccctgcaagtgctgatttgaaatgcagaagccacagtaaaaaaaaaaaaaaaaaaaaaaaaaaaagaaaaaaaaatcaaaatgtataaatattggaaatcaagtttttcagctgttttgttggttggttggttggtttttgtttggttttgtttaaatgggcaagaagtaaataatgtggctggaatacaagttgaacaaactagaagacacaaatctaacatagtttttatggaccaaggaacttgtatattgtataagctttagtaaaaggtacattttcaccatacctttttttatatcacggtattatagtacaccttgttaccaaataggttgttctcttccccacccacctttgagcttttgctctaaaatacattcaggttccaagcctgaccatccttgtttaatctatcatactcttccaggttttttttttttggtctaaggctggaacttttttcttttttttcagctgaagtcttatgacttttcatgagtcaaaattgtttggatttcagcaagtcaaatcttgcaaaggcctgcatattttttttaagattatatgaagtctgtgcaaaagctttaaaaaaatgcctctgccttgcctgcaatacatgcaatgtatgttaacttagtctctcttctcagacactgttggtagttatttctgtgttttcctttttttaaaaaaaaatatggacttattgtggttatctgagaggttctaacattcacatgcaatttggtgtggccatttagctattaatgagttaatggcgcagaacttgttgatatttgaagtgttctctccccttttcccatgacgtaaatacataggtgtgttccaggatttgttcaggtttttcccccctcctaatcttgtacataacttgtattatgtgtaagttaaacattttattttgaacttggaatgttcccagtgatttcattcagcagggtattttctgccttgttggcaagtgacaaaaaatatgggaagtatttgctaccagttggtagatggtgcccttaatggtagaatgaggaaaatgtccgcaaaagcatgttttattatctttacttttttggggggttggagggggtagcctagccagaacatcattgtaatcttaaaacataagatgcttttattagatgatcaactaaaatagctggaagacagtactttagaaacagatagttgtaagattataaaatgcaaatgtaacttatgttttcatttttttctctgccttttttgtttgtttgttttctcttttccagtactgagcatctccacaaatgtctcctaactcagaaaatgtttcttttcttttcagttgagatttggttgcattcagggttgtaggttggccttgcttgctaaccccgccggttttaccgtgctttcattcctgaactttgtttatgcctttgtttggtttcttcgaaattgcagcagactcattgggctacatttagtacaggaaccacgtgtgtaatgttatacaacacagtctagtaatacaatcatccctcttagagtaaaaactacctctagattgtggtaagcttttactgtcccataaaacaggagccacagtaccttatgaatgcaaaactgtaacttcctacagtgtttccctacagaacattgtctttctggtgtcctgggctgttttgaaaaagtttccattaatagactttttagaaattattattagtagcattttttttccagctttgctgtcttcatcactcactctatgctcagactatgccactgtaaatattcttcctaacatctttaaatcgccttttcctcagttttcaaggggaaggtcatttgtaaagcacgttaggtggttaaatcagttattgcggttttctcttactgcaagcctttttaatcacccccaggctgcattttattctatatcgccttttttcttcaaatctgctccaatcactcacttctctcttataagctaatcctgcctcacaccttaaatctgtttcagtgatcaagggcagaactcattgtggccttatctttctttgttgtaattgttcactgtctctttcttacagaccacttatttctgagtagtagttattcctctctatggagtcatggcaggaatcattacacagtgcttttgttcagagcatggacatgttcctagtgctgctttgctttaacggccacaagtttcctccacttcctaggtttggtatttagttaaggaatcatattaaattaaccaataacaaaagagatacttttgaagaacaaactattccttacccatttttgtagctcaaaaataatttttcaagttcatgaccttattaaaatgaacttgtgtttttttaacaaacgtgtatgttttattttgatagtttctttccgtaagataattgaaatattatactgtaaacccttttcttttctttttttgaaaagtccaagaatgtacttatacaggcatttttccccacctatttttggccattctcataccacagactaaagagtgaaatgatttgtccattgtagcttattgtttatcagtagttcttttgtcagctgcttacattttttctttcatggttttgtgaatcattttcagtatgtaatttataggaaccttgtcctctggttatagtagactgtgtgccctcctccagtgatggcattattagacatgctggtcatttaccctcagaaagactctcttattagaatggtgagtgcttcagttatagtatgtttgaatttttaaaaaattctgttttagaaatgtatcttatgctctcatgactatgcagtttctaaacatacacatagaagctgagtctctgatccaatatgtttttatttgttccatttaatttatcacatagattgggaaggcaagctaaaagccttaaaaatgccctttatattttgagtgatttcagcgttgaacactagtatactatctaaatttgctgctcactttctttaaactgtggcaattaaaggcatgtttatacatgacttaatcgtgaaatgtttgtcactcttactgcacagacttatctgcaatcataactggttagtttttttgttttgtttgttttattgtttttaatgaaactggtaccatctgtgctttcacaaaaaacttccaatgccatttttgagaactaacctaactagtcatgctaaccagaaaatccactggggaggaggttccttttgaaacaaaatgctgttcagttagtaaccaagttactttgattgcaaaagcagctgtgtttctgataagtactgaacaaatgtgtgtaattttctgtgccagacttatgactttgttttcaagcactgtaatgtgggatggatggttagaaacaataatatattagggtttctgtttaaccctttcaggactgaactgtatctccttttgttaattttcccctgtgttgtgataaatgtttgccagcattcagtactgtgttggtccagatgtaggtttatatgctcatttttagcttatttcttgtaccttgcagcatgctctacgcattcagtccttaaggggtttattttacaaactgtgcgcctgtaaggtttattagcaataagatagaaaattgagcaagtttataccataattttgtagaaaaaaagaatctgctcagttccatatttcatccgtgaaaaacttgcaatacgagcagtttcaaggaataaataaaaaggaaatgtaaaccatt

SEQ ID NO: 438053 - DNA, 5443 bp, Homo sapiens
ttagaaggaggctcaagatgtatatatgtgtttttctgttagtgtttgagaatagtttcagatagccacaatggatattcatttggcgtgaaatttggtgagcggcctccacctaaacgacttactagggaagctatgcgaaattatttaaaagagcgaggggatcaaacagtacttattcttcatgcaaaagttgcacagaagtcatatggaaatgaaaaaaggtttttttgcccacctccttgtgtatatcttatgggcagcggatggaagaaaaaaaaagaacaaatggaacgcgatggttgttctgaacaagagtctcaaccgtgtgcatttattgggataggaaatagtgaccaagaaatgcagcagctaaacttggaaggaaagaactattgcacagccaaaacattgtatatatctgactcagacaagcgaaagcacttcatgttgtctgtaaagatgttctatggcaacagtgatgacattggtgtgttcctcagcaagcggataaaagtcatctccaaaccttccaaaaagaagcagtcattgaaaaatgctgacttatgcattgcctcaggaacaaaggtggctctgtttaatcgactacgatcccagacagttagtaccagatacttgcatgtagaaggaggtaattttcatgccagttcacagcagtggggagccttttttattcatctcttggatgatgatgaatcagaaggagaagaattcacagtccgagatggctacatccattatggacaaacagtcaaacttgtgtgctcagttactggcatggcactcccaagattgataattaggaaagttgataagcagaccgcattattggatgcagatgatcctgtgtcacaactccataaatgtgcattttaccttaaggatacagaaagaatgtatttgtgcctttctcaagaaagaataattcaatttcaggccactccatgtccaaaagaaccaaataaagagatgataaatgatggcgcttcctggacaatcattagcacagataaggcagagtatacattttatgagggaatgggccctgtccttgccccagtcactcctgtgcctgtggtagagagccttcagttgaatggcggtggggacgtagcaatgcttgaacttacaggacagaatttcactccaaatttacgagtgtggtttggggatgtagaagctgaaactatgtacaggtgtggagagagtatgctctgtgtcgtcccagacatttctgcattccgagaaggttggagatgggtccggcaaccagtccaggttccagtaactttggtccgaaatgatggaatcatttattccaccagccttacctttacctacacaccagaaccagggccgcggccacattgcagtgcagcaggagcaatccttcgagccaattcaagccaggtgccccctaacgaatcaaacacaaacagcgagggaagttacacaaacgccagcacaaattcaaccagtgtcacatcatctacagccacagtggtatcctaactaccgtctttttgctaggacttaaactgacttgagtgtggcaaaaagttaacaaaaaaggagaaaaaatgaacaatcgtttgtggtttcttgggaaaacttttcataccaggtgatactattcaaaaaccccgttgtctccctgcaagtgctgatttgaaatgcagaagccacagtaaaaaaaaaaaaaaaaaaaaaaaaaaaagaaaaaaaaatcaaaatgtataaatattggaaatcaagtttttcagctgttttgttggttggttggttggtttttgtttggttttgtttaaatgggcaagaagtaaataatgtggctggaatacaagttgaacaaactagaagacacaaatctaacatagtttttatggaccaaggaacttgtatattgtataagctttagtaaaaggtacattttcaccatacctttttttatatcacggtattatagtacaccttgttaccaaataggttgttctcttccccacccacctttgagcttttgctctaaaatacattcaggttccaagcctgaccatccttgtttaatctatcatactcttccaggttttttttttttggtctaaggctggaacttttttcttttttttcagctgaagtcttatgacttttcatgagtcaaaattgtttggatttcagcaagtcaaatcttgcaaaggcctgcatattttttttaagattatatgaagtctgtgcaaaagctttaaaaaaatgcctctgccttgcctgcaatacatgcaatgtatgttaacttagtctctcttctcagacactgttggtagttatttctgtgttttcctttttttaaaaaaaaatatggacttattgtggttatctgagaggttctaacattcacatgcaatttggtgtggccatttagctattaatgagttaatggcgcagaacttgttgatatttgaagtgttctctccccttttcccatgacgtaaatacataggtgtgttccaggatttgttcaggtttttcccccctcctaatcttgtacataacttgtattatgtgtaagttaaacattttattttgaacttggaatgttcccagtgatttcattcagcagggtattttctgccttgttggcaagtgacaaaaaatatgggaagtatttgctaccagttggtagatggtgcccttaatggtagaatgaggaaaatgtccgcaaaagcatgttttattatctttacttttttggggggttggagggggtagcctagccagaacatcattgtaatcttaaaacataagatgcttttattagatgatcaactaaaatagctggaagacagtactttagaaacagatagttgtaagattataaaatgcaaatgtaacttatgttttcatttttttctctgccttttttgtttgtttgttttctcttttccagtactgagcatctccacaaatgtctcctaactcagaaaatgtttcttttcttttcagttgagatttggttgcattcagggttgtaggttggccttgcttgctaaccccgccggttttaccgtgctttcattcctgaactttgtttatgcctttgtttggtttcttcgaaattgcagcagactcattgggctacatttagtacaggaaccacgtgtgtaatgttatacaacacagtctagtaatacaatcatccctcttagagtaaaaactacctctagattgtggtaagcttttactgtcccataaaacaggagccacagtaccttatgaatgcaaaactgtaacttcctacagtgtttccctacagaacattgtctttctggtgtcctgggctgttttgaaaaagtttccattaatagactttttagaaattattattagtagcattttttttccagctttgctgtcttcatcactcactctatgctcagactatgccactgtaaatattcttcctaacatctttaaatcgccttttcctcagttttcaaggggaaggtcatttgtaaagcacgttaggtggttaaatcagttattgcggttttctcttactgcaagcctttttaatcacccccaggctgcattttattctatatcgccttttttcttcaaatctgctccaatcactcacttctctcttataagctaatcctgcctcacaccttaaatctgtttcagtgatcaagggcagaactcattgtggccttatctttctttgttgtaattgttcactgtctctttcttacagaccacttatttctgagtagtagttattcctctctatggagtcatggcaggaatcattacacagtgcttttgttcagagcatggacatgttcctagtgctgctttgctttaacggccacaagtttcctccacttcctaggtttggtatttagttaaggaatcatattaaattaaccaataacaaaagagatacttttgaagaacaaactattccttacccatttttgtagctcaaaaataatttttcaagttcatgaccttattaaaatgaacttgtgtttttttaacaaacgtgtatgttttattttgatagtttctttccgtaagataattgaaatattatactgtaaacccttttcttttctttttttgaaaagtccaagaatgtacttatacaggcatttttccccacctatttttggccattctcataccacagactaaagagtgaaatgatttgtccattgtagcttattgtttatcagtagttcttttgtcagctgcttacattttttctttcatggttttgtgaatcattttcagtatgtaatttataggaaccttgtcctctggttatagtagactgtgtgccctcctccagtgatggcattattagacatgctggtcatttaccctcagaaagactctcttattagaatggtgagtgcttcagttatagtatgtttgaatttttaaaaaattctgttttagaaatgtatcttatgctctcatgactatgcagtttctaaacatacacatagaagctgagtctctgatccaatatgtttttatttgttccatttaatttatcacatagattgggaaggcaagctaaaagccttaaaaatgccctttatattttgagtgatttcagcgttgaacactagtatactatctaaatttgctgctcactttctttaaactgtggcaattaaaggcatgtttatacatgacttaatcgtgaaatgtttgtcactcttactgcacagacttatctgcaatcataactggttagtttttttgttttgtttgttttattgtttttaatgaaactggtaccatctgtgctttcacaaaaaacttccaatgccatttttgagaactaacctaactagtcatgctaaccagaaaatccactggggaggaggttccttttgaaacaaaatgctgttcagttagtaaccaagttactttgattgcaaaagcagctgtgtttctgataagtactgaacaaatgtgtgtaattttctgtgccagacttatgactttgttttcaagcactgtaatgtgggatggatggttagaaacaataatatattagggtttctgtttaaccctttcaggactgaactgtatctccttttgttaattttcccctgtgttgtgataaatgtttgccagcattcagtactgtgttggtccagatgtaggtttatatgctcatttttagcttatttcttgtaccttgcagcatgctctacgcattcagtccttaaggggtttattttacaaactgtgcgcctgtaaggtttattagcaataagatagaaaattgagcaagtttataccataattttgtagaaaaaaagaatctgctcagttccatatttcatccgtgaaaaacttgcaatacgagcagtttcaaggaataaataaaaaggaaatgtaaaccatt

SEQ ID NO: 438054 - DNA, 6173 bp, Homo sapiens
tgtaaaaaaagcaggcggtaccggaccggaaaacccggtaggtttccagggaaggcagcgagcaggatcccctactctgcgggcggcgcgaggcgtctggctcttcgcggcggcggcgaggggaaagggagcgcgggggctgggtggaatcgaggagtgaggaaaaagggaaggggcgggggagagggaccagggaaggcgtcggggggaatctcgcgagggttggagttttggcgagagtttgtggaagatggcgcctgttgtgacaggtcattgaaattatgagactatcattcaaatggaagcattatagttcttcggaaccattatgatctcaaaacgaaaggagaatgatacagatacactggctgaggtgttttgaggtgcatcgaagtgttccaagctgtgacttaccttaacatgttcttgaagtaccatggcgtggattaaaaggaaatttggtgagcggcctccacctaaacgacttactagggaagctatgcgaaattatttaaaagagcgaggggatcaaacagtacttattcttcatgcaaaagttgcacagaagtcatatggaaatgaaaaaaggtttttttgcccacctccttgtgtatatcttatgggcagcggatggaagaaaaaaaaagaacaaatggaacgcgatggttgttctgaacaagagtctcaaccgtgtgcatttattgggataggaaatagtgaccaagaaatgcagcagctaaacttggaaggaaagaactattgcacagccaaaacattgtatatatctgactcagacaagcgaaagcacttcatgttgtctgtaaagatgttctatggcaacagtgatgacattggtgtgttcctcagcaagcggataaaagtcatctccaaaccttccaaaaagaagcagtcattgaaaaatgctgacttatgcattgcctcaggaacaaaggtggctctgtttaatcgactacgatcccagacagttagtaccagatacttgcatgtagaaggaggtaattttcatgccagttcacagcagtggggagccttttttattcatctcttggatgatgatgaatcagaaggagaagaattcacagtccgagatggctacatccattatggacaaacagtcaaacttgtgtgctcagttactggcatggcactcccaagattgataattaggaaagttgataagcagaccgcattattggatgcagatgatcctgtgtcacaactccataaatgtgcattttaccttaaggatacagaaagaatgtatttgtgcctttctcaagaaagaataattcaatttcaggccactccatgtccaaaagaaccaaataaagagatgataaatgatggcgcttcctggacaatcattagcacagataaggcagagtatacattttatgagggaatgggccctgtccttgccccagtcactcctgtgcctgtggtagagagccttcagggtgagaacgcctagtccaagttggccttcagctctttgcagctactctcagctgtgacctggcatcatttcatttcatgggagttttgatttttctccaatcgtctgattaggggatttttatatacaccatttgttgatttaaagaaaaaaaaacaaaattaggaggagcgtacttgccagaaaatttaaatgtaaataaacttgtatgttatcttgaaatgtttttagctagctttgtaataaaaaacattttaattgcccttttttaaaaaaaacaaatgaaagttgaatgagaatctaatttgtgtactttaatgaaaaatgaaaagttttctcagtgttgtgattttctgtgaattgcagttgaatggcggtggggacgtagcaatgcttgaacttacaggacagaatttcactccaaatttacgagtgtggtttggggatgtagaagctgaaactatgtacaggtgtggagagagtatgctctgtgtcgtcccagacatttctgcattccgagaaggttggagatgggtccggcaaccagtccaggttccagtaactttggtccgaaatgatggaatcatttattccaccagccttacctttacctacacaccagaaccagggccgcggccacattgcagtgcagcaggagcaatccttcgagccaattcaagccaggtgccccctaacgaatcaaacacaaacagcgagggaagttacacaaacgccagcacaaattcaaccagtgtcacatcatctacagccacagtggtatcctaactaccgtctttttgctaggacttaaactgacttgagtgtggcaaaaagttaacaaaaaaggagaaaaaatgaacaatcgtttgtggtttcttgggaaaacttttcataccaggtgatactattcaaaaaccccgttgtctccctgcaagtgctgatttgaaatgcagaagccacagtaaaaaaaaaaaaaaaaaaaaaaaaaaaagaaaaaaaaatcaaaatgtataaatattggaaatcaagtttttcagctgttttgttggttggttggttggtttttgtttggttttgtttaaatgggcaagaagtaaataatgtggctggaatacaagttgaacaaactagaagacacaaatctaacatagtttttatggaccaaggaacttgtatattgtataagctttagtaaaaggtacattttcaccatacctttttttatatcacggtattatagtacaccttgttaccaaataggttgttctcttccccacccacctttgagcttttgctctaaaatacattcaggttccaagcctgaccatccttgtttaatctatcatactcttccaggttttttttttttggtctaaggctggaacttttttcttttttttcagctgaagtcttatgacttttcatgagtcaaaattgtttggatttcagcaagtcaaatcttgcaaaggcctgcatattttttttaagattatatgaagtctgtgcaaaagctttaaaaaaatgcctctgccttgcctgcaatacatgcaatgtatgttaacttagtctctcttctcagacactgttggtagttatttctgtgttttcctttttttaaaaaaaaatatggacttattgtggttatctgagaggttctaacattcacatgcaatttggtgtggccatttagctattaatgagttaatggcgcagaacttgttgatatttgaagtgttctctccccttttcccatgacgtaaatacataggtgtgttccaggatttgttcaggtttttcccccctcctaatcttgtacataacttgtattatgtgtaagttaaacattttattttgaacttggaatgttcccagtgatttcattcagcagggtattttctgccttgttggcaagtgacaaaaaatatgggaagtatttgctaccagttggtagatggtgcccttaatggtagaatgaggaaaatgtccgcaaaagcatgttttattatctttacttttttggggggttggagggggtagcctagccagaacatcattgtaatcttaaaacataagatgcttttattagatgatcaactaaaatagctggaagacagtactttagaaacagatagttgtaagattataaaatgcaaatgtaacttatgttttcatttttttctctgccttttttgtttgtttgttttctcttttccagtactgagcatctccacaaatgtctcctaactcagaaaatgtttcttttcttttcagttgagatttggttgcattcagggttgtaggttggccttgcttgctaaccccgccggttttaccgtgctttcattcctgaactttgtttatgcctttgtttggtttcttcgaaattgcagcagactcattgggctacatttagtacaggaaccacgtgtgtaatgttatacaacacagtctagtaatacaatcatccctcttagagtaaaaactacctctagattgtggtaagcttttactgtcccataaaacaggagccacagtaccttatgaatgcaaaactgtaacttcctacagtgtttccctacagaacattgtctttctggtgtcctgggctgttttgaaaaagtttccattaatagactttttagaaattattattagtagcattttttttccagctttgctgtcttcatcactcactctatgctcagactatgccactgtaaatattcttcctaacatctttaaatcgccttttcctcagttttcaaggggaaggtcatttgtaaagcacgttaggtggttaaatcagttattgcggttttctcttactgcaagcctttttaatcacccccaggctgcattttattctatatcgccttttttcttcaaatctgctccaatcactcacttctctcttataagctaatcctgcctcacaccttaaatctgtttcagtgatcaagggcagaactcattgtggccttatctttctttgttgtaattgttcactgtctctttcttacagaccacttatttctgagtagtagttattcctctctatggagtcatggcaggaatcattacacagtgcttttgttcagagcatggacatgttcctagtgctgctttgctttaacggccacaagtttcctccacttcctaggtttggtatttagttaaggaatcatattaaattaaccaataacaaaagagatacttttgaagaacaaactattccttacccatttttgtagctcaaaaataatttttcaagttcatgaccttattaaaatgaacttgtgtttttttaacaaacgtgtatgttttattttgatagtttctttccgtaagataattgaaatattatactgtaaacccttttcttttctttttttgaaaagtccaagaatgtacttatacaggcatttttccccacctatttttggccattctcataccacagactaaagagtgaaatgatttgtccattgtagcttattgtttatcagtagttcttttgtcagctgcttacattttttctttcatggttttgtgaatcattttcagtatgtaatttataggaaccttgtcctctggttatagtagactgtgtgccctcctccagtgatggcattattagacatgctggtcatttaccctcagaaagactctcttattagaatggtgagtgcttcagttatagtatgtttgaatttttaaaaaattctgttttagaaatgtatcttatgctctcatgactatgcagtttctaaacatacacatagaagctgagtctctgatccaatatgtttttatttgttccatttaatttatcacatagattgggaaggcaagctaaaagccttaaaaatgccctttatattttgagtgatttcagcgttgaacactagtatactatctaaatttgctgctcactttctttaaactgtggcaattaaaggcatgtttatacatgacttaatcgtgaaatgtttgtcactcttactgcacagacttatctgcaatcataactggttagtttttttgttttgtttgttttattgtttttaatgaaactggtaccatctgtgctttcacaaaaaacttccaatgccatttttgagaactaacctaactagtcatgctaaccagaaaatccactggggaggaggttccttttgaaacaaaatgctgttcagttagtaaccaagttactttgattgcaaaagcagctgtgtttctgataagtactgaacaaatgtgtgtaattttctgtgccagacttatgactttgttttcaagcactgtaatgtgggatggatggttagaaacaataatatattagggtttctgtttaaccctttcaggactgaactgtatctccttttgttaattttcccctgtgttgtgataaatgtttgccagcattcagtactgtgttggtccagatgtaggtttatatgctcatttttagcttatttcttgtaccttgcagcatgctctacgcattcagtccttaaggggtttattttacaaactgtgcgcctgtaaggtttattagcaataagatagaaaattgagcaagtttataccataattttgtagaaaaaaagaatctgctcagttccatatttcatccgtgaaaaacttgcaatacgagcagtttcaaggaataaataaaaaggaaatgtaaaccatt

SEQ ID NO: 438055 - DNA, 5682 bp, Homo sapiens
tgtaaaaaaagcaggcggtaccggaccggaaaacccggtaggtttccagggaaggcagcgagcaggatcccctactctgcgggcggcgcgaggcgtctggctcttcgcggcggcggcgaggggaaagggagcgcgggggctgggtggaatcgaggagtgaggaaaaagggaaggggcgggggagagggaccagggaaggcgtcggggggaatctcgcgagggttggagttttggcgagagtttgtggaagatggcgcctgttgtgacagggaaatttggtgagcggcctccacctaaacgacttactagggaagctatgcgaaattatttaaaagagcgaggggatcaaacagtacttattcttcatgcaaaagttgcacagaagtcatatggaaatgaaaaaagagtgacctggaactgggcccactaacttggctgtgacctttatatccttggcctcagtgtttttttgcccacctccttgtgtatatcttatgggcagcggatggaagaaaaaaaaagaacaaatggaacgcgatggttgttctgaacaagagtctcaaccgtgtgcatttattgggataggaaatagtgaccaagaaatgcagcagctaaacttggaaggaaagaactattgcacagccaaaacattgtatatatctgactcagacaagcgaaagcacttcatgttgtctgtaaagatgttctatggcaacagtgatgacattggtgtgttcctcagcaagcggataaaagtcatctccaaaccttccaaaaagaagcagtcattgaaaaatgctgacttatgcattgcctcaggaacaaaggtggctctgtttaatcgactacgatcccagacagttagtaccagatacttgcatgtagaaggaggtaattttcatgccagttcacagcagtggggagccttttttattcatctcttggatgatgatgaatcagaaggagaagaattcacagtccgagatggctacatccattatggacaaacagtcaaacttgtgtgctcagttactggcatggcactcccaagattgataattaggaaagttgataagcagaccgcattattggatgcagatgatcctgtgtcacaactccataaatgtgcattttaccttaaggatacagaaagaatgtatttgtgcctttctcaagaaagaataattcaatttcaggccactccatgtccaaaagaaccaaataaagagatgataaatgatggcgcttcctggacaatcattagcacagataaggcagagtatacattttatgagggaatgggccctgtccttgccccagtcactcctgtgcctgtggtagagagccttcagttgaatggcggtggggacgtagcaatgcttgaacttacaggacagaatttcactccaaatttacgagtgtggtttggggatgtagaagctgaaactatgtacaggtgtggagagagtatgctctgtgtcgtcccagacatttctgcattccgagaaggttggagatgggtccggcaaccagtccaggttccagtaactttggtccgaaatgatggaatcatttattccaccagccttacctttacctacacaccagaaccagggccgcggccacattgcagtgcagcaggagcaatccttcgagccaattcaagccaggtgccccctaacgaatcaaacacaaacagcgagggaagttacacaaacgccagcacaaattcaaccagtgtcacatcatctacagccacagtggtatcctaactaccgtctttttgctaggacttaaactgacttgagtgtggcaaaaagttaacaaaaaaggagaaaaaatgaacaatcgtttgtggtttcttgggaaaacttttcataccaggtgatactattcaaaaaccccgttgtctccctgcaagtgctgatttgaaatgcagaagccacagtaaaaaaaaaaaaaaaaaaaaaaaaaaaagaaaaaaaaatcaaaatgtataaatattggaaatcaagtttttcagctgttttgttggttggttggttggtttttgtttggttttgtttaaatgggcaagaagtaaataatgtggctggaatacaagttgaacaaactagaagacacaaatctaacatagtttttatggaccaaggaacttgtatattgtataagctttagtaaaaggtacattttcaccatacctttttttatatcacggtattatagtacaccttgttaccaaataggttgttctcttccccacccacctttgagcttttgctctaaaatacattcaggttccaagcctgaccatccttgtttaatctatcatactcttccaggttttttttttttggtctaaggctggaacttttttcttttttttcagctgaagtcttatgacttttcatgagtcaaaattgtttggatttcagcaagtcaaatcttgcaaaggcctgcatattttttttaagattatatgaagtctgtgcaaaagctttaaaaaaatgcctctgccttgcctgcaatacatgcaatgtatgttaacttagtctctcttctcagacactgttggtagttatttctgtgttttcctttttttaaaaaaaaatatggacttattgtggttatctgagaggttctaacattcacatgcaatttggtgtggccatttagctattaatgagttaatggcgcagaacttgttgatatttgaagtgttctctccccttttcccatgacgtaaatacataggtgtgttccaggatttgttcaggtttttcccccctcctaatcttgtacataacttgtattatgtgtaagttaaacattttattttgaacttggaatgttcccagtgatttcattcagcagggtattttctgccttgttggcaagtgacaaaaaatatgggaagtatttgctaccagttggtagatggtgcccttaatggtagaatgaggaaaatgtccgcaaaagcatgttttattatctttacttttttggggggttggagggggtagcctagccagaacatcattgtaatcttaaaacataagatgcttttattagatgatcaactaaaatagctggaagacagtactttagaaacagatagttgtaagattataaaatgcaaatgtaacttatgttttcatttttttctctgccttttttgtttgtttgttttctcttttccagtactgagcatctccacaaatgtctcctaactcagaaaatgtttcttttcttttcagttgagatttggttgcattcagggttgtaggttggccttgcttgctaaccccgccggttttaccgtgctttcattcctgaactttgtttatgcctttgtttggtttcttcgaaattgcagcagactcattgggctacatttagtacaggaaccacgtgtgtaatgttatacaacacagtctagtaatacaatcatccctcttagagtaaaaactacctctagattgtggtaagcttttactgtcccataaaacaggagccacagtaccttatgaatgcaaaactgtaacttcctacagtgtttccctacagaacattgtctttctggtgtcctgggctgttttgaaaaagtttccattaatagactttttagaaattattattagtagcattttttttccagctttgctgtcttcatcactcactctatgctcagactatgccactgtaaatattcttcctaacatctttaaatcgccttttcctcagttttcaaggggaaggtcatttgtaaagcacgttaggtggttaaatcagttattgcggttttctcttactgcaagcctttttaatcacccccaggctgcattttattctatatcgccttttttcttcaaatctgctccaatcactcacttctctcttataagctaatcctgcctcacaccttaaatctgtttcagtgatcaagggcagaactcattgtggccttatctttctttgttgtaattgttcactgtctctttcttacagaccacttatttctgagtagtagttattcctctctatggagtcatggcaggaatcattacacagtgcttttgttcagagcatggacatgttcctagtgctgctttgctttaacggccacaagtttcctccacttcctaggtttggtatttagttaaggaatcatattaaattaaccaataacaaaagagatacttttgaagaacaaactattccttacccatttttgtagctcaaaaataatttttcaagttcatgaccttattaaaatgaacttgtgtttttttaacaaacgtgtatgttttattttgatagtttctttccgtaagataattgaaatattatactgtaaacccttttcttttctttttttgaaaagtccaagaatgtacttatacaggcatttttccccacctatttttggccattctcataccacagactaaagagtgaaatgatttgtccattgtagcttattgtttatcagtagttcttttgtcagctgcttacattttttctttcatggttttgtgaatcattttcagtatgtaatttataggaaccttgtcctctggttatagtagactgtgtgccctcctccagtgatggcattattagacatgctggtcatttaccctcagaaagactctcttattagaatggtgagtgcttcagttatagtatgtttgaatttttaaaaaattctgttttagaaatgtatcttatgctctcatgactatgcagtttctaaacatacacatagaagctgagtctctgatccaatatgtttttatttgttccatttaatttatcacatagattgggaaggcaagctaaaagccttaaaaatgccctttatattttgagtgatttcagcgttgaacactagtatactatctaaatttgctgctcactttctttaaactgtggcaattaaaggcatgtttatacatgacttaatcgtgaaatgtttgtcactcttactgcacagacttatctgcaatcataactggttagtttttttgttttgtttgttttattgtttttaatgaaactggtaccatctgtgctttcacaaaaaacttccaatgccatttttgagaactaacctaactagtcatgctaaccagaaaatccactggggaggaggttccttttgaaacaaaatgctgttcagttagtaaccaagttactttgattgcaaaagcagctgtgtttctgataagtactgaacaaatgtgtgtaattttctgtgccagacttatgactttgttttcaagcactgtaatgtgggatggatggttagaaacaataatatattagggtttctgtttaaccctttcaggactgaactgtatctccttttgttaattttcccctgtgttgtgataaatgtttgccagcattcagtactgtgttggtccagatgtaggtttatatgctcatttttagcttatttcttgtaccttgcagcatgctctacgcattcagtccttaaggggtttattttacaaactgtgcgcctgtaaggtttattagcaataagatagaaaattgagcaagtttataccataattttgtagaaaaaaagaatctgctcagttccatatttcatccgtgaaaaacttgcaatacgagcagtttcaaggaataaataaaaaggaaatgtaaaccatt

SEQ ID NO: 438056 - DNA, 5334 bp, Homo sapiens
aagatggcgcctgttgtggagggaaatttggtgagcggcctccacctaaacgacttactagggaagctatgcgaaattatttaaaagagcgaggggatcaaacagtacttattcttcatgcaaaagttgcacagaagtcatatggaaatgaaaaaaggtttttttgcccacctccttgtgtatatcttatgggcagcggatggaagaaaaaaaaagaacaaatggaacgcgatggttgttctgaacaagagtctcaaccgtgtgcatttattgggataggaaatagtgaccaagaaatgcagcagctaaacttggaaggaaagaactattgcacagccaaaacattgtatatatctgactcagacaagcgaaagcacttcatgttgtctgtaaagatgttctatggcaacagtgatgacattggtgtgttcctcagcaagcggataaaagtcatctccaaaccttccaaaaagaagcagtcattgaaaaatgctgacttacgatcccagacagttagtaccagatacttgcatgtagaaggaggtaattttcatgccagttcacagcagtggggagccttttttattcatctcttggatgatgatgaatcagaaggagaagaattcacagtccgagatggctacatccattatggacaaacagtcaaacttgtgtgctcagttactggcatggcactcccaagattgataattaggaaagttgataagcagaccgcattattggatgcagatgatcctgtgtcacaactccataaatgtgcattttaccttaaggatacagaaagaatgtatttgtgcctttctcaagaaagaataattcaatttcaggccactccatgtccaaaagaaccaaataaagagatgataaatgatggcgcttcctggacaatcattagcacagataaggcagagtatacattttatgagggaatgggccctgtccttgccccagtcactcctgtgcctgtggtagagagccttcagttgaatggcggtggggacgtagcaatgcttgaacttacaggacagaatttcactccaaatttacgagtgtggtttggggatgtagaagctgaaactatgtacaggtgtggagagagtatgctctgtgtcgtcccagacatttctgcattccgagaaggttggagatgggtccggcaaccagtccaggttccagtaactttggtccgaaatgatggaatcatttattccaccagccttacctttacctacacaccagaaccagggccgcggccacattgcagtgcagcaggagcaatccttcgagccaattcaagccaggtgccccctaacgaatcaaacacaaacagcgagggaagttacacaaacgccagcacaaattcaaccagtgtcacatcatctacagccacagtggtatcctaactaccgtctttttgctaggacttaaactgacttgagtgtggcaaaaagttaacaaaaaaggagaaaaaatgaacaatcgtttgtggtttcttgggaaaacttttcataccaggtgatactattcaaaaaccccgttgtctccctgcaagtgctgatttgaaatgcagaagccacagtaaaaaaaaaaaaaaaaaaaaaaaaaaaagaaaaaaaaatcaaaatgtataaatattggaaatcaagtttttcagctgttttgttggttggttggttggtttttgtttggttttgtttaaatgggcaagaagtaaataatgtggctggaatacaagttgaacaaactagaagacacaaatctaacatagtttttatggaccaaggaacttgtatattgtataagctttagtaaaaggtacattttcaccatacctttttttatatcacggtattatagtacaccttgttaccaaataggttgttctcttccccacccacctttgagcttttgctctaaaatacattcaggttccaagcctgaccatccttgtttaatctatcatactcttccaggttttttttttttggtctaaggctggaacttttttcttttttttcagctgaagtcttatgacttttcatgagtcaaaattgtttggatttcagcaagtcaaatcttgcaaaggcctgcatattttttttaagattatatgaagtctgtgcaaaagctttaaaaaaatgcctctgccttgcctgcaatacatgcaatgtatgttaacttagtctctcttctcagacactgttggtagttatttctgtgttttcctttttttaaaaaaaaatatggacttattgtggttatctgagaggttctaacattcacatgcaatttggtgtggccatttagctattaatgagttaatggcgcagaacttgttgatatttgaagtgttctctccccttttcccatgacgtaaatacataggtgtgttccaggatttgttcaggtttttcccccctcctaatcttgtacataacttgtattatgtgtaagttaaacattttattttgaacttggaatgttcccagtgatttcattcagcagggtattttctgccttgttggcaagtgacaaaaaatatgggaagtatttgctaccagttggtagatggtgcccttaatggtagaatgaggaaaatgtccgcaaaagcatgttttattatctttacttttttggggggttggagggggtagcctagccagaacatcattgtaatcttaaaacataagatgcttttattagatgatcaactaaaatagctggaagacagtactttagaaacagatagttgtaagattataaaatgcaaatgtaacttatgttttcatttttttctctgccttttttgtttgtttgttttctcttttccagtactgagcatctccacaaatgtctcctaactcagaaaatgtttcttttcttttcagttgagatttggttgcattcagggttgtaggttggccttgcttgctaaccccgccggttttaccgtgctttcattcctgaactttgtttatgcctttgtttggtttcttcgaaattgcagcagactcattgggctacatttagtacaggaaccacgtgtgtaatgttatacaacacagtctagtaatacaatcatccctcttagagtaaaaactacctctagattgtggtaagcttttactgtcccataaaacaggagccacagtaccttatgaatgcaaaactgtaacttcctacagtgtttccctacagaacattgtctttctggtgtcctgggctgttttgaaaaagtttccattaatagactttttagaaattattattagtagcattttttttccagctttgctgtcttcatcactcactctatgctcagactatgccactgtaaatattcttcctaacatctttaaatcgccttttcctcagttttcaaggggaaggtcatttgtaaagcacgttaggtggttaaatcagttattgcggttttctcttactgcaagcctttttaatcacccccaggctgcattttattctatatcgccttttttcttcaaatctgctccaatcactcacttctctcttataagctaatcctgcctcacaccttaaatctgtttcagtgatcaagggcagaactcattgtggccttatctttctttgttgtaattgttcactgtctctttcttacagaccacttatttctgagtagtagttattcctctctatggagtcatggcaggaatcattacacagtgcttttgttcagagcatggacatgttcctagtgctgctttgctttaacggccacaagtttcctccacttcctaggtttggtatttagttaaggaatcatattaaattaaccaataacaaaagagatacttttgaagaacaaactattccttacccatttttgtagctcaaaaataatttttcaagttcatgaccttattaaaatgaacttgtgtttttttaacaaacgtgtatgttttattttgatagtttctttccgtaagataattgaaatattatactgtaaacccttttcttttctttttttgaaaagtccaagaatgtacttatacaggcatttttccccacctatttttggccattctcataccacagactaaagagtgaaatgatttgtccattgtagcttattgtttatcagtagttcttttgtcagctgcttacattttttctttcatggttttgtgaatcattttcagtatgtaatttataggaaccttgtcctctggttatagtagactgtgtgccctcctccagtgatggcattattagacatgctggtcatttaccctcagaaagactctcttattagaatggtgagtgcttcagttatagtatgtttgaatttttaaaaaattctgttttagaaatgtatcttatgctctcatgactatgcagtttctaaacatacacatagaagctgagtctctgatccaatatgtttttatttgttccatttaatttatcacatagattgggaaggcaagctaaaagccttaaaaatgccctttatattttgagtgatttcagcgttgaacactagtatactatctaaatttgctgctcactttctttaaactgtggcaattaaaggcatgtttatacatgacttaatcgtgaaatgtttgtcactcttactgcacagacttatctgcaatcataactggttagtttttttgttttgtttgttttattgtttttaatgaaactggtaccatctgtgctttcacaaaaaacttccaatgccatttttgagaactaacctaactagtcatgctaaccagaaaatccactggggaggaggttccttttgaaacaaaatgctgttcagttagtaaccaagttactttgattgcaaaagcagctgtgtttctgataagtactgaacaaatgtgtgtaattttctgtgccagacttatgactttgttttcaagcactgtaatgtgggatggatggttagaaacaataatatattagggtttctgtttaaccctttcaggactgaactgtatctccttttgttaattttcccctgtgttgtgataaatgtttgccagcattcagtactgtgttggtccagatgtaggtttatatgctcatttttagcttatttcttgtaccttgcagcatgctctacgcattcagtccttaaggggtttattttacaaactgtgcgcctgtaaggtttattagcaataagatagaaaattgagcaagtttataccataattttgtagaaaaaaagaatctgctcagttccatatttcatccgtgaaaaacttgcaatacgagcagtttcaaggaataaataaaaaggaaatgtaaaccatt

SEQ ID NO: 438057 - DNA, 5651 bp, Homo sapiens
tgtaaaaaaagcaggcggtaccggaccggaaaacccggtaggtttccagggaaggcagcgagcaggatcccctactctgcgggcggcgcgaggcgtctggctcttcgcggcggcggcgaggggaaagggagcgcgggggctgggtggaatcgaggagtgaggaaaaagggaaggggcgggggagagggaccagggaaggcgtcggggggaatctcgcgagggttggagttttggcgagagtttgtggaagatggcgcctgttgtgacaggtcattgaaattatgagactatcattcaaatggaagcattatagttcttcggaaccattatgatctcaaaacgaaaggagaatgatacagatacactggctgaggtgttttgaggtgcatcgaagtgttccaagctgtgacttaccttaacatgttcttgaagtaccatggcgtggattaaaaggaaatttggtgagcggcctccacctaaacgacttactagggaagctatgcgaaattatttaaaagagcgaggggatcaaacagtacttattcttcatgcaaaagttgcacagaagtcatatggaaatgaaaaaaggtttttttgcccacctccttgtgtatatcttatgggcagcggatggaagaaaaaaaaagaacaaatggaacgcgatggttgttctgaacaagagtctcaaccgtgtgcatttattgggataggaaatagtgaccaagaaatgcagcagctaaacttggaaggaaagaactattgcacagccaaaacattgtatatatctgactcagacaagcgaaagcacttcatgttgtctgtaaagatgttctatggcaacagtgatgacattggtgtgttcctcagcaagcggataaaagtcatctccaaaccttccaaaaagaagcagtcattgaaaaatgctgacttatgcattgcctcaggaacaaaggtggctctgtttaatcgactacgatcccagacagttagtaccagatacttgcatgtagaaggaggtaattttcatgccagttcacagcagtggggagccttttttattcatctcttggatgatgatgaatcagaaggagaagaattcacagtccgagatggctacatccattatggacaaacagtcaaacttgtgtgctcagttactggcatggcactcccaagattgataattaggaaagttgataagcagaccgcattattggatgcagatgatcctgtgtcacaactccataaatgtgcattttaccttaaggatacagaaagaatgtatttgtgcctttctcaagaaagaataattcaatttcagttgaatggcggtggggacgtagcaatgcttgaacttacaggacagaatttcactccaaatttacgagtgtggtttggggatgtagaagctgaaactatgtacaggtgtggagagagtatgctctgtgtcgtcccagacatttctgcattccgagaaggttggagatgggtccggcaaccagtccaggttccagtaactttggtccgaaatgatggaatcatttattccaccagccttacctttacctacacaccagaaccagggccgcggccacattgcagtgcagcaggagcaatccttcgagccaattcaagccaggtgccccctaacgaatcaaacacaaacagcgagggaagttacacaaacgccagcacaaattcaaccagtgtcacatcatctacagccacagtggtatcctaactaccgtctttttgctaggacttaaactgacttgagtgtggcaaaaagttaacaaaaaaggagaaaaaatgaacaatcgtttgtggtttcttgggaaaacttttcataccaggtgatactattcaaaaaccccgttgtctccctgcaagtgctgatttgaaatgcagaagccacagtaaaaaaaaaaaaaaaaaaaaaaaaaaaagaaaaaaaaatcaaaatgtataaatattggaaatcaagtttttcagctgttttgttggttggttggttggtttttgtttggttttgtttaaatgggcaagaagtaaataatgtggctggaatacaagttgaacaaactagaagacacaaatctaacatagtttttatggaccaaggaacttgtatattgtataagctttagtaaaaggtacattttcaccatacctttttttatatcacggtattatagtacaccttgttaccaaataggttgttctcttccccacccacctttgagcttttgctctaaaatacattcaggttccaagcctgaccatccttgtttaatctatcatactcttccaggttttttttttttggtctaaggctggaacttttttcttttttttcagctgaagtcttatgacttttcatgagtcaaaattgtttggatttcagcaagtcaaatcttgcaaaggcctgcatattttttttaagattatatgaagtctgtgcaaaagctttaaaaaaatgcctctgccttgcctgcaatacatgcaatgtatgttaacttagtctctcttctcagacactgttggtagttatttctgtgttttcctttttttaaaaaaaaatatggacttattgtggttatctgagaggttctaacattcacatgcaatttggtgtggccatttagctattaatgagttaatggcgcagaacttgttgatatttgaagtgttctctccccttttcccatgacgtaaatacataggtgtgttccaggatttgttcaggtttttcccccctcctaatcttgtacataacttgtattatgtgtaagttaaacattttattttgaacttggaatgttcccagtgatttcattcagcagggtattttctgccttgttggcaagtgacaaaaaatatgggaagtatttgctaccagttggtagatggtgcccttaatggtagaatgaggaaaatgtccgcaaaagcatgttttattatctttacttttttggggggttggagggggtagcctagccagaacatcattgtaatcttaaaacataagatgcttttattagatgatcaactaaaatagctggaagacagtactttagaaacagatagttgtaagattataaaatgcaaatgtaacttatgttttcatttttttctctgccttttttgtttgtttgttttctcttttccagtactgagcatctccacaaatgtctcctaactcagaaaatgtttcttttcttttcagttgagatttggttgcattcagggttgtaggttggccttgcttgctaaccccgccggttttaccgtgctttcattcctgaactttgtttatgcctttgtttggtttcttcgaaattgcagcagactcattgggctacatttagtacaggaaccacgtgtgtaatgttatacaacacagtctagtaatacaatcatccctcttagagtaaaaactacctctagattgtggtaagcttttactgtcccataaaacaggagccacagtaccttatgaatgcaaaactgtaacttcctacagtgtttccctacagaacattgtctttctggtgtcctgggctgttttgaaaaagtttccattaatagactttttagaaattattattagtagcattttttttccagctttgctgtcttcatcactcactctatgctcagactatgccactgtaaatattcttcctaacatctttaaatcgccttttcctcagttttcaaggggaaggtcatttgtaaagcacgttaggtggttaaatcagttattgcggttttctcttactgcaagcctttttaatcacccccaggctgcattttattctatatcgccttttttcttcaaatctgctccaatcactcacttctctcttataagctaatcctgcctcacaccttaaatctgtttcagtgatcaagggcagaactcattgtggccttatctttctttgttgtaattgttcactgtctctttcttacagaccacttatttctgagtagtagttattcctctctatggagtcatggcaggaatcattacacagtgcttttgttcagagcatggacatgttcctagtgctgctttgctttaacggccacaagtttcctccacttcctaggtttggtatttagttaaggaatcatattaaattaaccaataacaaaagagatacttttgaagaacaaactattccttacccatttttgtagctcaaaaataatttttcaagttcatgaccttattaaaatgaacttgtgtttttttaacaaacgtgtatgttttattttgatagtttctttccgtaagataattgaaatattatactgtaaacccttttcttttctttttttgaaaagtccaagaatgtacttatacaggcatttttccccacctatttttggccattctcataccacagactaaagagtgaaatgatttgtccattgtagcttattgtttatcagtagttcttttgtcagctgcttacattttttctttcatggttttgtgaatcattttcagtatgtaatttataggaaccttgtcctctggttatagtagactgtgtgccctcctccagtgatggcattattagacatgctggtcatttaccctcagaaagactctcttattagaatggtgagtgcttcagttatagtatgtttgaatttttaaaaaattctgttttagaaatgtatcttatgctctcatgactatgcagtttctaaacatacacatagaagctgagtctctgatccaatatgtttttatttgttccatttaatttatcacatagattgggaaggcaagctaaaagccttaaaaatgccctttatattttgagtgatttcagcgttgaacactagtatactatctaaatttgctgctcactttctttaaactgtggcaattaaaggcatgtttatacatgacttaatcgtgaaatgtttgtcactcttactgcacagacttatctgcaatcataactggttagtttttttgttttgtttgttttattgtttttaatgaaactggtaccatctgtgctttcacaaaaaacttccaatgccatttttgagaactaacctaactagtcatgctaaccagaaaatccactggggaggaggttccttttgaaacaaaatgctgttcagttagtaaccaagttactttgattgcaaaagcagctgtgtttctgataagtactgaacaaatgtgtgtaattttctgtgccagacttatgactttgttttcaagcactgtaatgtgggatggatggttagaaacaataatatattagggtttctgtttaaccctttcaggactgaactgtatctccttttgttaattttcccctgtgttgtgataaatgtttgccagcattcagtactgtgttggtccagatgtaggtttatatgctcatttttagcttatttcttgtaccttgcagcatgctctacgcattcagtccttaaggggtttattttacaaactgtgcgcctgtaaggtttattagcaataagatagaaaattgagcaagtttataccataattttgtagaaaaaaagaatctgctcagttccatatttcatccgtgaaaaacttgcaatacgagcagtttcaaggaataaataaaaaggaaatgtaaaccatt

SEQ ID NO: 438058 - DNA, 5703 bp, Homo sapiens
tgtaaaaaaagcaggcggtaccggaccggaaaacccggtaggtttccagggaaggcagcgagcaggatcccctactctgcgggcggcgcgaggcgtctggctcttcgcggcggcggcgaggggaaagggagcgcgggggctgggtggaatcgaggagtgaggaaaaagggaaggggcgggggagagggaccagggaaggcgtcggggggaatctcgcgagggttggagttttggcgagagtttgtggaagatggcgcctgttgtgacaggtcattgaaattatgagactatcattcaaatggaagcattatagttcttcggaaccattatgatctcaaaacgaaaggagaatgatacagatacactggctgaggtgttttgaggtgcatcgaagtgttccaagctgtgacttaccttaacatgttcttgaagtaccatggcgtggattaaaaggaaatttggtgagcggcctccacctaaacgacttactagggaagctatgcgaaattatttaaaagagcgaggggatcaaacagtacttattcttcatgcaaaagttgcacagaagtcatatggaaatgaaaaaaggtttttttgcccacctccttgtgtatatcttatgggcagcggatggaagaaaaaaaaagaacaaatggaacgcgatggttgttctgaacaagagtctcaaccgtgtgcatttattgggataggaaatagtgaccaagaaatgcagcagctaaacttggaaggaaagaactattgcacagccaaaacattgtatatatctgactcagacaagcgaaagcacttcatgttgtctgtaaagatgttctatggcaacagtgatgacattggtgtgttcctcagcaagcggataaaagtcatctccaaaccttccaaaaagaagcagtcattgaaaaatgctgacttatgcattgcctcaggaacaaaggtggctctgtttaatcgactacgatcccagacagttagtaccagatacttgcatgtagaaggaggtaattttcatgccagttcacagcagtggggagccttttttattcatctcttggatgatgatgaatcagaaggagaagaattcacagtccgagatggctacatccattatggacaaacagtcaaacttgtgtgctcagttactggcatggcactcccaagattgataattaggaaagttgataagcagaccgcattattggatgcagatgatcctgtgtcacaactccataaatgtgcattttaccttaaggatacagaaagaatgtatttgtgcctttctcaagaaagaataattcaatttcaggccactccatgtccaaaagaaccaaataaagagatgataaatgatggcgcttcctggacaatcattagcacagataaggcagagtatacattttatgagggaatgggccctgtccttgccccagtcactcctgtgcctgtggtagagagccttcaggtgtggagagagtatgctctgtgtcgtcccagacatttctgcattccgagaaggttggagatgggtccggcaaccagtccaggttccagtaactttggtccgaaatgatggaatcatttattccaccagccttacctttacctacacaccagaaccagggccgcggccacattgcagtgcagcaggagcaatccttcgagccaattcaagccaggtgccccctaacgaatcaaacacaaacagcgagggaagttacacaaacgccagcacaaattcaaccagtgtcacatcatctacagccacagtggtatcctaactaccgtctttttgctaggacttaaactgacttgagtgtggcaaaaagttaacaaaaaaggagaaaaaatgaacaatcgtttgtggtttcttgggaaaacttttcataccaggtgatactattcaaaaaccccgttgtctccctgcaagtgctgatttgaaatgcagaagccacagtaaaaaaaaaaaaaaaaaaaaaaaaaaaagaaaaaaaaatcaaaatgtataaatattggaaatcaagtttttcagctgttttgttggttggttggttggtttttgtttggttttgtttaaatgggcaagaagtaaataatgtggctggaatacaagttgaacaaactagaagacacaaatctaacatagtttttatggaccaaggaacttgtatattgtataagctttagtaaaaggtacattttcaccatacctttttttatatcacggtattatagtacaccttgttaccaaataggttgttctcttccccacccacctttgagcttttgctctaaaatacattcaggttccaagcctgaccatccttgtttaatctatcatactcttccaggttttttttttttggtctaaggctggaacttttttcttttttttcagctgaagtcttatgacttttcatgagtcaaaattgtttggatttcagcaagtcaaatcttgcaaaggcctgcatattttttttaagattatatgaagtctgtgcaaaagctttaaaaaaatgcctctgccttgcctgcaatacatgcaatgtatgttaacttagtctctcttctcagacactgttggtagttatttctgtgttttcctttttttaaaaaaaaatatggacttattgtggttatctgagaggttctaacattcacatgcaatttggtgtggccatttagctattaatgagttaatggcgcagaacttgttgatatttgaagtgttctctccccttttcccatgacgtaaatacataggtgtgttccaggatttgttcaggtttttcccccctcctaatcttgtacataacttgtattatgtgtaagttaaacattttattttgaacttggaatgttcccagtgatttcattcagcagggtattttctgccttgttggcaagtgacaaaaaatatgggaagtatttgctaccagttggtagatggtgcccttaatggtagaatgaggaaaatgtccgcaaaagcatgttttattatctttacttttttggggggttggagggggtagcctagccagaacatcattgtaatcttaaaacataagatgcttttattagatgatcaactaaaatagctggaagacagtactttagaaacagatagttgtaagattataaaatgcaaatgtaacttatgttttcatttttttctctgccttttttgtttgtttgttttctcttttccagtactgagcatctccacaaatgtctcctaactcagaaaatgtttcttttcttttcagttgagatttggttgcattcagggttgtaggttggccttgcttgctaaccccgccggttttaccgtgctttcattcctgaactttgtttatgcctttgtttggtttcttcgaaattgcagcagactcattgggctacatttagtacaggaaccacgtgtgtaatgttatacaacacagtctagtaatacaatcatccctcttagagtaaaaactacctctagattgtggtaagcttttactgtcccataaaacaggagccacagtaccttatgaatgcaaaactgtaacttcctacagtgtttccctacagaacattgtctttctggtgtcctgggctgttttgaaaaagtttccattaatagactttttagaaattattattagtagcattttttttccagctttgctgtcttcatcactcactctatgctcagactatgccactgtaaatattcttcctaacatctttaaatcgccttttcctcagttttcaaggggaaggtcatttgtaaagcacgttaggtggttaaatcagttattgcggttttctcttactgcaagcctttttaatcacccccaggctgcattttattctatatcgccttttttcttcaaatctgctccaatcactcacttctctcttataagctaatcctgcctcacaccttaaatctgtttcagtgatcaagggcagaactcattgtggccttatctttctttgttgtaattgttcactgtctctttcttacagaccacttatttctgagtagtagttattcctctctatggagtcatggcaggaatcattacacagtgcttttgttcagagcatggacatgttcctagtgctgctttgctttaacggccacaagtttcctccacttcctaggtttggtatttagttaaggaatcatattaaattaaccaataacaaaagagatacttttgaagaacaaactattccttacccatttttgtagctcaaaaataatttttcaagttcatgaccttattaaaatgaacttgtgtttttttaacaaacgtgtatgttttattttgatagtttctttccgtaagataattgaaatattatactgtaaacccttttcttttctttttttgaaaagtccaagaatgtacttatacaggcatttttccccacctatttttggccattctcataccacagactaaagagtgaaatgatttgtccattgtagcttattgtttatcagtagttcttttgtcagctgcttacattttttctttcatggttttgtgaatcattttcagtatgtaatttataggaaccttgtcctctggttatagtagactgtgtgccctcctccagtgatggcattattagacatgctggtcatttaccctcagaaagactctcttattagaatggtgagtgcttcagttatagtatgtttgaatttttaaaaaattctgttttagaaatgtatcttatgctctcatgactatgcagtttctaaacatacacatagaagctgagtctctgatccaatatgtttttatttgttccatttaatttatcacatagattgggaaggcaagctaaaagccttaaaaatgccctttatattttgagtgatttcagcgttgaacactagtatactatctaaatttgctgctcactttctttaaactgtggcaattaaaggcatgtttatacatgacttaatcgtgaaatgtttgtcactcttactgcacagacttatctgcaatcataactggttagtttttttgttttgtttgttttattgtttttaatgaaactggtaccatctgtgctttcacaaaaaacttccaatgccatttttgagaactaacctaactagtcatgctaaccagaaaatccactggggaggaggttccttttgaaacaaaatgctgttcagttagtaaccaagttactttgattgcaaaagcagctgtgtttctgataagtactgaacaaatgtgtgtaattttctgtgccagacttatgactttgttttcaagcactgtaatgtgggatggatggttagaaacaataatatattagggtttctgtttaaccctttcaggactgaactgtatctccttttgttaattttcccctgtgttgtgataaatgtttgccagcattcagtactgtgttggtccagatgtaggtttatatgctcatttttagcttatttcttgtaccttgcagcatgctctacgcattcagtccttaaggggtttattttacaaactgtgcgcctgtaaggtttattagcaataagatagaaaattgagcaagtttataccataattttgtagaaaaaaagaatctgctcagttccatatttcatccgtgaaaaacttgcaatacgagcagtttcaaggaataaataaaaaggaaatgtaaaccatt

SEQ ID NO: 438059 - DNA, 5003 bp, Homo sapiens
gattggcaaagcaccatgctttagaaagtttataagtttttactgagttatcttcttattaactcttgtctgagggttacttggtaaaattttcttatcctattaatacaaactgtataaaacttagtttctaaacttctttctttattaggccactccatgtccaaaagaaccaaataaagagatgataaatgatggcgcttcctggacaatcattagcacagataaggcagagtatacattttatgagggaatgggccctgtccttgccccagtcactcctgtgcctgtggtagagagccttcagggtgagaacgcctagtccaagttggccttcagctctttgcagctactctcagctgtgacctggcatcatttcatttcatgggagttttgatttttctccaatcgtctgattaggggatttttatatacaccatttgttgatttaaagaaaaaaaaacaaaattaggaggagcgtacttgccagaaaatttaaatgtaaataaacttgtatgttatcttgaaatgtttttagctagctttgtaataaaaaacattttaattgcccttttttaaaaaaaacaaatgaaagttgaatgagaatctaatttgtgtactttaatgaaaaatgaaaagttttctcagtgttgtgattttctgtgaattgcagttgaatggcggtggggacgtagcaatgcttgaacttacaggacagaatttcactccaaatttacgagtgtggtttggggatgtagaagctgaaactatgtacaggtgtggagagagtatgctctgtgtcgtcccagacatttctgcattccgagaaggttggagatgggtccggcaaccagtccaggttccagtaactttggtccgaaatgatggaatcatttattccaccagccttacctttacctacacaccagaaccagggccgcggccacattgcagtgcagcaggagcaatccttcgagccaattcaagccaggtgccccctaacgaatcaaacacaaacagcgagggaagttacacaaacgccagcacaaattcaaccagtgtcacatcatctacagccacagtggtatcctaactaccgtctttttgctaggacttaaactgacttgagtgtggcaaaaagttaacaaaaaaggagaaaaaatgaacaatcgtttgtggtttcttgggaaaacttttcataccaggtgatactattcaaaaaccccgttgtctccctgcaagtgctgatttgaaatgcagaagccacagtaaaaaaaaaaaaaaaaaaaaaaaaaaaagaaaaaaaaatcaaaatgtataaatattggaaatcaagtttttcagctgttttgttggttggttggttggtttttgtttggttttgtttaaatgggcaagaagtaaataatgtggctggaatacaagttgaacaaactagaagacacaaatctaacatagtttttatggaccaaggaacttgtatattgtataagctttagtaaaaggtacattttcaccatacctttttttatatcacggtattatagtacaccttgttaccaaataggttgttctcttccccacccacctttgagcttttgctctaaaatacattcaggttccaagcctgaccatccttgtttaatctatcatactcttccaggttttttttttttggtctaaggctggaacttttttcttttttttcagctgaagtcttatgacttttcatgagtcaaaattgtttggatttcagcaagtcaaatcttgcaaaggcctgcatattttttttaagattatatgaagtctgtgcaaaagctttaaaaaaatgcctctgccttgcctgcaatacatgcaatgtatgttaacttagtctctcttctcagacactgttggtagttatttctgtgttttcctttttttaaaaaaaaatatggacttattgtggttatctgagaggttctaacattcacatgcaatttggtgtggccatttagctattaatgagttaatggcgcagaacttgttgatatttgaagtgttctctccccttttcccatgacgtaaatacataggtgtgttccaggatttgttcaggtttttcccccctcctaatcttgtacataacttgtattatgtgtaagttaaacattttattttgaacttggaatgttcccagtgatttcattcagcagggtattttctgccttgttggcaagtgacaaaaaatatgggaagtatttgctaccagttggtagatggtgcccttaatggtagaatgaggaaaatgtccgcaaaagcatgttttattatctttacttttttggggggttggagggggtagcctagccagaacatcattgtaatcttaaaacataagatgcttttattagatgatcaactaaaatagctggaagacagtactttagaaacagatagttgtaagattataaaatgcaaatgtaacttatgttttcatttttttctctgccttttttgtttgtttgttttctcttttccagtactgagcatctccacaaatgtctcctaactcagaaaatgtttcttttcttttcagttgagatttggttgcattcagggttgtaggttggccttgcttgctaaccccgccggttttaccgtgctttcattcctgaactttgtttatgcctttgtttggtttcttcgaaattgcagcagactcattgggctacatttagtacaggaaccacgtgtgtaatgttatacaacacagtctagtaatacaatcatccctcttagagtaaaaactacctctagattgtggtaagcttttactgtcccataaaacaggagccacagtaccttatgaatgcaaaactgtaacttcctacagtgtttccctacagaacattgtctttctggtgtcctgggctgttttgaaaaagtttccattaatagactttttagaaattattattagtagcattttttttccagctttgctgtcttcatcactcactctatgctcagactatgccactgtaaatattcttcctaacatctttaaatcgccttttcctcagttttcaaggggaaggtcatttgtaaagcacgttaggtggttaaatcagttattgcggttttctcttactgcaagcctttttaatcacccccaggctgcattttattctatatcgccttttttcttcaaatctgctccaatcactcacttctctcttataagctaatcctgcctcacaccttaaatctgtttcagtgatcaagggcagaactcattgtggccttatctttctttgttgtaattgttcactgtctctttcttacagaccacttatttctgagtagtagttattcctctctatggagtcatggcaggaatcattacacagtgcttttgttcagagcatggacatgttcctagtgctgctttgctttaacggccacaagtttcctccacttcctaggtttggtatttagttaaggaatcatattaaattaaccaataacaaaagagatacttttgaagaacaaactattccttacccatttttgtagctcaaaaataatttttcaagttcatgaccttattaaaatgaacttgtgtttttttaacaaacgtgtatgttttattttgatagtttctttccgtaagataattgaaatattatactgtaaacccttttcttttctttttttgaaaagtccaagaatgtacttatacaggcatttttccccacctatttttggccattctcataccacagactaaagagtgaaatgatttgtccattgtagcttattgtttatcagtagttcttttgtcagctgcttacattttttctttcatggttttgtgaatcattttcagtatgtaatttataggaaccttgtcctctggttatagtagactgtgtgccctcctccagtgatggcattattagacatgctggtcatttaccctcagaaagactctcttattagaatggtgagtgcttcagttatagtatgtttgaatttttaaaaaattctgttttagaaatgtatcttatgctctcatgactatgcagtttctaaacatacacatagaagctgagtctctgatccaatatgtttttatttgttccatttaatttatcacatagattgggaaggcaagctaaaagccttaaaaatgccctttatattttgagtgatttcagcgttgaacactagtatactatctaaatttgctgctcactttctttaaactgtggcaattaaaggcatgtttatacatgacttaatcgtgaaatgtttgtcactcttactgcacagacttatctgcaatcataactggttagtttttttgttttgtttgttttattgtttttaatgaaactggtaccatctgtgctttcacaaaaaacttccaatgccatttttgagaactaacctaactagtcatgctaaccagaaaatccactggggaggaggttccttttgaaacaaaatgctgttcagttagtaaccaagttactttgattgcaaaagcagctgtgtttctgataagtactgaacaaatgtgtgtaattttctgtgccagacttatgactttgttttcaagcactgtaatgtgggatggatggttagaaacaataatatattagggtttctgtttaaccctttcaggactgaactgtatctccttttgttaattttcccctgtgttgtgataaatgtttgccagcattcagtactgtgttggtccagatgtaggtttatatgctcatttttagcttatttcttgtaccttgcagcatgctctacgcattcagtccttaaggggtttattttacaaactgtgcgcctgtaaggtttattagcaataagatagaaaattgagcaagtttataccataattttgtagaaaaaaagaatctgctcagttccatatttcatccgtgaaaaacttgcaatacgagcagtttcaaggaataaataaaaaggaaatgtaaaccatt

SEQ ID NO: 438060 - DNA, 2121 bp, Homo sapiens
gtagcgtgagactggactgcccgcattgggtacatgcgcagtgccgctcgcgcgggccgcgccaatcctgcagcgccttcaacaggtttcgggcggcgaattccagttctccgggttttggggctccctgcgggaggcagtgctggatctgggaatctctaggaaaggaaagagcaaaggaggggaaagatggggggctgcagtctccacgtacgtccctcaaagcgcgtcctaaaacccggataaccggagcgctccccatggaccacacggagggctcgcccgcggaggagccgcctgcgcatgctccatcgcctgggaaatttggtgagcggcctccacctaaacgacttactagggaagctatgcgaaattatttaaaagagcgaggggatcaaacagtacttattcttcatgcaaaagttgcacagaagtcatatggaaatgaaaaaaggtttttttgcccacctccttgtgtatatcttatgggcagcggatggaagaaaaaaaaagaacaaatggaacgcgatggttgttctgaacaagagtctcaaccgtgtgcatttattgggataggaaatagtgaccaagaaatgcagcagctaaacttggaaggaaagaactattgcacagccaaaacattgtatatatctgactcagacaagcgaaagcacttcatgttgtctgtaaagatgttctatggcaacagtgatgacattggtgtgttcctcagcaagcggataaaagtcatctccaaaccttccaaaaagaagcagtcattgaaaaatgctgacttatgcattgcctcaggaacaaaggtggctctgtttaatcgactacgatcccagacagttagtaccagatacttgcatgtagaaggaggtaattttcatgccagttcacagcagtggggagccttttttattcatctcttggatgatgatgaatcagaaggagaagaattcacagtccgagatggctacatccattatggacaaacagtcaaacttgtgtgctcagttactggcatggcactcccaagattgataattaggaaagttgataagcagaccgcattattggatgcagatgatcctgtgtcacaactccataaatgtgcattttaccttaaggatacagaaagaatgtatttgtgcctttctcaagaaagaataattcaatttcaggccactccatgtccaaaagaaccaaataaagagatgataaatgatggcgcttcctggacaatcattagcacagataaggcagagtatacattttatgagggaatgggccctgtccttgccccagtcactcctgtgcctgtggtagagagccttcagttgaatggcggtggggacgtagcaatgcttgaacttacaggacagaatttcactccaaatttacgagtgtggtttggggatgtagaagctgaaactatgtacaggtgtggagagagtatgctctgtgtcgtcccagacatttctgcattccgagaaggttggagatgggtccggcaaccagtccaggttccagtaactttggtccgaaatgatggaatcatttattccaccagccttacctttacctacacaccagaaccagggccgcggccacattgcagtgcagcaggagcaatccttcgagccaattcaagccaggtgccccctaacgaatcaaacacaaacagcgagggaagttacacaaacgccagcacaaattcaaccagtgtcacatcatctacagccacagtggtatcctaactaccgtctttttgctaggacttaaactgacttgagtgtggcaaaaagttaacaaaaaaggagaaaaaatgaacaatcgtttgtggtttcttgggaaaacttttcataccaggtgatactattcaaaaaccccgttgtctccctgcaagtgctgatttgaaatgcagaagccacagtaaaaaaaaaaaagcacaaacaatcacctgcaatgaggtctacctttctgatgtgccccaggaattggaaccctttttccgggcggcagttgaaagggtgggacttagcttctctttggtctgtgcaaattcactataataaagatggcttcggtctgtcctctgaagggtgacgggtgtgc

SEQ ID NO: 438061 - DNA, 4247 bp, Homo sapiens
ggactaggtatgacgagctgggtgtggagagagtatgctctgtgtcgtcccagacatttctgcattccgagaaggttggagatgggtccggcaaccagtccaggttccagtaactttggtccgaaatgatggaatcatttattccaccagccttacctttacctacacaccagaaccagggccgcggccacattgcagtgcagcaggagcaatccttcgagccaattcaagccaggtgccccctaacgaatcaaacacaaacagcgagggaagttacacaaacgccagcacaaattcaaccagtgtcacatcatctacagccacagtggtatcctaactaccgtctttttgctaggacttaaactgacttgagtgtggcaaaaagttaacaaaaaaggagaaaaaatgaacaatcgtttgtggtttcttgggaaaacttttcataccaggtgatactattcaaaaaccccgttgtctccctgcaagtgctgatttgaaatgcagaagccacagtaaaaaaaaaaaaaaaaaaaaaaaaaaaagaaaaaaaaatcaaaatgtataaatattggaaatcaagtttttcagctgttttgttggttggttggttggtttttgtttggttttgtttaaatgggcaagaagtaaataatgtggctggaatacaagttgaacaaactagaagacacaaatctaacatagtttttatggaccaaggaacttgtatattgtataagctttagtaaaaggtacattttcaccatacctttttttatatcacggtattatagtacaccttgttaccaaataggttgttctcttccccacccacctttgagcttttgctctaaaatacattcaggttccaagcctgaccatccttgtttaatctatcatactcttccaggttttttttttttggtctaaggctggaacttttttcttttttttcagctgaagtcttatgacttttcatgagtcaaaattgtttggatttcagcaagtcaaatcttgcaaaggcctgcatattttttttaagattatatgaagtctgtgcaaaagctttaaaaaaatgcctctgccttgcctgcaatacatgcaatgtatgttaacttagtctctcttctcagacactgttggtagttatttctgtgttttcctttttttaaaaaaaaatatggacttattgtggttatctgagaggttctaacattcacatgcaatttggtgtggccatttagctattaatgagttaatggcgcagaacttgttgatatttgaagtgttctctccccttttcccatgacgtaaatacataggtgtgttccaggatttgttcaggtttttcccccctcctaatcttgtacataacttgtattatgtgtaagttaaacattttattttgaacttggaatgttcccagtgatttcattcagcagggtattttctgccttgttggcaagtgacaaaaaatatgggaagtatttgctaccagttggtagatggtgcccttaatggtagaatgaggaaaatgtccgcaaaagcatgttttattatctttacttttttggggggttggagggggtagcctagccagaacatcattgtaatcttaaaacataagatgcttttattagatgatcaactaaaatagctggaagacagtactttagaaacagatagttgtaagattataaaatgcaaatgtaacttatgttttcatttttttctctgccttttttgtttgtttgttttctcttttccagtactgagcatctccacaaatgtctcctaactcagaaaatgtttcttttcttttcagttgagatttggttgcattcagggttgtaggttggccttgcttgctaaccccgccggttttaccgtgctttcattcctgaactttgtttatgcctttgtttggtttcttcgaaattgcagcagactcattgggctacatttagtacaggaaccacgtgtgtaatgttatacaacacagtctagtaatacaatcatccctcttagagtaaaaactacctctagattgtggtaagcttttactgtcccataaaacaggagccacagtaccttatgaatgcaaaactgtaacttcctacagtgtttccctacagaacattgtctttctggtgtcctgggctgttttgaaaaagtttccattaatagactttttagaaattattattagtagcattttttttccagctttgctgtcttcatcactcactctatgctcagactatgccactgtaaatattcttcctaacatctttaaatcgccttttcctcagttttcaaggggaaggtcatttgtaaagcacgttaggtggttaaatcagttattgcggttttctcttactgcaagcctttttaatcacccccaggctgcattttattctatatcgccttttttcttcaaatctgctccaatcactcacttctctcttataagctaatcctgcctcacaccttaaatctgtttcagtgatcaagggcagaactcattgtggccttatctttctttgttgtaattgttcactgtctctttcttacagaccacttatttctgagtagtagttattcctctctatggagtcatggcaggaatcattacacagtgcttttgttcagagcatggacatgttcctagtgctgctttgctttaacggccacaagtttcctccacttcctaggtttggtatttagttaaggaatcatattaaattaaccaataacaaaagagatacttttgaagaacaaactattccttacccatttttgtagctcaaaaataatttttcaagttcatgaccttattaaaatgaacttgtgtttttttaacaaacgtgtatgttttattttgatagtttctttccgtaagataattgaaatattatactgtaaacccttttcttttctttttttgaaaagtccaagaatgtacttatacaggcatttttccccacctatttttggccattctcataccacagactaaagagtgaaatgatttgtccattgtagcttattgtttatcagtagttcttttgtcagctgcttacattttttctttcatggttttgtgaatcattttcagtatgtaatttataggaaccttgtcctctggttatagtagactgtgtgccctcctccagtgatggcattattagacatgctggtcatttaccctcagaaagactctcttattagaatggtgagtgcttcagttatagtatgtttgaatttttaaaaaattctgttttagaaatgtatcttatgctctcatgactatgcagtttctaaacatacacatagaagctgagtctctgatccaatatgtttttatttgttccatttaatttatcacatagattgggaaggcaagctaaaagccttaaaaatgccctttatattttgagtgatttcagcgttgaacactagtatactatctaaatttgctgctcactttctttaaactgtggcaattaaaggcatgtttatacatgacttaatcgtgaaatgtttgtcactcttactgcacagacttatctgcaatcataactggttagtttttttgttttgtttgttttattgtttttaatgaaactggtaccatctgtgctttcacaaaaaacttccaatgccatttttgagaactaacctaactagtcatgctaaccagaaaatccactggggaggaggttccttttgaaacaaaatgctgttcagttagtaaccaagttactttgattgcaaaagcagctgtgtttctgataagtactgaacaaatgtgtgtaattttctgtgccagacttatgactttgttttcaagcactgtaatgtgggatggatggttagaaacaataatatattagggtttctgtttaaccctttcaggactgaactgtatctccttttgttaattttcccctgtgttgtgataaatgtttgccagcattcagtactgtgttggtccagatgtaggtttatatgctcatttttagcttatttcttgtaccttgcagcatgctctacgcattcagtccttaaggggtttattttacaaactgtgcgcctgtaaggtttattagcaataagatagaaaattgagcaagtttataccataattttgtagaaaaaaagaatctgctcagttccatatttcatccgtgaaaaacttgcaatacgagcagtttcaaggaataaataaaaaggaaatgtaaaccatt

SEQ ID NO: 438062 - DNA, 4092 bp, Homo sapiens
gattgtctgagcatcccactttgctggctgggccacattgcagtgcagcaggagcaatccttcgagccaattcaagccaggtgccccctaacgaatcaaacacaaacagcgagggaagttacacaaacgccagcacaaattcaaccagtgtcacatcatctacagccacagtggtatcctaactaccgtctttttgctaggacttaaactgacttgagtgtggcaaaaagttaacaaaaaaggagaaaaaatgaacaatcgtttgtggtttcttgggaaaacttttcataccaggtgatactattcaaaaaccccgttgtctccctgcaagtgctgatttgaaatgcagaagccacagtaaaaaaaaaaaaaaaaaaaaaaaaaaaagaaaaaaaaatcaaaatgtataaatattggaaatcaagtttttcagctgttttgttggttggttggttggtttttgtttggttttgtttaaatgggcaagaagtaaataatgtggctggaatacaagttgaacaaactagaagacacaaatctaacatagtttttatggaccaaggaacttgtatattgtataagctttagtaaaaggtacattttcaccatacctttttttatatcacggtattatagtacaccttgttaccaaataggttgttctcttccccacccacctttgagcttttgctctaaaatacattcaggttccaagcctgaccatccttgtttaatctatcatactcttccaggttttttttttttggtctaaggctggaacttttttcttttttttcagctgaagtcttatgacttttcatgagtcaaaattgtttggatttcagcaagtcaaatcttgcaaaggcctgcatattttttttaagattatatgaagtctgtgcaaaagctttaaaaaaatgcctctgccttgcctgcaatacatgcaatgtatgttaacttagtctctcttctcagacactgttggtagttatttctgtgttttcctttttttaaaaaaaaatatggacttattgtggttatctgagaggttctaacattcacatgcaatttggtgtggccatttagctattaatgagttaatggcgcagaacttgttgatatttgaagtgttctctccccttttcccatgacgtaaatacataggtgtgttccaggatttgttcaggtttttcccccctcctaatcttgtacataacttgtattatgtgtaagttaaacattttattttgaacttggaatgttcccagtgatttcattcagcagggtattttctgccttgttggcaagtgacaaaaaatatgggaagtatttgctaccagttggtagatggtgcccttaatggtagaatgaggaaaatgtccgcaaaagcatgttttattatctttacttttttggggggttggagggggtagcctagccagaacatcattgtaatcttaaaacataagatgcttttattagatgatcaactaaaatagctggaagacagtactttagaaacagatagttgtaagattataaaatgcaaatgtaacttatgttttcatttttttctctgccttttttgtttgtttgttttctcttttccagtactgagcatctccacaaatgtctcctaactcagaaaatgtttcttttcttttcagttgagatttggttgcattcagggttgtaggttggccttgcttgctaaccccgccggttttaccgtgctttcattcctgaactttgtttatgcctttgtttggtttcttcgaaattgcagcagactcattgggctacatttagtacaggaaccacgtgtgtaatgttatacaacacagtctagtaatacaatcatccctcttagagtaaaaactacctctagattgtggtaagcttttactgtcccataaaacaggagccacagtaccttatgaatgcaaaactgtaacttcctacagtgtttccctacagaacattgtctttctggtgtcctgggctgttttgaaaaagtttccattaatagactttttagaaattattattagtagcattttttttccagctttgctgtcttcatcactcactctatgctcagactatgccactgtaaatattcttcctaacatctttaaatcgccttttcctcagttttcaaggggaaggtcatttgtaaagcacgttaggtggttaaatcagttattgcggttttctcttactgcaagcctttttaatcacccccaggctgcattttattctatatcgccttttttcttcaaatctgctccaatcactcacttctctcttataagctaatcctgcctcacaccttaaatctgtttcagtgatcaagggcagaactcattgtggccttatctttctttgttgtaattgttcactgtctctttcttacagaccacttatttctgagtagtagttattcctctctatggagtcatggcaggaatcattacacagtgcttttgttcagagcatggacatgttcctagtgctgctttgctttaacggccacaagtttcctccacttcctaggtttggtatttagttaaggaatcatattaaattaaccaataacaaaagagatacttttgaagaacaaactattccttacccatttttgtagctcaaaaataatttttcaagttcatgaccttattaaaatgaacttgtgtttttttaacaaacgtgtatgttttattttgatagtttctttccgtaagataattgaaatattatactgtaaacccttttcttttctttttttgaaaagtccaagaatgtacttatacaggcatttttccccacctatttttggccattctcataccacagactaaagagtgaaatgatttgtccattgtagcttattgtttatcagtagttcttttgtcagctgcttacattttttctttcatggttttgtgaatcattttcagtatgtaatttataggaaccttgtcctctggttatagtagactgtgtgccctcctccagtgatggcattattagacatgctggtcatttaccctcagaaagactctcttattagaatggtgagtgcttcagttatagtatgtttgaatttttaaaaaattctgttttagaaatgtatcttatgctctcatgactatgcagtttctaaacatacacatagaagctgagtctctgatccaatatgtttttatttgttccatttaatttatcacatagattgggaaggcaagctaaaagccttaaaaatgccctttatattttgagtgatttcagcgttgaacactagtatactatctaaatttgctgctcactttctttaaactgtggcaattaaaggcatgtttatacatgacttaatcgtgaaatgtttgtcactcttactgcacagacttatctgcaatcataactggttagtttttttgttttgtttgttttattgtttttaatgaaactggtaccatctgtgctttcacaaaaaacttccaatgccatttttgagaactaacctaactagtcatgctaaccagaaaatccactggggaggaggttccttttgaaacaaaatgctgttcagttagtaaccaagttactttgattgcaaaagcagctgtgtttctgataagtactgaacaaatgtgtgtaattttctgtgccagacttatgactttgttttcaagcactgtaatgtgggatggatggttagaaacaataatatattagggtttctgtttaaccctttcaggactgaactgtatctccttttgttaattttcccctgtgttgtgataaatgtttgccagcattcagtactgtgttggtccagatgtaggtttatatgctcatttttagcttatttcttgtaccttgcagcatgctctacgcattcagtccttaaggggtttattttacaaactgtgcgcctgtaaggtttattagcaataagatagaaaattgagcaagtttataccataattttgtagaaaaaaagaatctgctcagttccatatttcatccgtgaaaaacttgcaatacgagcagtttcaaggaataaataaaaaggaaatgtaaaccatt

SEQ ID NO: 438063 - DNA, 1864 bp, Homo sapiens
tgtaaaaaaagcaggcggtaccggaccggaaaacccggtaggtttccagggaaggcagcgagcaggatcccctactctgcgggcggcgcgaggcgtctggctcttcgcggcggcggcgaggggaaagggagcgcgggggctgggtggaatcgaggagtgaggaaaaagggaaggggcgggggagagggaccagggaaggcgtcggggggaatctcgcgagggttggagttttggcgagagtttgtggaagatggcgcctgttgtgacaggtcattgaaattatgagactatcattcaaatggaagcattatagttcttcggaaccattatgatctcaaaacgaaaggagaatgatacagatacactggctgaggtgttttgaggtgcatcgaagtgttccaagctgtgacttaccttaacatgttcttgaagtaccatggcgtggattaaaaggaaatttggtgagcggcctccacctaaacgacttactagggaagctatgcgaaattatttaaaagagcgaggggatcaaacagtacttattcttcatgcaaaagttgcacagaagtcatatggaaatgaaaaaaggtttttttgcccacctccttgtgtatatcttatgggcagcggatggaagaaaaaaaaagaacaaatggaacgcgatggttgttctgaacaagagtctcaaccgtgtgcatttattgggataggaaatagtgaccaagaaatgcagcagctaaacttggaaggaaagaactattgcacagccaaaacattgtatatatctgactcagacaagcgaaagcacttcatgttgtctgtaaagatgttctatggcaacagtgatgacattggtgtgttcctcagcaagcggataaaagtcatctccaaaccttccaaaaagaagcagtcattgaaaaatgctgacttatgcattgcctcaggaacaaaggtggctctgtttaatcgactacgatcccagacagttagtaccagatacttgcatgtagaaggaggtaattttcatgccagttcacagcagtggggagccttttttattcatctcttggatgatgatgaatcagaaggagaagaattcacagtccgagatggctacatccattatggacaaacagtcaaacttgtgtgctcagttactggcatggcactcccaagattgataattaggaaagttgataagcagaccgcattattggatgcagatgatcctgtgtcacaactccataaatgtgcattttaccttaaggatacagaaagaatgtatttgtgcctttctcaagaaagaataattcaatttcaggccactccatgtccaaaagaaccaaataaagagatgataaatgatggcgcttcctggacaatcattagcacagataaggcagagtatacattttatgagggaatgggccctgtccttgccccagtcactcctgtgcctgtggtagagagccttcagttgaatggcggtggggacgtagcaatgcttgaacttacaggacagaatttcactccaaatttacgagtgtggtttggggatgtagaagctgaaactatgtacaggtgtggagagagtatgctctgtgtcgtcccagacatttctgcattccgagaaggttggagatgggtccggcaaccagtccaggttccagtaactttggtccgaaatgatggaatcatttattccaccagccttacctttacctacacaccagaaccagggccgcggccacattgcagtgcagcaggagcaatccttcgagccaattcaagccaggtgccccctaacgaatcaaacacaaacagcgagggaagttacacatagttcagcgttaccggggatggt

SEQ ID NO: 438064 - DNA, 718 bp, Homo sapiens
  misc_feature (633)..(633): n is a, c, g, or t
tgtaaaaaaagcaggcggtaccggaccggaaaacccggtaggtttccagggaaggcagcgagcaggatcccctactctgcgggcggcgcgaggcgtctggctcttcgcggcggcggcgaggggaaagggagcgcgggggctgggtggaatcgaggagtgaggaaaaagggaaggggcgggggagagggaccagggaaggcgtcggggggaatctcgcgagggttggagttttggcgagagtttgtggaagatggcgcctgttgtgacaggtcattgaaattatgagactatcattcaaatggaagcattatagttcttcggaaccattatgatctcaaaacgaaaggagaatgatacagatacactggctgaggtgttttgaggtgcatcgaagtgttccaagctgtgacttaccttaacatgttcttgaagtaccatggcgtggattaaaaggaaatttggtgagcggcctccacctaaacgacttactagggaagctatgcgaaattatttaaaagagcgaggggatcaaacagtacttattcttcatgcaaaagttgcacagaagtcatatggaaatgaaaaaagggaacaacattgggacacaaaaagggtttaatttgtgccccaaantcttccctttgtggttataatcattatggcgcagtggcatgcgaagaaaaaaaagagaacaaatggtgaacgcgatggtgtgtac

SEQ ID NO: 438065 - DNA, 333 bp, Homo sapiens
gtacttgataaaactttttgcatcatccagaggttgtgaggggtgtgggtacaggagattctttcctggcactgattgtaatgtattaaacaaccttgtgttaagtctcatttttaacatgtactttgctttttaaagtgtttttaagtgatttctatttcctcctcaggtgtggagagagtatgctctgtgtcgtcccagacatttctgcattccgagaaggttggagatgggtccggcaaccagtccaggttccagtaactttggtccgaaatgatggaatcatttattccaccagccttacctttacctacacaccagaaccagggccgc

SEQ ID NO: 438066 - DNA, 656 bp, Homo sapiens
ttgtcatttgcctaatcataaaataaatttaaaaagatgacaatttgatttatttttccacctactgcagtggatgatgatgaatcagaaggagaagaattcacagtccgagatggctacatccattatggacaaacagtcaaacttgtgtgctcagttactggcatggcactcccaagattggtatggctctacttttgctttagtgataatgtgaagtaaaaattaatttcttaaacaggaaaatcacaacattcaaatggaaaaacacacctcagttttatgctttttaattttaaaaggtatgttagtaatcagtgctgtttataattgacagttatgctctaccttatttcagaaatgctttaaggtaatagccagtttttacaagtacattcttaatgattttttcttaaatgatttccaatatattttggtggcaatttcctttttggctgtttatctgaagatgttcagtagagggcactataaattacatttcttttctttactaatgcggataaaccgtattcatttttttgtggtacctgccatatcccaatgtaggaccaagtttgcaaacagaagacattcttatttcttttgaaatataagcgtaatttttgttagcttactctctcacaagaagatagatt

SEQ ID NO: 438067 - DNA, 5807 bp, Homo sapiens
tgtaaaaaaagcaggcggtaccggaccggaaaacccggtaggtttccagggaaggcagcgagcaggatcccctactctgcgggcggcgcgaggcgtctggctcttcgcggcggcggcgaggggaaagggagcgcgggggctgggtggaatcgaggagtgaggaaaaagggaaggggcgggggagagggaccagggaaggcgtcggggggaatctcgcgagggttggagttttggcgagagtttgtggaagatggcgcctgttgtgacaggtcattgaaattatgagactatcattcaaatggaagcattatagttcttcggaaccattatgatctcaaaacgaaaggagaatgatacagatacactggctgaggtgttttgaggtgcatcgaagtgttccaagctgtgacttaccttaacatgttcttgaagtaccatggcgtggattaaaaggaaatttggtgagcggcctccacctaaacgacttactagggaagctatgcgaaattatttaaaagagcgaggggatcaaacagtacttattcttcatgcaaaagttgcacagaagtcatatggaaatgaaaaaaggtttttttgcccacctccttgtgtatatcttatgggcagcggatggaagaaaaaaaaagaacaaatggaacgcgatggttgttctgaacaagagtctcaaccgtgtgcatttattgggataggaaatagtgaccaagaaatgcagcagctaaacttggaaggaaagaactattgcacagccaaaacattgtatatatctgactcagacaagcgaaagcacttcatgttgtctgtaaagatgttctatggcaacagtgatgacattggtgtgttcctcagcaagcggataaaagtcatctccaaaccttccaaaaagaagcagtcattgaaaaatgctgacttatgcattgcctcaggaacaaaggtggctctgtttaatcgactacgatcccagacagttagtaccagatacttgcatgtagaaggaggtaattttcatgccagttcacagcagtggggagccttttttattcatctcttggatgatgatgaatcagaaggagaagaattcacagtccgagatggctacatccattatggacaaacagtcaaacttgtgtgctcagttactggcatggcactcccaagattgataattaggaaagttgataagcagaccgcattattggatgcagatgatcctgtgtcacaactccataaatgtgcattttaccttaaggatacagaaagaatgtatttgtgcctttctcaagaaagaataattcaatttcaggccactccatgtccaaaagaaccaaataaagagatgataaatgatggcgcttcctggacaatcattagcacagataaggcagagtatacattttatgagggaatgggccctgtccttgccccagtcactcctgtgcctgtggtagagagccttcagttgaatggcggtggggacgtagcaatgcttgaacttacaggacagaatttcactccaaatttacgagtgtggtttggggatgtagaagctgaaactatgtacaggtgtggagagagtatgctctgtgtcgtcccagacatttctgcattccgagaaggttggagatgggtccggcaaccagtccaggttccagtaactttggtccgaaatgatggaatcatttattccaccagccttacctttacctacacaccagaaccagggccgcggccacattgcagtgcagcaggagcaatccttcgagccaattcaagccaggtgccccctaacgaatcaaacacaaacagcgagggaagttacacaaacgccagcacaaattcaaccagtgtcacatcatctacagccacagtggtatcctaactaccgtctttttgctaggacttaaactgacttgagtgtggcaaaaagttaacaaaaaaggagaaaaaatgaacaatcgtttgtggtttcttgggaaaacttttcataccaggtgatactattcaaaaaccccgttgtctccctgcaagtgctgatttgaaatgcagaagccacagtaaaaaaaaaaaaaaaaaaaaaaaaaaaagaaaaaaaaatcaaaatgtataaatattggaaatcaagtttttcagctgttttgttggttggttggttggtttttgtttggttttgtttaaatgggcaagaagtaaataatgtggctggaatacaagttgaacaaactagaagacacaaatctaacatagtttttatggaccaaggaacttgtatattgtataagctttagtaaaaggtacattttcaccatacctttttttatatcacggtattatagtacaccttgttaccaaataggttgttctcttccccacccacctttgagcttttgctctaaaatacattcaggttccaagcctgaccatccttgtttaatctatcatactcttccaggttttttttttttggtctaaggctggaacttttttcttttttttcagctgaagtcttatgacttttcatgagtcaaaattgtttggatttcagcaagtcaaatcttgcaaaggcctgcatattttttttaagattatatgaagtctgtgcaaaagctttaaaaaaatgcctctgccttgcctgcaatacatgcaatgtatgttaacttagtctctcttctcagacactgttggtagttatttctgtgttttcctttttttaaaaaaaaatatggacttattgtggttatctgagaggttctaacattcacatgcaatttggtgtggccatttagctattaatgagttaatggcgcagaacttgttgatatttgaagtgttctctccccttttcccatgacgtaaatacataggtgtgttccaggatttgttcaggtttttcccccctcctaatcttgtacataacttgtattatgtgtaagttaaacattttattttgaacttggaatgttcccagtgatttcattcagcagggtattttctgccttgttggcaagtgacaaaaaatatgggaagtatttgctaccagttggtagatggtgcccttaatggtagaatgaggaaaatgtccgcaaaagcatgttttattatctttacttttttggggggttggagggggtagcctagccagaacatcattgtaatcttaaaacataagatgcttttattagatgatcaactaaaatagctggaagacagtactttagaaacagatagttgtaagattataaaatgcaaatgtaacttatgttttcatttttttctctgccttttttgtttgtttgttttctcttttccagtactgagcatctccacaaatgtctcctaactcagaaaatgtttcttttcttttcagttgagatttggttgcattcagggttgtaggttggccttgcttgctaaccccgccggttttaccgtgctttcattcctgaactttgtttatgcctttgtttggtttcttcgaaattgcagcagactcattgggctacatttagtacaggaaccacgtgtgtaatgttatacaacacagtctagtaatacaatcatccctcttagagtaaaaactacctctagattgtggtaagcttttactgtcccataaaacaggagccacagtaccttatgaatgcaaaactgtaacttcctacagtgtttccctacagaacattgtctttctggtgtcctgggctgttttgaaaaagtttccattaatagactttttagaaattattattagtagcattttttttccagctttgctgtcttcatcactcactctatgctcagactatgccactgtaaatattcttcctaacatctttaaatcgccttttcctcagttttcaaggggaaggtcatttgtaaagcacgttaggtggttaaatcagttattgcggttttctcttactgcaagcctttttaatcacccccaggctgcattttattctatatcgccttttttcttcaaatctgctccaatcactcacttctctcttataagctaatcctgcctcacaccttaaatctgtttcagtgatcaagggcagaactcattgtggccttatctttctttgttgtaattgttcactgtctctttcttacagaccacttatttctgagtagtagttattcctctctatggagtcatggcaggaatcattacacagtgcttttgttcagagcatggacatgttcctagtgctgctttgctttaacggccacaagtttcctccacttcctaggtttggtatttagttaaggaatcatattaaattaaccaataacaaaagagatacttttgaagaacaaactattccttacccatttttgtagctcaaaaataatttttcaagttcatgaccttattaaaatgaacttgtgtttttttaacaaacgtgtatgttttattttgatagtttctttccgtaagataattgaaatattatactgtaaacccttttcttttctttttttgaaaagtccaagaatgtacttatacaggcatttttccccacctatttttggccattctcataccacagactaaagagtgaaatgatttgtccattgtagcttattgtttatcagtagttcttttgtcagctgcttacattttttctttcatggttttgtgaatcattttcagtatgtaatttataggaaccttgtcctctggttatagtagactgtgtgccctcctccagtgatggcattattagacatgctggtcatttaccctcagaaagactctcttattagaatggtgagtgcttcagttatagtatgtttgaatttttaaaaaattctgttttagaaatgtatcttatgctctcatgactatgcagtttctaaacatacacatagaagctgagtctctgatccaatatgtttttatttgttccatttaatttatcacatagattgggaaggcaagctaaaagccttaaaaatgccctttatattttgagtgatttcagcgttgaacactagtatactatctaaatttgctgctcactttctttaaactgtggcaattaaaggcatgtttatacatgacttaatcgtgaaatgtttgtcactcttactgcacagacttatctgcaatcataactggttagtttttttgttttgtttgttttattgtttttaatgaaactggtaccatctgtgctttcacaaaaaacttccaatgccatttttgagaactaacctaactagtcatgctaaccagaaaatccactggggaggaggttccttttgaaacaaaatgctgttcagttagtaaccaagttactttgattgcaaaagcagctgtgtttctgataagtactgaacaaatgtgtgtaattttctgtgccagacttatgactttgttttcaagcactgtaatgtgggatggatggttagaaacaataatatattagggtttctgtttaaccctttcaggactgaactgtatctccttttgttaattttcccctgtgttgtgataaatgtttgccagcattcagtactgtgttggtccagatgtaggtttatatgctcatttttagcttatttcttgtaccttgcagcatgctctacgcattcagtccttaaggggtttattttacaaactgtgcgcctgtaaggtttattagcaataagatagaaaattgagcaagtttataccataattttgtagaaaaaaagaatctgctcagttccatatttcatccgtgaaaaacttgcaatacgagcagtttcaaggaataaataaaaaggaaatgtaaaccatt

SEQ ID NO: 438068 - DNA, 5564 bp, Homo sapiens
acaggatcttttcttgcccccgagtcgtcattgaaattatgagactatcattcaaatggaagcattatagttcttcggaaccattatgatctcaaaacgaaaggagaatgatacagatacactggctgaggtgttttgaggtgcatcgaagtgttccaagctgtgacttaccttaacatgttcttgaagtaccatggcgtggattaaaaggaaatttggtgagcggcctccacctaaacgacttactagggaagctatgcgaaattatttaaaagagcgaggggatcaaacagtacttattcttcatgcaaaagttgcacagaagtcatatggaaatgaaaaaaggtttttttgcccacctccttgtgtatatcttatgggcagcggatggaagaaaaaaaaagaacaaatggaacgcgatggttgttctgaacaagagtctcaaccgtgtgcatttattgggataggaaatagtgaccaagaaatgcagcagctaaacttggaaggaaagaactattgcacagccaaaacattgtatatatctgactcagacaagcgaaagcacttcatgttgtctgtaaagatgttctatggcaacagtgatgacattggtgtgttcctcagcaagcggataaaagtcatctccaaaccttccaaaaagaagcagtcattgaaaaatgctgacttatgcattgcctcaggaacaaaggtggctctgtttaatcgactacgatcccagacagttagtaccagatacttgcatgtagaaggaggtaattttcatgccagttcacagcagtggggagccttttttattcatctcttggatgatgatgaatcagaaggagaagaattcacagtccgagatggctacatccattatggacaaacagtcaaacttgtgtgctcagttactggcatggcactcccaagattgataattaggaaagttgataagcagaccgcattattggatgcagatgatcctgtgtcacaactccataaatgtgcattttaccttaaggatacagaaagaatgtatttgtgcctttctcaagaaagaataattcaatttcaggccactccatgtccaaaagaaccaaataaagagatgataaatgatggcgcttcctggacaatcattagcacagataaggcagagtatacattttatgagggaatgggccctgtccttgccccagtcactcctgtgcctgtggtagagagccttcagttgaatggcggtggggacgtagcaatgcttgaacttacaggacagaatttcactccaaatttacgagtgtggtttggggatgtagaagctgaaactatgtacaggtgtggagagagtatgctctgtgtcgtcccagacatttctgcattccgagaaggttggagatgggtccggcaaccagtccaggttccagtaactttggtccgaaatgatggaatcatttattccaccagccttacctttacctacacaccagaaccagggccgcggccacattgcagtgcagcaggagcaatccttcgagccaattcaagccaggtgccccctaacgaatcaaacacaaacagcgagggaagttacacaaacgccagcacaaattcaaccagtgtcacatcatctacagccacagtggtatcctaactaccgtctttttgctaggacttaaactgacttgagtgtggcaaaaagttaacaaaaaaggagaaaaaatgaacaatcgtttgtggtttcttgggaaaacttttcataccaggtgatactattcaaaaaccccgttgtctccctgcaagtgctgatttgaaatgcagaagccacagtaaaaaaaaaaaaaaaaaaaaaaaaaaaagaaaaaaaaatcaaaatgtataaatattggaaatcaagtttttcagctgttttgttggttggttggttggtttttgtttggttttgtttaaatgggcaagaagtaaataatgtggctggaatacaagttgaacaaactagaagacacaaatctaacatagtttttatggaccaaggaacttgtatattgtataagctttagtaaaaggtacattttcaccatacctttttttatatcacggtattatagtacaccttgttaccaaataggttgttctcttccccacccacctttgagcttttgctctaaaatacattcaggttccaagcctgaccatccttgtttaatctatcatactcttccaggttttttttttttggtctaaggctggaacttttttcttttttttcagctgaagtcttatgacttttcatgagtcaaaattgtttggatttcagcaagtcaaatcttgcaaaggcctgcatattttttttaagattatatgaagtctgtgcaaaagctttaaaaaaatgcctctgccttgcctgcaatacatgcaatgtatgttaacttagtctctcttctcagacactgttggtagttatttctgtgttttcctttttttaaaaaaaaatatggacttattgtggttatctgagaggttctaacattcacatgcaatttggtgtggccatttagctattaatgagttaatggcgcagaacttgttgatatttgaagtgttctctccccttttcccatgacgtaaatacataggtgtgttccaggatttgttcaggtttttcccccctcctaatcttgtacataacttgtattatgtgtaagttaaacattttattttgaacttggaatgttcccagtgatttcattcagcagggtattttctgccttgttggcaagtgacaaaaaatatgggaagtatttgctaccagttggtagatggtgcccttaatggtagaatgaggaaaatgtccgcaaaagcatgttttattatctttacttttttggggggttggagggggtagcctagccagaacatcattgtaatcttaaaacataagatgcttttattagatgatcaactaaaatagctggaagacagtactttagaaacagatagttgtaagattataaaatgcaaatgtaacttatgttttcatttttttctctgccttttttgtttgtttgttttctcttttccagtactgagcatctccacaaatgtctcctaactcagaaaatgtttcttttcttttcagttgagatttggttgcattcagggttgtaggttggccttgcttgctaaccccgccggttttaccgtgctttcattcctgaactttgtttatgcctttgtttggtttcttcgaaattgcagcagactcattgggctacatttagtacaggaaccacgtgtgtaatgttatacaacacagtctagtaatacaatcatccctcttagagtaaaaactacctctagattgtggtaagcttttactgtcccataaaacaggagccacagtaccttatgaatgcaaaactgtaacttcctacagtgtttccctacagaacattgtctttctggtgtcctgggctgttttgaaaaagtttccattaatagactttttagaaattattattagtagcattttttttccagctttgctgtcttcatcactcactctatgctcagactatgccactgtaaatattcttcctaacatctttaaatcgccttttcctcagttttcaaggggaaggtcatttgtaaagcacgttaggtggttaaatcagttattgcggttttctcttactgcaagcctttttaatcacccccaggctgcattttattctatatcgccttttttcttcaaatctgctccaatcactcacttctctcttataagctaatcctgcctcacaccttaaatctgtttcagtgatcaagggcagaactcattgtggccttatctttctttgttgtaattgttcactgtctctttcttacagaccacttatttctgagtagtagttattcctctctatggagtcatggcaggaatcattacacagtgcttttgttcagagcatggacatgttcctagtgctgctttgctttaacggccacaagtttcctccacttcctaggtttggtatttagttaaggaatcatattaaattaaccaataacaaaagagatacttttgaagaacaaactattccttacccatttttgtagctcaaaaataatttttcaagttcatgaccttattaaaatgaacttgtgtttttttaacaaacgtgtatgttttattttgatagtttctttccgtaagataattgaaatattatactgtaaacccttttcttttctttttttgaaaagtccaagaatgtacttatacaggcatttttccccacctatttttggccattctcataccacagactaaagagtgaaatgatttgtccattgtagcttattgtttatcagtagttcttttgtcagctgcttacattttttctttcatggttttgtgaatcattttcagtatgtaatttataggaaccttgtcctctggttatagtagactgtgtgccctcctccagtgatggcattattagacatgctggtcatttaccctcagaaagactctcttattagaatggtgagtgcttcagttatagtatgtttgaatttttaaaaaattctgttttagaaatgtatcttatgctctcatgactatgcagtttctaaacatacacatagaagctgagtctctgatccaatatgtttttatttgttccatttaatttatcacatagattgggaaggcaagctaaaagccttaaaaatgccctttatattttgagtgatttcagcgttgaacactagtatactatctaaatttgctgctcactttctttaaactgtggcaattaaaggcatgtttatacatgacttaatcgtgaaatgtttgtcactcttactgcacagacttatctgcaatcataactggttagtttttttgttttgtttgttttattgtttttaatgaaactggtaccatctgtgctttcacaaaaaacttccaatgccatttttgagaactaacctaactagtcatgctaaccagaaaatccactggggaggaggttccttttgaaacaaaatgctgttcagttagtaaccaagttactttgattgcaaaagcagctgtgtttctgataagtactgaacaaatgtgtgtaattttctgtgccagacttatgactttgttttcaagcactgtaatgtgggatggatggttagaaacaataatatattagggtttctgtttaaccctttcaggactgaactgtatctccttttgttaattttcccctgtgttgtgataaatgtttgccagcattcagtactgtgttggtccagatgtaggtttatatgctcatttttagcttatttcttgtaccttgcagcatgctctacgcattcagtccttaaggggtttattttacaaactgtgcgcctgtaaggtttattagcaataagatagaaaattgagcaagtttataccataattttgtagaaaaaaagaatctgctcagttccatatttcatccgtgaaaaacttgcaatacgagcagtttcaaggaataaataaaaaggaaatgtaaaccatt

SEQ ID NO: 438069 - DNA, 5673 bp, Homo sapiens
gtagcgtgagactggactgcccgcattgggtacatgcgcagtgccgctcgcgcgggccgcgccaatcctgcagcgccttcaacaggtttcgggcggcgaattccagttctccgggttttggggctccctgcgggaggcagtgctggatctgggaatctctaggaaaggaaagagcaaaggaggggaaagatggggggctgcagtctccacgtacgtccctcaaagcgcgtcctaaaacccggataaccggagcgctccccatggaccacacggagggctcgcccgcggaggagccgcctgcgcatgctccatcgcctgggaaatttggtgagcggcctccacctaaacgacttactagggaagctatgcgaaattatttaaaagagcgaggggatcaaacagtacttattcttcatgcaaaagttgcacagaagtcatatggaaatgaaaaaaggtttttttgcccacctccttgtgtatatcttatgggcagcggatggaagaaaaaaaaagaacaaatggaacgcgatggttgttctgaacaagagtctcaaccgtgtgcatttattgggataggaaatagtgaccaagaaatgcagcagctaaacttggaaggaaagaactattgcacagccaaaacattgtatatatctgactcagacaagcgaaagcacttcatgttgtctgtaaagatgttctatggcaacagtgatgacattggtgtgttcctcagcaagcggataaaagtcatctccaaaccttccaaaaagaagcagtcattgaaaaatgctgacttatgcattgcctcaggaacaaaggtggctctgtttaatcgactacgatcccagacagttagtaccagatacttgcatgtagaaggaggtaattttcatgccagttcacagcagtggggagccttttttattcatctcttggatgatgatgaatcagaaggagaagaattcacagtccgagatggctacatccattatggacaaacagtcaaacttgtgtgctcagttactggcatggcactcccaagattgataattaggaaagttgataagcagaccgcattattggatgcagatgatcctgtgtcacaactccataaatgtgcattttaccttaaggatacagaaagaatgtatttgtgcctttctcaagaaagaataattcaatttcaggccactccatgtccaaaagaaccaaataaagagatgataaatgatggcgcttcctggacaatcattagcacagataaggcagagtatacattttatgagggaatgggccctgtccttgccccagtcactcctgtgcctgtggtagagagccttcagttgaatggcggtggggacgtagcaatgcttgaacttacaggacagaatttcactccaaatttacgagtgtggtttggggatgtagaagctgaaactatgtacaggtgtggagagagtatgctctgtgtcgtcccagacatttctgcattccgagaaggttggagatgggtccggcaaccagtccaggttccagtaactttggtccgaaatgatggaatcatttattccaccagccttacctttacctacacaccagaaccagggccgcggccacattgcagtgcagcaggagcaatccttcgagccaattcaagccaggtgccccctaacgaatcaaacacaaacagcgagggaagttacacaaacgccagcacaaattcaaccagtgtcacatcatctacagccacagtggtatcctaactaccgtctttttgctaggacttaaactgacttgagtgtggcaaaaagttaacaaaaaaggagaaaaaatgaacaatcgtttgtggtttcttgggaaaacttttcataccaggtgatactattcaaaaaccccgttgtctccctgcaagtgctgatttgaaatgcagaagccacagtaaaaaaaaaaaaaaaaaaaaaaaaaaaagaaaaaaaaatcaaaatgtataaatattggaaatcaagtttttcagctgttttgttggttggttggttggtttttgtttggttttgtttaaatgggcaagaagtaaataatgtggctggaatacaagttgaacaaactagaagacacaaatctaacatagtttttatggaccaaggaacttgtatattgtataagctttagtaaaaggtacattttcaccatacctttttttatatcacggtattatagtacaccttgttaccaaataggttgttctcttccccacccacctttgagcttttgctctaaaatacattcaggttccaagcctgaccatccttgtttaatctatcatactcttccaggttttttttttttggtctaaggctggaacttttttcttttttttcagctgaagtcttatgacttttcatgagtcaaaattgtttggatttcagcaagtcaaatcttgcaaaggcctgcatattttttttaagattatatgaagtctgtgcaaaagctttaaaaaaatgcctctgccttgcctgcaatacatgcaatgtatgttaacttagtctctcttctcagacactgttggtagttatttctgtgttttcctttttttaaaaaaaaatatggacttattgtggttatctgagaggttctaacattcacatgcaatttggtgtggccatttagctattaatgagttaatggcgcagaacttgttgatatttgaagtgttctctccccttttcccatgacgtaaatacataggtgtgttccaggatttgttcaggtttttcccccctcctaatcttgtacataacttgtattatgtgtaagttaaacattttattttgaacttggaatgttcccagtgatttcattcagcagggtattttctgccttgttggcaagtgacaaaaaatatgggaagtatttgctaccagttggtagatggtgcccttaatggtagaatgaggaaaatgtccgcaaaagcatgttttattatctttacttttttggggggttggagggggtagcctagccagaacatcattgtaatcttaaaacataagatgcttttattagatgatcaactaaaatagctggaagacagtactttagaaacagatagttgtaagattataaaatgcaaatgtaacttatgttttcatttttttctctgccttttttgtttgtttgttttctcttttccagtactgagcatctccacaaatgtctcctaactcagaaaatgtttcttttcttttcagttgagatttggttgcattcagggttgtaggttggccttgcttgctaaccccgccggttttaccgtgctttcattcctgaactttgtttatgcctttgtttggtttcttcgaaattgcagcagactcattgggctacatttagtacaggaaccacgtgtgtaatgttatacaacacagtctagtaatacaatcatccctcttagagtaaaaactacctctagattgtggtaagcttttactgtcccataaaacaggagccacagtaccttatgaatgcaaaactgtaacttcctacagtgtttccctacagaacattgtctttctggtgtcctgggctgttttgaaaaagtttccattaatagactttttagaaattattattagtagcattttttttccagctttgctgtcttcatcactcactctatgctcagactatgccactgtaaatattcttcctaacatctttaaatcgccttttcctcagttttcaaggggaaggtcatttgtaaagcacgttaggtggttaaatcagttattgcggttttctcttactgcaagcctttttaatcacccccaggctgcattttattctatatcgccttttttcttcaaatctgctccaatcactcacttctctcttataagctaatcctgcctcacaccttaaatctgtttcagtgatcaagggcagaactcattgtggccttatctttctttgttgtaattgttcactgtctctttcttacagaccacttatttctgagtagtagttattcctctctatggagtcatggcaggaatcattacacagtgcttttgttcagagcatggacatgttcctagtgctgctttgctttaacggccacaagtttcctccacttcctaggtttggtatttagttaaggaatcatattaaattaaccaataacaaaagagatacttttgaagaacaaactattccttacccatttttgtagctcaaaaataatttttcaagttcatgaccttattaaaatgaacttgtgtttttttaacaaacgtgtatgttttattttgatagtttctttccgtaagataattgaaatattatactgtaaacccttttcttttctttttttgaaaagtccaagaatgtacttatacaggcatttttccccacctatttttggccattctcataccacagactaaagagtgaaatgatttgtccattgtagcttattgtttatcagtagttcttttgtcagctgcttacattttttctttcatggttttgtgaatcattttcagtatgtaatttataggaaccttgtcctctggttatagtagactgtgtgccctcctccagtgatggcattattagacatgctggtcatttaccctcagaaagactctcttattagaatggtgagtgcttcagttatagtatgtttgaatttttaaaaaattctgttttagaaatgtatcttatgctctcatgactatgcagtttctaaacatacacatagaagctgagtctctgatccaatatgtttttatttgttccatttaatttatcacatagattgggaaggcaagctaaaagccttaaaaatgccctttatattttgagtgatttcagcgttgaacactagtatactatctaaatttgctgctcactttctttaaactgtggcaattaaaggcatgtttatacatgacttaatcgtgaaatgtttgtcactcttactgcacagacttatctgcaatcataactggttagtttttttgttttgtttgttttattgtttttaatgaaactggtaccatctgtgctttcacaaaaaacttccaatgccatttttgagaactaacctaactagtcatgctaaccagaaaatccactggggaggaggttccttttgaaacaaaatgctgttcagttagtaaccaagttactttgattgcaaaagcagctgtgtttctgataagtactgaacaaatgtgtgtaattttctgtgccagacttatgactttgttttcaagcactgtaatgtgggatggatggttagaaacaataatatattagggtttctgtttaaccctttcaggactgaactgtatctccttttgttaattttcccctgtgttgtgataaatgtttgccagcattcagtactgtgttggtccagatgtaggtttatatgctcatttttagcttatttcttgtaccttgcagcatgctctacgcattcagtccttaaggggtttattttacaaactgtgcgcctgtaaggtttattagcaataagatagaaaattgagcaagtttataccataattttgtagaaaaaaagaatctgctcagttccatatttcatccgtgaaaaacttgcaatacgagcagtttcaaggaataaataaaaaggaaatgtaaaccatt

SEQ ID NO: 438070 - DNA, 5607 bp, Homo sapiens
acccattgaggaggtgtttcatctaggcctgtgaaacgcagcccattttcccaggacccctcctcccttctcctcggccccgcctcctgacccctccattcctcgtccccgtagtaatcccctccggttttcctcagtctccacgtacgtccctcaaagcgcgtcctaaaacccggataaccggagcgctccccatggaccacacggagggctcgcccgcggaggagccgcctgcgcatgctccatcgcctgggaaatttggtgagcggcctccacctaaacgacttactagggaagctatgcgaaattatttaaaagagcgaggggatcaaacagtacttattcttcatgcaaaagttgcacagaagtcatatggaaatgaaaaaaggtttttttgcccacctccttgtgtatatcttatgggcagcggatggaagaaaaaaaaagaacaaatggaacgcgatggttgttctgaacaagagtctcaaccgtgtgcatttattgggataggaaatagtgaccaagaaatgcagcagctaaacttggaaggaaagaactattgcacagccaaaacattgtatatatctgactcagacaagcgaaagcacttcatgttgtctgtaaagatgttctatggcaacagtgatgacattggtgtgttcctcagcaagcggataaaagtcatctccaaaccttccaaaaagaagcagtcattgaaaaatgctgacttatgcattgcctcaggaacaaaggtggctctgtttaatcgactacgatcccagacagttagtaccagatacttgcatgtagaaggaggtaattttcatgccagttcacagcagtggggagccttttttattcatctcttggatgatgatgaatcagaaggagaagaattcacagtccgagatggctacatccattatggacaaacagtcaaacttgtgtgctcagttactggcatggcactcccaagattgataattaggaaagttgataagcagaccgcattattggatgcagatgatcctgtgtcacaactccataaatgtgcattttaccttaaggatacagaaagaatgtatttgtgcctttctcaagaaagaataattcaatttcaggccactccatgtccaaaagaaccaaataaagagatgataaatgatggcgcttcctggacaatcattagcacagataaggcagagtatacattttatgagggaatgggccctgtccttgccccagtcactcctgtgcctgtggtagagagccttcagttgaatggcggtggggacgtagcaatgcttgaacttacaggacagaatttcactccaaatttacgagtgtggtttggggatgtagaagctgaaactatgtacaggtgtggagagagtatgctctgtgtcgtcccagacatttctgcattccgagaaggttggagatgggtccggcaaccagtccaggttccagtaactttggtccgaaatgatggaatcatttattccaccagccttacctttacctacacaccagaaccagggccgcggccacattgcagtgcagcaggagcaatccttcgagccaattcaagccaggtgccccctaacgaatcaaacacaaacagcgagggaagttacacaaacgccagcacaaattcaaccagtgtcacatcatctacagccacagtggtatcctaactaccgtctttttgctaggacttaaactgacttgagtgtggcaaaaagttaacaaaaaaggagaaaaaatgaacaatcgtttgtggtttcttgggaaaacttttcataccaggtgatactattcaaaaaccccgttgtctccctgcaagtgctgatttgaaatgcagaagccacagtaaaaaaaaaaaaaaaaaaaaaaaaaaaagaaaaaaaaatcaaaatgtataaatattggaaatcaagtttttcagctgttttgttggttggttggttggtttttgtttggttttgtttaaatgggcaagaagtaaataatgtggctggaatacaagttgaacaaactagaagacacaaatctaacatagtttttatggaccaaggaacttgtatattgtataagctttagtaaaaggtacattttcaccatacctttttttatatcacggtattatagtacaccttgttaccaaataggttgttctcttccccacccacctttgagcttttgctctaaaatacattcaggttccaagcctgaccatccttgtttaatctatcatactcttccaggttttttttttttggtctaaggctggaacttttttcttttttttcagctgaagtcttatgacttttcatgagtcaaaattgtttggatttcagcaagtcaaatcttgcaaaggcctgcatattttttttaagattatatgaagtctgtgcaaaagctttaaaaaaatgcctctgccttgcctgcaatacatgcaatgtatgttaacttagtctctcttctcagacactgttggtagttatttctgtgttttcctttttttaaaaaaaaatatggacttattgtggttatctgagaggttctaacattcacatgcaatttggtgtggccatttagctattaatgagttaatggcgcagaacttgttgatatttgaagtgttctctccccttttcccatgacgtaaatacataggtgtgttccaggatttgttcaggtttttcccccctcctaatcttgtacataacttgtattatgtgtaagttaaacattttattttgaacttggaatgttcccagtgatttcattcagcagggtattttctgccttgttggcaagtgacaaaaaatatgggaagtatttgctaccagttggtagatggtgcccttaatggtagaatgaggaaaatgtccgcaaaagcatgttttattatctttacttttttggggggttggagggggtagcctagccagaacatcattgtaatcttaaaacataagatgcttttattagatgatcaactaaaatagctggaagacagtactttagaaacagatagttgtaagattataaaatgcaaatgtaacttatgttttcatttttttctctgccttttttgtttgtttgttttctcttttccagtactgagcatctccacaaatgtctcctaactcagaaaatgtttcttttcttttcagttgagatttggttgcattcagggttgtaggttggccttgcttgctaaccccgccggttttaccgtgctttcattcctgaactttgtttatgcctttgtttggtttcttcgaaattgcagcagactcattgggctacatttagtacaggaaccacgtgtgtaatgttatacaacacagtctagtaatacaatcatccctcttagagtaaaaactacctctagattgtggtaagcttttactgtcccataaaacaggagccacagtaccttatgaatgcaaaactgtaacttcctacagtgtttccctacagaacattgtctttctggtgtcctgggctgttttgaaaaagtttccattaatagactttttagaaattattattagtagcattttttttccagctttgctgtcttcatcactcactctatgctcagactatgccactgtaaatattcttcctaacatctttaaatcgccttttcctcagttttcaaggggaaggtcatttgtaaagcacgttaggtggttaaatcagttattgcggttttctcttactgcaagcctttttaatcacccccaggctgcattttattctatatcgccttttttcttcaaatctgctccaatcactcacttctctcttataagctaatcctgcctcacaccttaaatctgtttcagtgatcaagggcagaactcattgtggccttatctttctttgttgtaattgttcactgtctctttcttacagaccacttatttctgagtagtagttattcctctctatggagtcatggcaggaatcattacacagtgcttttgttcagagcatggacatgttcctagtgctgctttgctttaacggccacaagtttcctccacttcctaggtttggtatttagttaaggaatcatattaaattaaccaataacaaaagagatacttttgaagaacaaactattccttacccatttttgtagctcaaaaataatttttcaagttcatgaccttattaaaatgaacttgtgtttttttaacaaacgtgtatgttttattttgatagtttctttccgtaagataattgaaatattatactgtaaacccttttcttttctttttttgaaaagtccaagaatgtacttatacaggcatttttccccacctatttttggccattctcataccacagactaaagagtgaaatgatttgtccattgtagcttattgtttatcagtagttcttttgtcagctgcttacattttttctttcatggttttgtgaatcattttcagtatgtaatttataggaaccttgtcctctggttatagtagactgtgtgccctcctccagtgatggcattattagacatgctggtcatttaccctcagaaagactctcttattagaatggtgagtgcttcagttatagtatgtttgaatttttaaaaaattctgttttagaaatgtatcttatgctctcatgactatgcagtttctaaacatacacatagaagctgagtctctgatccaatatgtttttatttgttccatttaatttatcacatagattgggaaggcaagctaaaagccttaaaaatgccctttatattttgagtgatttcagcgttgaacactagtatactatctaaatttgctgctcactttctttaaactgtggcaattaaaggcatgtttatacatgacttaatcgtgaaatgtttgtcactcttactgcacagacttatctgcaatcataactggttagtttttttgttttgtttgttttattgtttttaatgaaactggtaccatctgtgctttcacaaaaaacttccaatgccatttttgagaactaacctaactagtcatgctaaccagaaaatccactggggaggaggttccttttgaaacaaaatgctgttcagttagtaaccaagttactttgattgcaaaagcagctgtgtttctgataagtactgaacaaatgtgtgtaattttctgtgccagacttatgactttgttttcaagcactgtaatgtgggatggatggttagaaacaataatatattagggtttctgtttaaccctttcaggactgaactgtatctccttttgttaattttcccctgtgttgtgataaatgtttgccagcattcagtactgtgttggtccagatgtaggtttatatgctcatttttagcttatttcttgtaccttgcagcatgctctacgcattcagtccttaaggggtttattttacaaactgtgcgcctgtaaggtttattagcaataagatagaaaattgagcaagtttataccataattttgtagaaaaaaagaatctgctcagttccatatttcatccgtgaaaaacttgcaatacgagcagtttcaaggaataaataaaaaggaaatgtaaaccatt

SEQ ID NO: 438071 - DNA, 5409 bp, Homo sapiens
actgttttttcagcagggcgagttaggacggcacaaactgagagtttctgttctggaaatttggtgagcggcctccacctaaacgacttactagggaagctatgcgaaattatttaaaagagcgaggggatcaaacagtacttattcttcatgcaaaagttgcacagaagtcatatggaaatgaaaaaaggtttttttgcccacctccttgtgtatatcttatgggcagcggatggaagaaaaaaaaagaacaaatggaacgcgatggttgttctgaacaagagtctcaaccgtgtgcatttattgggataggaaatagtgaccaagaaatgcagcagctaaacttggaaggaaagaactattgcacagccaaaacattgtatatatctgactcagacaagcgaaagcacttcatgttgtctgtaaagatgttctatggcaacagtgatgacattggtgtgttcctcagcaagcggataaaagtcatctccaaaccttccaaaaagaagcagtcattgaaaaatgctgacttatgcattgcctcaggaacaaaggtggctctgtttaatcgactacgatcccagacagttagtaccagatacttgcatgtagaaggaggtaattttcatgccagttcacagcagtggggagccttttttattcatctcttggatgatgatgaatcagaaggagaagaattcacagtccgagatggctacatccattatggacaaacagtcaaacttgtgtgctcagttactggcatggcactcccaagattgataattaggaaagttgataagcagaccgcattattggatgcagatgatcctgtgtcacaactccataaatgtgcattttaccttaaggatacagaaagaatgtatttgtgcctttctcaagaaagaataattcaatttcaggccactccatgtccaaaagaaccaaataaagagatgataaatgatggcgcttcctggacaatcattagcacagataaggcagagtatacattttatgagggaatgggccctgtccttgccccagtcactcctgtgcctgtggtagagagccttcagttgaatggcggtggggacgtagcaatgcttgaacttacaggacagaatttcactccaaatttacgagtgtggtttggggatgtagaagctgaaactatgtacaggtgtggagagagtatgctctgtgtcgtcccagacatttctgcattccgagaaggttggagatgggtccggcaaccagtccaggttccagtaactttggtccgaaatgatggaatcatttattccaccagccttacctttacctacacaccagaaccagggccgcggccacattgcagtgcagcaggagcaatccttcgagccaattcaagccaggtgccccctaacgaatcaaacacaaacagcgagggaagttacacaaacgccagcacaaattcaaccagtgtcacatcatctacagccacagtggtatcctaactaccgtctttttgctaggacttaaactgacttgagtgtggcaaaaagttaacaaaaaaggagaaaaaatgaacaatcgtttgtggtttcttgggaaaacttttcataccaggtgatactattcaaaaaccccgttgtctccctgcaagtgctgatttgaaatgcagaagccacagtaaaaaaaaaaaaaaaaaaaaaaaaaaaagaaaaaaaaatcaaaatgtataaatattggaaatcaagtttttcagctgttttgttggttggttggttggtttttgtttggttttgtttaaatgggcaagaagtaaataatgtggctggaatacaagttgaacaaactagaagacacaaatctaacatagtttttatggaccaaggaacttgtatattgtataagctttagtaaaaggtacattttcaccatacctttttttatatcacggtattatagtacaccttgttaccaaataggttgttctcttccccacccacctttgagcttttgctctaaaatacattcaggttccaagcctgaccatccttgtttaatctatcatactcttccaggttttttttttttggtctaaggctggaacttttttcttttttttcagctgaagtcttatgacttttcatgagtcaaaattgtttggatttcagcaagtcaaatcttgcaaaggcctgcatattttttttaagattatatgaagtctgtgcaaaagctttaaaaaaatgcctctgccttgcctgcaatacatgcaatgtatgttaacttagtctctcttctcagacactgttggtagttatttctgtgttttcctttttttaaaaaaaaatatggacttattgtggttatctgagaggttctaacattcacatgcaatttggtgtggccatttagctattaatgagttaatggcgcagaacttgttgatatttgaagtgttctctccccttttcccatgacgtaaatacataggtgtgttccaggatttgttcaggtttttcccccctcctaatcttgtacataacttgtattatgtgtaagttaaacattttattttgaacttggaatgttcccagtgatttcattcagcagggtattttctgccttgttggcaagtgacaaaaaatatgggaagtatttgctaccagttggtagatggtgcccttaatggtagaatgaggaaaatgtccgcaaaagcatgttttattatctttacttttttggggggttggagggggtagcctagccagaacatcattgtaatcttaaaacataagatgcttttattagatgatcaactaaaatagctggaagacagtactttagaaacagatagttgtaagattataaaatgcaaatgtaacttatgttttcatttttttctctgccttttttgtttgtttgttttctcttttccagtactgagcatctccacaaatgtctcctaactcagaaaatgtttcttttcttttcagttgagatttggttgcattcagggttgtaggttggccttgcttgctaaccccgccggttttaccgtgctttcattcctgaactttgtttatgcctttgtttggtttcttcgaaattgcagcagactcattgggctacatttagtacaggaaccacgtgtgtaatgttatacaacacagtctagtaatacaatcatccctcttagagtaaaaactacctctagattgtggtaagcttttactgtcccataaaacaggagccacagtaccttatgaatgcaaaactgtaacttcctacagtgtttccctacagaacattgtctttctggtgtcctgggctgttttgaaaaagtttccattaatagactttttagaaattattattagtagcattttttttccagctttgctgtcttcatcactcactctatgctcagactatgccactgtaaatattcttcctaacatctttaaatcgccttttcctcagttttcaaggggaaggtcatttgtaaagcacgttaggtggttaaatcagttattgcggttttctcttactgcaagcctttttaatcacccccaggctgcattttattctatatcgccttttttcttcaaatctgctccaatcactcacttctctcttataagctaatcctgcctcacaccttaaatctgtttcagtgatcaagggcagaactcattgtggccttatctttctttgttgtaattgttcactgtctctttcttacagaccacttatttctgagtagtagttattcctctctatggagtcatggcaggaatcattacacagtgcttttgttcagagcatggacatgttcctagtgctgctttgctttaacggccacaagtttcctccacttcctaggtttggtatttagttaaggaatcatattaaattaaccaataacaaaagagatacttttgaagaacaaactattccttacccatttttgtagctcaaaaataatttttcaagttcatgaccttattaaaatgaacttgtgtttttttaacaaacgtgtatgttttattttgatagtttctttccgtaagataattgaaatattatactgtaaacccttttcttttctttttttgaaaagtccaagaatgtacttatacaggcatttttccccacctatttttggccattctcataccacagactaaagagtgaaatgatttgtccattgtagcttattgtttatcagtagttcttttgtcagctgcttacattttttctttcatggttttgtgaatcattttcagtatgtaatttataggaaccttgtcctctggttatagtagactgtgtgccctcctccagtgatggcattattagacatgctggtcatttaccctcagaaagactctcttattagaatggtgagtgcttcagttatagtatgtttgaatttttaaaaaattctgttttagaaatgtatcttatgctctcatgactatgcagtttctaaacatacacatagaagctgagtctctgatccaatatgtttttatttgttccatttaatttatcacatagattgggaaggcaagctaaaagccttaaaaatgccctttatattttgagtgatttcagcgttgaacactagtatactatctaaatttgctgctcactttctttaaactgtggcaattaaaggcatgtttatacatgacttaatcgtgaaatgtttgtcactcttactgcacagacttatctgcaatcataactggttagtttttttgttttgtttgttttattgtttttaatgaaactggtaccatctgtgctttcacaaaaaacttccaatgccatttttgagaactaacctaactagtcatgctaaccagaaaatccactggggaggaggttccttttgaaacaaaatgctgttcagttagtaaccaagttactttgattgcaaaagcagctgtgtttctgataagtactgaacaaatgtgtgtaattttctgtgccagacttatgactttgttttcaagcactgtaatgtgggatggatggttagaaacaataatatattagggtttctgtttaaccctttcaggactgaactgtatctccttttgttaattttcccctgtgttgtgataaatgtttgccagcattcagtactgtgttggtccagatgtaggtttatatgctcatttttagcttatttcttgtaccttgcagcatgctctacgcattcagtccttaaggggtttattttacaaactgtgcgcctgtaaggtttattagcaataagatagaaaattgagcaagtttataccataattttgtagaaaaaaagaatctgctcagttccatatttcatccgtgaaaaacttgcaatacgagcagtttcaaggaataaataaaaaggaaatgtaaaccatt

SEQ ID NO: 438072 - DNA, 6056 bp, Homo sapiens
tgcctgggggccccgtgcatctttgttcctcgcggccgttgtcgccgcttcgccccgctagtgcccccggccccgggcgctttgtctttcaccgctaccccctgcgactctctacccccggccctttgtttcgccgccttgggcgctttgtccgacccgtggcgtcccgcatcccctctccatctcctcccctccgctgtccttcctcccgtgcccctttgttgtgccacactcttgtcgttagcccagtgacctgccacagcccgggcaccagatttctgccttaattgttcttccattgtctttctcctgtgggtcccctctcacctttctgtatggtcctggatcaccccccgaggctttgtctcccccatccacgggcttattctctcggcacccccttcctctcccgtcatcggttgatttatccacaacccacggtgtacgtctgctgaactgtctcagccccggggactccatctgctgcttctaagtgcacacaagactctacgtcattgaaattatgagactatcattcaaatggaagcattatagttcttcggaaccattatgatctcaaaacgaaaggagaatgatacagatacactggctgaggtgttttgaggtgcatcgaagtgttccaagctgtgacttaccttaacatgttcttgaagtaccatggcgtggattaaaagcacaggaaatctggtgaagcggctccacctaaaacgaacttactagggaagctatgcgaaattatttaaaagagcgaggggatcaaacagtacttattcttcatgcaaaagttgcacagaagtcatatggaaatgaaaaaaggtttttttgcccacctccttgtgtatatcttatgggcagcggatggaagaaaaaaaaagaacaaatggaacgcgatggttgttctgaacaagagtctcaaccgtgtgcatttattgggataggaaatagtgaccaagaaatgcagcagctaaacttggaaggaaagaactattgcacagccaaaacattgtatatatctgactcagacaagcgaaagcacttcatgttgtctgtaaagatgttctatggcaacagtgatgacattggtgtgttcctcagcaagcggataaaagtcatctccaaaccttccaaaaagaagcagtcattgaaaaatgctgacttatgcattgcctcaggaacaaaggtggctctgtttaatcgactacgatcccagacagttagtaccagatacttgcatgtagaaggaggtaattttcatgccagttcacagcagtggggagccttttttattcatctcttggatgatgatgaatcagaaggagaagaattcacagtccgagatggctacatccattatggacaaacagtcaaacttgtgtgctcagttactggcatggcactcccaagattgataattaggaaagttgataagcagaccgcattattggatgcagatgatcctgtgtcacaactccataaatgtgcattttaccttaaggatacagaaagaatgtatttgtgcctttctcaagaaagaataattcaatttcaggccactccatgtccaaaagaaccaaataaagagatgataaatgatggcgcttcctggacaatcattagcacagataaggcagagtatacattttatgagggaatgggccctgtccttgccccagtcactcctgtgcctgtggtagagagccttcagttgaatggcggtggggacgtagcaatgcttgaacttacaggacagaatttcactccaaatttacgagtgtggtttggggatgtagaagctgaaactatgtacaggtgtggagagagtatgctctgtgtcgtcccagacatttctgcattccgagaaggttggagatgggtccggcaaccagtccaggttccagtaactttggtccgaaatgatggaatcatttattccaccagccttacctttacctacacaccagaaccagggccgcggccacattgcagtgcagcaggagcaatccttcgagccaattcaagccaggtgccccctaacgaatcaaacacaaacagcgagggaagttacacaaacgccagcacaaattcaaccagtgtcacatcatctacagccacagtggtatcctaactaccgtctttttgctaggacttaaactgacttgagtgtggcaaaaagttaacaaaaaaggagaaaaaatgaacaatcgtttgtggtttcttgggaaaacttttcataccaggtgatactattcaaaaaccccgttgtctccctgcaagtgctgatttgaaatgcagaagccacagtaaaaaaaaaaaaaaaaaaaaaaaaaaaagaaaaaaaaatcaaaatgtataaatattggaaatcaagtttttcagctgttttgttggttggttggttggtttttgtttggttttgtttaaatgggcaagaagtaaataatgtggctggaatacaagttgaacaaactagaagacacaaatctaacatagtttttatggaccaaggaacttgtatattgtataagctttagtaaaaggtacattttcaccatacctttttttatatcacggtattatagtacaccttgttaccaaataggttgttctcttccccacccacctttgagcttttgctctaaaatacattcaggttccaagcctgaccatccttgtttaatctatcatactcttccaggttttttttttttggtctaaggctggaacttttttcttttttttcagctgaagtcttatgacttttcatgagtcaaaattgtttggatttcagcaagtcaaatcttgcaaaggcctgcatattttttttaagattatatgaagtctgtgcaaaagctttaaaaaaatgcctctgccttgcctgcaatacatgcaatgtatgttaacttagtctctcttctcagacactgttggtagttatttctgtgttttcctttttttaaaaaaaaatatggacttattgtggttatctgagaggttctaacattcacatgcaatttggtgtggccatttagctattaatgagttaatggcgcagaacttgttgatatttgaagtgttctctccccttttcccatgacgtaaatacataggtgtgttccaggatttgttcaggtttttcccccctcctaatcttgtacataacttgtattatgtgtaagttaaacattttattttgaacttggaatgttcccagtgatttcattcagcagggtattttctgccttgttggcaagtgacaaaaaatatgggaagtatttgctaccagttggtagatggtgcccttaatggtagaatgaggaaaatgtccgcaaaagcatgttttattatctttacttttttggggggttggagggggtagcctagccagaacatcattgtaatcttaaaacataagatgcttttattagatgatcaactaaaatagctggaagacagtactttagaaacagatagttgtaagattataaaatgcaaatgtaacttatgttttcatttttttctctgccttttttgtttgtttgttttctcttttccagtactgagcatctccacaaatgtctcctaactcagaaaatgtttcttttcttttcagttgagatttggttgcattcagggttgtaggttggccttgcttgctaaccccgccggttttaccgtgctttcattcctgaactttgtttatgcctttgtttggtttcttcgaaattgcagcagactcattgggctacatttagtacaggaaccacgtgtgtaatgttatacaacacagtctagtaatacaatcatccctcttagagtaaaaactacctctagattgtggtaagcttttactgtcccataaaacaggagccacagtaccttatgaatgcaaaactgtaacttcctacagtgtttccctacagaacattgtctttctggtgtcctgggctgttttgaaaaagtttccattaatagactttttagaaattattattagtagcattttttttccagctttgctgtcttcatcactcactctatgctcagactatgccactgtaaatattcttcctaacatctttaaatcgccttttcctcagttttcaaggggaaggtcatttgtaaagcacgttaggtggttaaatcagttattgcggttttctcttactgcaagcctttttaatcacccccaggctgcattttattctatatcgccttttttcttcaaatctgctccaatcactcacttctctcttataagctaatcctgcctcacaccttaaatctgtttcagtgatcaagggcagaactcattgtggccttatctttctttgttgtaattgttcactgtctctttcttacagaccacttatttctgagtagtagttattcctctctatggagtcatggcaggaatcattacacagtgcttttgttcagagcatggacatgttcctagtgctgctttgctttaacggccacaagtttcctccacttcctaggtttggtatttagttaaggaatcatattaaattaaccaataacaaaagagatacttttgaagaacaaactattccttacccatttttgtagctcaaaaataatttttcaagttcatgaccttattaaaatgaacttgtgtttttttaacaaacgtgtatgttttattttgatagtttctttccgtaagataattgaaatattatactgtaaacccttttcttttctttttttgaaaagtccaagaatgtacttatacaggcatttttccccacctatttttggccattctcataccacagactaaagagtgaaatgatttgtccattgtagcttattgtttatcagtagttcttttgtcagctgcttacattttttctttcatggttttgtgaatcattttcagtatgtaatttataggaaccttgtcctctggttatagtagactgtgtgccctcctccagtgatggcattattagacatgctggtcatttaccctcagaaagactctcttattagaatggtgagtgcttcagttatagtatgtttgaatttttaaaaaattctgttttagaaatgtatcttatgctctcatgactatgcagtttctaaacatacacatagaagctgagtctctgatccaatatgtttttatttgttccatttaatttatcacatagattgggaaggcaagctaaaagccttaaaaatgccctttatattttgagtgatttcagcgttgaacactagtatactatctaaatttgctgctcactttctttaaactgtggcaattaaaggcatgtttatacatgacttaatcgtgaaatgtttgtcactcttactgcacagacttatctgcaatcataactggttagtttttttgttttgtttgttttattgtttttaatgaaactggtaccatctgtgctttcacaaaaaacttccaatgccatttttgagaactaacctaactagtcatgctaaccagaaaatccactggggaggaggttccttttgaaacaaaatgctgttcagttagtaaccaagttactttgattgcaaaagcagctgtgtttctgataagtactgaacaaatgtgtgtaattttctgtgccagacttatgactttgttttcaagcactgtaatgtgggatggatggttagaaacaataatatattagggtttctgtttaaccctttcaggactgaactgtatctccttttgttaattttcccctgtgttgtgataaatgtttgccagcattcagtactgtgttggtccagatgtaggtttatatgctcatttttagcttatttcttgtaccttgcagcatgctctacgcattcagtccttaaggggtttattttacaaactgtgcgcctgtaaggtttattagcaataagatagaaaattgagcaagtttataccataattttgtagaaaaaaagaatctgctcagttccatatttcatccgtgaaaaacttgcaatacgagcagtttcaaggaataaataaaaaggaaatgtaaaccatt

SEQ ID NO: 438073 - DNA, 5731 bp, Homo sapiens
tgtaaaaaaagcaggcggtaccggaccggaaaacccggtaggtttccagggaaggcagcgagcaggatcccctactctgcgggcggcgcgaggcgtctggctcttcgcggcggcggcgaggggaaagggagcgcgggggctgggtggaatcgaggagtgaggaaaaagggaaggggcgggggagagggaccagggaaggcgtcggggggaatctcgcgagggttggagttttggcgagagtttgtggaagatggcgcctgttgtgacagggaaatttggtgagcggcctccacctaaacgacttactagggaagctatgcgaaattatttaaaagagcgaggggatcaaacagtacttattcttcatgcaaaagttgcacagaagtcatatggaaatgaaaaaaggattaagaaaagtaagccattttctgtactaataacagtacaagaagtgagaatgacaatggaggctgtgtgtttcaagaaagaagagaaggaaactacttctttgggtttttttgcccacctccttgtgtatatcttatgggcagcggatggaagaaaaaaaaagaacaaatggaacgcgatggttgttctgaacaagagtctcaaccgtgtgcatttattgggataggaaatagtgaccaagaaatgcagcagctaaacttggaaggaaagaactattgcacagccaaaacattgtatatatctgactcagacaagcgaaagcacttcatgttgtctgtaaagatgttctatggcaacagtgatgacattggtgtgttcctcagcaagcggataaaagtcatctccaaaccttccaaaaagaagcagtcattgaaaaatgctgacttatgcattgcctcaggaacaaaggtggctctgtttaatcgactacgatcccagacagttagtaccagatacttgcatgtagaaggaggtaattttcatgccagttcacagcagtggggagccttttttattcatctcttggatgatgatgaatcagaaggagaagaattcacagtccgagatggctacatccattatggacaaacagtcaaacttgtgtgctcagttactggcatggcactcccaagattgataattaggaaagttgataagcagaccgcattattggatgcagatgatcctgtgtcacaactccataaatgtgcattttaccttaaggatacagaaagaatgtatttgtgcctttctcaagaaagaataattcaatttcaggccactccatgtccaaaagaaccaaataaagagatgataaatgatggcgcttcctggacaatcattagcacagataaggcagagtatacattttatgagggaatgggccctgtccttgccccagtcactcctgtgcctgtggtagagagccttcagttgaatggcggtggggacgtagcaatgcttgaacttacaggacagaatttcactccaaatttacgagtgtggtttggggatgtagaagctgaaactatgtacaggtgtggagagagtatgctctgtgtcgtcccagacatttctgcattccgagaaggttggagatgggtccggcaaccagtccaggttccagtaactttggtccgaaatgatggaatcatttattccaccagccttacctttacctacacaccagaaccagggccgcggccacattgcagtgcagcaggagcaatccttcgagccaattcaagccaggtgccccctaacgaatcaaacacaaacagcgagggaagttacacaaacgccagcacaaattcaaccagtgtcacatcatctacagccacagtggtatcctaactaccgtctttttgctaggacttaaactgacttgagtgtggcaaaaagttaacaaaaaaggagaaaaaatgaacaatcgtttgtggtttcttgggaaaacttttcataccaggtgatactattcaaaaaccccgttgtctccctgcaagtgctgatttgaaatgcagaagccacagtaaaaaaaaaaaaaaaaaaaaaaaaaaaagaaaaaaaaatcaaaatgtataaatattggaaatcaagtttttcagctgttttgttggttggttggttggtttttgtttggttttgtttaaatgggcaagaagtaaataatgtggctggaatacaagttgaacaaactagaagacacaaatctaacatagtttttatggaccaaggaacttgtatattgtataagctttagtaaaaggtacattttcaccatacctttttttatatcacggtattatagtacaccttgttaccaaataggttgttctcttccccacccacctttgagcttttgctctaaaatacattcaggttccaagcctgaccatccttgtttaatctatcatactcttccaggttttttttttttggtctaaggctggaacttttttcttttttttcagctgaagtcttatgacttttcatgagtcaaaattgtttggatttcagcaagtcaaatcttgcaaaggcctgcatattttttttaagattatatgaagtctgtgcaaaagctttaaaaaaatgcctctgccttgcctgcaatacatgcaatgtatgttaacttagtctctcttctcagacactgttggtagttatttctgtgttttcctttttttaaaaaaaaatatggacttattgtggttatctgagaggttctaacattcacatgcaatttggtgtggccatttagctattaatgagttaatggcgcagaacttgttgatatttgaagtgttctctccccttttcccatgacgtaaatacataggtgtgttccaggatttgttcaggtttttcccccctcctaatcttgtacataacttgtattatgtgtaagttaaacattttattttgaacttggaatgttcccagtgatttcattcagcagggtattttctgccttgttggcaagtgacaaaaaatatgggaagtatttgctaccagttggtagatggtgcccttaatggtagaatgaggaaaatgtccgcaaaagcatgttttattatctttacttttttggggggttggagggggtagcctagccagaacatcattgtaatcttaaaacataagatgcttttattagatgatcaactaaaatagctggaagacagtactttagaaacagatagttgtaagattataaaatgcaaatgtaacttatgttttcatttttttctctgccttttttgtttgtttgttttctcttttccagtactgagcatctccacaaatgtctcctaactcagaaaatgtttcttttcttttcagttgagatttggttgcattcagggttgtaggttggccttgcttgctaaccccgccggttttaccgtgctttcattcctgaactttgtttatgcctttgtttggtttcttcgaaattgcagcagactcattgggctacatttagtacaggaaccacgtgtgtaatgttatacaacacagtctagtaatacaatcatccctcttagagtaaaaactacctctagattgtggtaagcttttactgtcccataaaacaggagccacagtaccttatgaatgcaaaactgtaacttcctacagtgtttccctacagaacattgtctttctggtgtcctgggctgttttgaaaaagtttccattaatagactttttagaaattattattagtagcattttttttccagctttgctgtcttcatcactcactctatgctcagactatgccactgtaaatattcttcctaacatctttaaatcgccttttcctcagttttcaaggggaaggtcatttgtaaagcacgttaggtggttaaatcagttattgcggttttctcttactgcaagcctttttaatcacccccaggctgcattttattctatatcgccttttttcttcaaatctgctccaatcactcacttctctcttataagctaatcctgcctcacaccttaaatctgtttcagtgatcaagggcagaactcattgtggccttatctttctttgttgtaattgttcactgtctctttcttacagaccacttatttctgagtagtagttattcctctctatggagtcatggcaggaatcattacacagtgcttttgttcagagcatggacatgttcctagtgctgctttgctttaacggccacaagtttcctccacttcctaggtttggtatttagttaaggaatcatattaaattaaccaataacaaaagagatacttttgaagaacaaactattccttacccatttttgtagctcaaaaataatttttcaagttcatgaccttattaaaatgaacttgtgtttttttaacaaacgtgtatgttttattttgatagtttctttccgtaagataattgaaatattatactgtaaacccttttcttttctttttttgaaaagtccaagaatgtacttatacaggcatttttccccacctatttttggccattctcataccacagactaaagagtgaaatgatttgtccattgtagcttattgtttatcagtagttcttttgtcagctgcttacattttttctttcatggttttgtgaatcattttcagtatgtaatttataggaaccttgtcctctggttatagtagactgtgtgccctcctccagtgatggcattattagacatgctggtcatttaccctcagaaagactctcttattagaatggtgagtgcttcagttatagtatgtttgaatttttaaaaaattctgttttagaaatgtatcttatgctctcatgactatgcagtttctaaacatacacatagaagctgagtctctgatccaatatgtttttatttgttccatttaatttatcacatagattgggaaggcaagctaaaagccttaaaaatgccctttatattttgagtgatttcagcgttgaacactagtatactatctaaatttgctgctcactttctttaaactgtggcaattaaaggcatgtttatacatgacttaatcgtgaaatgtttgtcactcttactgcacagacttatctgcaatcataactggttagtttttttgttttgtttgttttattgtttttaatgaaactggtaccatctgtgctttcacaaaaaacttccaatgccatttttgagaactaacctaactagtcatgctaaccagaaaatccactggggaggaggttccttttgaaacaaaatgctgttcagttagtaaccaagttactttgattgcaaaagcagctgtgtttctgataagtactgaacaaatgtgtgtaattttctgtgccagacttatgactttgttttcaagcactgtaatgtgggatggatggttagaaacaataatatattagggtttctgtttaaccctttcaggactgaactgtatctccttttgttaattttcccctgtgttgtgataaatgtttgccagcattcagtactgtgttggtccagatgtaggtttatatgctcatttttagcttatttcttgtaccttgcagcatgctctacgcattcagtccttaaggggtttattttacaaactgtgcgcctgtaaggtttattagcaataagatagaaaattgagcaagtttataccataattttgtagaaaaaaagaatctgctcagttccatatttcatccgtgaaaaacttgcaatacgagcagtttcaaggaataaataaaaaggaaatgtaaaccatt

SEQ ID NO: 438074 - DNA, 5729 bp, Homo sapiens
tgtaaaaaaagcaggcggtaccggaccggaaaacccggtaggtttccagggaaggcagcgagcaggatcccctactctgcgggcggcgcgaggcgtctggctcttcgcggcggcggcgaggggaaagggagcgcgggggctgggtggaatcgaggagtgaggaaaaagggaaggggcgggggagagggaccagggaaggcgtcggggggaatctcgcgagggttggagttttggcgagagtttgtggaagatggcgcctgttgtgacaggtcattgaaattatgagactatcattcaaatggaagcattatagttcttcggaaccattatgatctcaaaacgaaaggagaatgatacagatacactggctgaggtgttttgaggtgcatcgaagtgttccaagctgtgacttaccttaacatgttcttgaagtaccatggcgtggattaaaaggaaatttggtgagcggcctccacctaaacgacttactagggaagctatgcgaaattatttaaaagagcgaggggatcaaacagtacttattcttcatgcaaaagttgcacagaagtcatatggaaatgaaaaaaggtttttttgcccacctccttgtgtatatcttatgggcagcggatggaagaaaaaaaaagaacaaatggaacgcgatggttgttctgaacaagagtctcaaccgtgtgcatttattgggataggaaatagtgaccaagaaatgcagcagctaaacttggaaggaaagaactattgcacagccaaaacattgtatatatctgactcagacaagcgaaagcacttcatgttgtctgtaaagatgttctatggcaacagtgatgacattggtgtgttcctcagcaagcggataaaagtcatctccaaaccttccaaaaagaagcagtcattgaaaaatgctgacttatgcattgcctcaggaacaaaggtggctctgtttaatcgactacgatcccagacagttagtaccagatacttgcatgtagaaggaggtaattttcatgccagttcacagcagtggggagccttttttattcatctcttggatgatgatgaatcagaaggagaagaattcacagtccgagatggctacatccattatggacaaacagtcaaacttgtgtgctcagttactggcatggcactcccaagattgataattaggaaagttgataagcagaccgcattattggatgcagatgatcctgtgtcacaactccataaatgtgcattttaccttaaggatacagaaagaatgtatttgtgcctttctcaagaaagaataattcaatttcaggccactccatgtccaaaagaaccaaataaagagatgataaatgatggcgcttcctggacaatcattagcacagataagttgaatggcggtggggacgtagcaatgcttgaacttacaggacagaatttcactccaaatttacgagtgtggtttggggatgtagaagctgaaactatgtacaggtgtggagagagtatgctctgtgtcgtcccagacatttctgcattccgagaaggttggagatgggtccggcaaccagtccaggttccagtaactttggtccgaaatgatggaatcatttattccaccagccttacctttacctacacaccagaaccagggccgcggccacattgcagtgcagcaggagcaatccttcgagccaattcaagccaggtgccccctaacgaatcaaacacaaacagcgagggaagttacacaaacgccagcacaaattcaaccagtgtcacatcatctacagccacagtggtatcctaactaccgtctttttgctaggacttaaactgacttgagtgtggcaaaaagttaacaaaaaaggagaaaaaatgaacaatcgtttgtggtttcttgggaaaacttttcataccaggtgatactattcaaaaaccccgttgtctccctgcaagtgctgatttgaaatgcagaagccacagtaaaaaaaaaaaaaaaaaaaaaaaaaaaagaaaaaaaaatcaaaatgtataaatattggaaatcaagtttttcagctgttttgttggttggttggttggtttttgtttggttttgtttaaatgggcaagaagtaaataatgtggctggaatacaagttgaacaaactagaagacacaaatctaacatagtttttatggaccaaggaacttgtatattgtataagctttagtaaaaggtacattttcaccatacctttttttatatcacggtattatagtacaccttgttaccaaataggttgttctcttccccacccacctttgagcttttgctctaaaatacattcaggttccaagcctgaccatccttgtttaatctatcatactcttccaggttttttttttttggtctaaggctggaacttttttcttttttttcagctgaagtcttatgacttttcatgagtcaaaattgtttggatttcagcaagtcaaatcttgcaaaggcctgcatattttttttaagattatatgaagtctgtgcaaaagctttaaaaaaatgcctctgccttgcctgcaatacatgcaatgtatgttaacttagtctctcttctcagacactgttggtagttatttctgtgttttcctttttttaaaaaaaaatatggacttattgtggttatctgagaggttctaacattcacatgcaatttggtgtggccatttagctattaatgagttaatggcgcagaacttgttgatatttgaagtgttctctccccttttcccatgacgtaaatacataggtgtgttccaggatttgttcaggtttttcccccctcctaatcttgtacataacttgtattatgtgtaagttaaacattttattttgaacttggaatgttcccagtgatttcattcagcagggtattttctgccttgttggcaagtgacaaaaaatatgggaagtatttgctaccagttggtagatggtgcccttaatggtagaatgaggaaaatgtccgcaaaagcatgttttattatctttacttttttggggggttggagggggtagcctagccagaacatcattgtaatcttaaaacataagatgcttttattagatgatcaactaaaatagctggaagacagtactttagaaacagatagttgtaagattataaaatgcaaatgtaacttatgttttcatttttttctctgccttttttgtttgtttgttttctcttttccagtactgagcatctccacaaatgtctcctaactcagaaaatgtttcttttcttttcagttgagatttggttgcattcagggttgtaggttggccttgcttgctaaccccgccggttttaccgtgctttcattcctgaactttgtttatgcctttgtttggtttcttcgaaattgcagcagactcattgggctacatttagtacaggaaccacgtgtgtaatgttatacaacacagtctagtaatacaatcatccctcttagagtaaaaactacctctagattgtggtaagcttttactgtcccataaaacaggagccacagtaccttatgaatgcaaaactgtaacttcctacagtgtttccctacagaacattgtctttctggtgtcctgggctgttttgaaaaagtttccattaatagactttttagaaattattattagtagcattttttttccagctttgctgtcttcatcactcactctatgctcagactatgccactgtaaatattcttcctaacatctttaaatcgccttttcctcagttttcaaggggaaggtcatttgtaaagcacgttaggtggttaaatcagttattgcggttttctcttactgcaagcctttttaatcacccccaggctgcattttattctatatcgccttttttcttcaaatctgctccaatcactcacttctctcttataagctaatcctgcctcacaccttaaatctgtttcagtgatcaagggcagaactcattgtggccttatctttctttgttgtaattgttcactgtctctttcttacagaccacttatttctgagtagtagttattcctctctatggagtcatggcaggaatcattacacagtgcttttgttcagagcatggacatgttcctagtgctgctttgctttaacggccacaagtttcctccacttcctaggtttggtatttagttaaggaatcatattaaattaaccaataacaaaagagatacttttgaagaacaaactattccttacccatttttgtagctcaaaaataatttttcaagttcatgaccttattaaaatgaacttgtgtttttttaacaaacgtgtatgttttattttgatagtttctttccgtaagataattgaaatattatactgtaaacccttttcttttctttttttgaaaagtccaagaatgtacttatacaggcatttttccccacctatttttggccattctcataccacagactaaagagtgaaatgatttgtccattgtagcttattgtttatcagtagttcttttgtcagctgcttacattttttctttcatggttttgtgaatcattttcagtatgtaatttataggaaccttgtcctctggttatagtagactgtgtgccctcctccagtgatggcattattagacatgctggtcatttaccctcagaaagactctcttattagaatggtgagtgcttcagttatagtatgtttgaatttttaaaaaattctgttttagaaatgtatcttatgctctcatgactatgcagtttctaaacatacacatagaagctgagtctctgatccaatatgtttttatttgttccatttaatttatcacatagattgggaaggcaagctaaaagccttaaaaatgccctttatattttgagtgatttcagcgttgaacactagtatactatctaaatttgctgctcactttctttaaactgtggcaattaaaggcatgtttatacatgacttaatcgtgaaatgtttgtcactcttactgcacagacttatctgcaatcataactggttagtttttttgttttgtttgttttattgtttttaatgaaactggtaccatctgtgctttcacaaaaaacttccaatgccatttttgagaactaacctaactagtcatgctaaccagaaaatccactggggaggaggttccttttgaaacaaaatgctgttcagttagtaaccaagttactttgattgcaaaagcagctgtgtttctgataagtactgaacaaatgtgtgtaattttctgtgccagacttatgactttgttttcaagcactgtaatgtgggatggatggttagaaacaataatatattagggtttctgtttaaccctttcaggactgaactgtatctccttttgttaattttcccctgtgttgtgataaatgtttgccagcattcagtactgtgttggtccagatgtaggtttatatgctcatttttagcttatttcttgtaccttgcagcatgctctacgcattcagtccttaaggggtttattttacaaactgtgcgcctgtaaggtttattagcaataagatagaaaattgagcaagtttataccataattttgtagaaaaaaagaatctgctcagttccatatttcatccgtgaaaaacttgcaatacgagcagtttcaaggaataaataaaaaggaaatgtaaaccatt

SEQ ID NO: 438075 - DNA, 4778 bp, Homo sapiens
gtttctctatgatgctgcggtcgtgcttgcaatgctcgtctactgtccggactgccgagctccgggggatccgctatggttcgattgctggtgtgcaagctgggcactgtggcgtggtcatgacaccggtcgtggactgtcccaaaccctgataattaggaaagttgataagcagaccgcattattggatgcagatgatcctgtgtcacaactccataaatgtgcattttaccttaaggatacagaaagaatgtatttgtgcctttctcaagaaagaataattcaatttcaggccactccatgtccaaaagaaccaaataaagagatgataaatgatggcgcttcctggacaatcattagcacagataaggcagagtatacattttatgagggaatgggccctgtccttgccccagtcactcctgtgcctgtggtagagagccttcagttgaatggcggtggggacgtagcaatgcttgaacttacaggacagaatttcactccaaatttacgagtgtggtttggggatgtagaagctgaaactatgtacaggtgtggagagagtatgctctgtgtcgtcccagacatttctgcattccgagaaggttggagatgggtccggcaaccagtccaggttccagtaactttggtccgaaatgatggaatcatttattccaccagccttacctttacctacacaccagaaccagggccgcggccacattgcagtgcagcaggagcaatccttcgagccaattcaagccaggtgccccctaacgaatcaaacacaaacagcgagggaagttacacaaacgccagcacaaattcaaccagtgtcacatcatctacagccacagtggtatcctaactaccgtctttttgctaggacttaaactgacttgagtgtggcaaaaagttaacaaaaaaggagaaaaaatgaacaatcgtttgtggtttcttgggaaaacttttcataccaggtgatactattcaaaaaccccgttgtctccctgcaagtgctgatttgaaatgcagaagccacagtaaaaaaaaaaaaaaaaaaaaaaaaaaaagaaaaaaaaatcaaaatgtataaatattggaaatcaagtttttcagctgttttgttggttggttggttggtttttgtttggttttgtttaaatgggcaagaagtaaataatgtggctggaatacaagttgaacaaactagaagacacaaatctaacatagtttttatggaccaaggaacttgtatattgtataagctttagtaaaaggtacattttcaccatacctttttttatatcacggtattatagtacaccttgttaccaaataggttgttctcttccccacccacctttgagcttttgctctaaaatacattcaggttccaagcctgaccatccttgtttaatctatcatactcttccaggttttttttttttggtctaaggctggaacttttttcttttttttcagctgaagtcttatgacttttcatgagtcaaaattgtttggatttcagcaagtcaaatcttgcaaaggcctgcatattttttttaagattatatgaagtctgtgcaaaagctttaaaaaaatgcctctgccttgcctgcaatacatgcaatgtatgttaacttagtctctcttctcagacactgttggtagttatttctgtgttttcctttttttaaaaaaaaatatggacttattgtggttatctgagaggttctaacattcacatgcaatttggtgtggccatttagctattaatgagttaatggcgcagaacttgttgatatttgaagtgttctctccccttttcccatgacgtaaatacataggtgtgttccaggatttgttcaggtttttcccccctcctaatcttgtacataacttgtattatgtgtaagttaaacattttattttgaacttggaatgttcccagtgatttcattcagcagggtattttctgccttgttggcaagtgacaaaaaatatgggaagtatttgctaccagttggtagatggtgcccttaatggtagaatgaggaaaatgtccgcaaaagcatgttttattatctttacttttttggggggttggagggggtagcctagccagaacatcattgtaatcttaaaacataagatgcttttattagatgatcaactaaaatagctggaagacagtactttagaaacagatagttgtaagattataaaatgcaaatgtaacttatgttttcatttttttctctgccttttttgtttgtttgttttctcttttccagtactgagcatctccacaaatgtctcctaactcagaaaatgtttcttttcttttcagttgagatttggttgcattcagggttgtaggttggccttgcttgctaaccccgccggttttaccgtgctttcattcctgaactttgtttatgcctttgtttggtttcttcgaaattgcagcagactcattgggctacatttagtacaggaaccacgtgtgtaatgttatacaacacagtctagtaatacaatcatccctcttagagtaaaaactacctctagattgtggtaagcttttactgtcccataaaacaggagccacagtaccttatgaatgcaaaactgtaacttcctacagtgtttccctacagaacattgtctttctggtgtcctgggctgttttgaaaaagtttccattaatagactttttagaaattattattagtagcattttttttccagctttgctgtcttcatcactcactctatgctcagactatgccactgtaaatattcttcctaacatctttaaatcgccttttcctcagttttcaaggggaaggtcatttgtaaagcacgttaggtggttaaatcagttattgcggttttctcttactgcaagcctttttaatcacccccaggctgcattttattctatatcgccttttttcttcaaatctgctccaatcactcacttctctcttataagctaatcctgcctcacaccttaaatctgtttcagtgatcaagggcagaactcattgtggccttatctttctttgttgtaattgttcactgtctctttcttacagaccacttatttctgagtagtagttattcctctctatggagtcatggcaggaatcattacacagtgcttttgttcagagcatggacatgttcctagtgctgctttgctttaacggccacaagtttcctccacttcctaggtttggtatttagttaaggaatcatattaaattaaccaataacaaaagagatacttttgaagaacaaactattccttacccatttttgtagctcaaaaataatttttcaagttcatgaccttattaaaatgaacttgtgtttttttaacaaacgtgtatgttttattttgatagtttctttccgtaagataattgaaatattatactgtaaacccttttcttttctttttttgaaaagtccaagaatgtacttatacaggcatttttccccacctatttttggccattctcataccacagactaaagagtgaaatgatttgtccattgtagcttattgtttatcagtagttcttttgtcagctgcttacattttttctttcatggttttgtgaatcattttcagtatgtaatttataggaaccttgtcctctggttatagtagactgtgtgccctcctccagtgatggcattattagacatgctggtcatttaccctcagaaagactctcttattagaatggtgagtgcttcagttatagtatgtttgaatttttaaaaaattctgttttagaaatgtatcttatgctctcatgactatgcagtttctaaacatacacatagaagctgagtctctgatccaatatgtttttatttgttccatttaatttatcacatagattgggaaggcaagctaaaagccttaaaaatgccctttatattttgagtgatttcagcgttgaacactagtatactatctaaatttgctgctcactttctttaaactgtggcaattaaaggcatgtttatacatgacttaatcgtgaaatgtttgtcactcttactgcacagacttatctgcaatcataactggttagtttttttgttttgtttgttttattgtttttaatgaaactggtaccatctgtgctttcacaaaaaacttccaatgccatttttgagaactaacctaactagtcatgctaaccagaaaatccactggggaggaggttccttttgaaacaaaatgctgttcagttagtaaccaagttactttgattgcaaaagcagctgtgtttctgataagtactgaacaaatgtgtgtaattttctgtgccagacttatgactttgttttcaagcactgtaatgtgggatggatggttagaaacaataatatattagggtttctgtttaaccctttcaggactgaactgtatctccttttgttaattttcccctgtgttgtgataaatgtttgccagcattcagtactgtgttggtccagatgtaggtttatatgctcatttttagcttatttcttgtaccttgcagcatgctctacgcattcagtccttaaggggtttattttacaaactgtgcgcctgtaaggtttattagcaataagatagaaaattgagcaagtttataccataattttgtagaaaaaaagaatctgctcagttccatatttcatccgtgaaaaacttgcaatacgagcagtttcaaggaataaataaaaaggaaatgtaaaccatt

SEQ ID NO: 438076 - DNA, 2111 bp, Homo sapiens
gtagcgtgagactggactgcccgcattgggtacatgcgcagtgccgctcgcgcgggccgcgccaatcctgcagcgccttcaacaggtttcgggcggcgaattccagttctccgggttttggggctccctgcgggaggcagtgctggatctgggaatctctaggaaaggaaagagcaaaggaggggaaagatggggggctgcagtctccacgtacgtccctcaaagcgcgtcctaaaacccggataaccggagcgctccccatggaccacacggagggctcgcccgcggaggagccgcctgcgcatgctccatcgcctgggaaatttggtgagcggcctccacctaaacgacttactagggaagctatgcgaaattatttaaaagagcgaggggatcaaacagtacttattcttcatgcaaaagttgcacagaagtcatatggaaatgaaaaaaggtttttttgcccacctccttgtgtatatcttatgggcagcggatggaagaaaaaaaaagaacaaatggaacgcgatggttgttctgaacaagagtctcaaccgtgtgcatttattgggataggaaatagtgaccaagaaatgcagcagctaaacttggaaggaaagaactattgcacagccaaaacattgtatatatctgactcagacaagcgaaagcacttcatgttgtctgtaaagatgttctatggcaacagtgatgacattggtgtgttcctcagcaagcggataaaagtcatctccaaaccttccaaaaagaagcagtcattgaaaaatgctgacttatgcattgcctcaggaacaaaggtggctctgtttaatcgactacgatcccagacagttagtaccagatacttgcatgtagaaggaggtaattttcatgccagttcacagcagtggggagccttttttattcatctcttggatgatgatgaatcagaaggagaagaattcacagtccgagatggctacatccattatggacaaacagtcaaacttgtgtgctcagttactggcatggcactcccaagattgataattaggaaagttgataagcagaccgcattattggatgcagatgatcctgtgtcacaactccataaatgtgcattttaccttaaggatacagaaagaatgtatttgtgcctttctcaagaaagaataattcaatttcaggccactccatgtccaaaagaaccaaataaagagatgataaatgatggcgcttcctggacaatcattagcacagataaggcagagtatacattttatgagggaatgggccctgtccttgccccagtcactcctgtgcctgtggtagagagccttcagttgaatggcggtggggacgtagcaatgcttgaacttacaggacagaatttcactccaaatttacgagtgtggtttggggatgtagaagctgaaactatgtacaggtgtggagagagtatgctctgtgtcgtcccagacatttctgcattccgagaaggttggagatgggtccggcaaccagtccaggttccagtaactttggtccgaaatgatggaatcatttattccaccagccttacctttacctacacaccagaaccagggccgcggccacattgcagtgcagcaggagcaatccttcgagccaattcaagccaggtgccccctaacgaatcaaacacaaacagcgagggaagttacacaaacgccagcacaaattcaaccagtgtcacatcatctacagccacagtggtatcctaactaccgtctttttgctaggacttaaactgacttgagtgtggcaaaaagttaacaaaaaaggagaaaaaatgaacaatcgtttgtggtttcttgggaaaacttttcataccaggtgatactattcaaaaaccccgttgtctccctgcaagtgctgatttgaaatgcagaagccacagtaaaaaaaaaaaaaaaaaaaaaaaaaaaagaaaaaaaaatcaaaatgtataaatattggaaatcaagtttttccgggttttttggggggggggggggggttttttttttgttttttttaaaagggggaggaggaaaaaaagggggttggaataaaggtggacaaacttggga

SEQ ID NO: 438077 - DNA, 1916 bp, Homo sapiens
  misc_feature (1865)..(1865): n is a, c, g, or t
  misc_feature (1889)..(1889): n is a, c, g, or t
gtagcgtgagactggactgcccgcattgggtacatgcgcagtgccgctcgcgcgggccgcgccaatcctgcagcgccttcaacaggtttcgggcggcgaattccagttctccgggttttggggctccctgcgggaggcagtgctggatctgggaatctctaggaaaggaaagagcaaaggaggggaaagatggggggctgcagtctccacgtacgtccctcaaagcgcgtcctaaaacccggataaccggagcgctccccatggaccacacggagggctcgcccgcggaggagccgcctgcgcatgctccatcgcctgggaaatttggtgagcggcctccacctaaacgacttactagggaagctatgcgaaattatttaaaagagcgaggggatcaaacagtacttattcttcatgcaaaagttgcacagaagtcatatggaaatgaaaaaaggtttttttgcccacctccttgtgtatatcttatgggcagcggatggaagaaaaaaaaagaacaaatggaacgcgatggttgttctgaacaagagtctcaaccgtgtgcatttattgggataggaaatagtgaccaagaaatgcagcagctaaacttggaaggaaagaactattgcacagccaaaacattgtatatatctgactcagacaagcgaaagcacttcatgttgtctgtaaagatgttctatggcaacagtgatgacattggtgtgttcctcagcaagcggataaaagtcatctccaaaccttccaaaaagaagcagtcattgaaaaatgctgacttatgcattgcctcaggaacaaaggtggctctgtttaatcgactacgatcccagacagttagtaccagatacttgcatgtagaaggaggtaattttcatgccagttcacagcagtggggagccttttttattcatctcttggatgatgatgaatcagaaggagaagaattcacagtccgagatggctacatccattatggacaaacagtcaaacttgtgtgctcagttactggcatggcactcccaagattgataattaggaaagttgataagcagaccgcattattggatgcagatgatcctgtgtcacaactccataaatgtgcattttaccttaaggatacagaaagaatgtatttgtgcctttctcaagaaagaataattcaatttcaggccactccatgtccaaaagaaccaaataaagagatgataaatgatggcgcttcctggacaatcattagcacagataaggcagagtatacattttatgagggaatgggccctgtccttgccccagtcactcctgtgcctgtggtagagagccttcagttgaatggcggtggggacgtagcaatgcttgaacttacaggacagaatttcactccaaatttacgagtgtggtttggggatgtagaagctgaaactatgtacaggtgtggagagagtatgctctgtgtcgtcccagacatttctgcattccgagaaggttggagatgggtccggcaaccagtccaggttccagtaactttggtccgaaatgatggaatcatttattccaccagccttacctttacctacacaccagaaccagggccgcggccacattgcagtgcagcaggagcaatccttcgagccaattcaagccaggtgccccctaacgaatcaaacacaaacagcgagggaagttacacaaacgccagcacaaattcaaccagtgtcacatcatctacagccacagtggtatcctaactaccgtctttttgctaggacttaaactgacttgagtgtggcaaaaagttaacaaaaaaggaaaaaaccatagggacctgtttggttggcttcaggatagcngcttcccaagtgtgaatgaagccngatgaactgtacaggtttgacaacctt

SEQ ID NO: 438078 - DNA, 1652 bp, Homo sapiens
tgtaaaaaaagcaggcggtaccggaccggaaaacccggtaggtttccagggaaggcagcgagcaggatcccctactctgcgggcggcgcgaggcgtctggctcttcgcggcggcggcgaggggaaagggagcgcgggggctgggtggaatcgaggagtgaggaaaaagggaaggggcgggggagagggaccagggaaggcgtcggggggaatctcgcgagggttggagttttggcgagagtttgtggaagatggcgcctgttgtgacaggtcattgaaattatgagactatcattcaaatggaagcattatagttcttcggaaccattatgatctcaaaacgaaaggagaatgatacagatacactggctgaggtgttttgaggtgcatcgaagtgttccaagctgtgacttaccttaacatgttcttgaagtaccatggcgtggattaaaaggaaatttggtgagcggcctccacctaaacgacttactagggaagctatgcgaaattatttaaaagagcgaggggatcaaacagtacttattcttcatgcaaaagttgcacagaagtcatatggaaatgaaaaaaggtttttttgcccacctccttgtgtatatcttatgggcagcggatggaagaaaaaaaaagaacaaatggaacgcgatggttgttctgaacaagagtctcaaccgtgtgcatttattgggataggaaatagtgaccaagaaatgcagcagctaaacttggaaggaaagaactattgcacagccaaaacattgtatatatctgactcagacaagcgaaagcacttcatgttgtctgtaaagatgttctatggcaacagtgatgacattggtgtgttcctcagcaagcggataaaagtcatctccaaaccttccaaaaagaagcagtcattgaaaaatgctgacttatgcattgcctcaggaacaaaggtggctctgtttaatcgactacgatcccagacagttagtaccagatacttgcatgtagaaggaggtaattttcatgccagttcacagcagtggggagccttttttattcatctcttggatgatgatgaatcagaaggagaagaattcacagtccgagatggctacatccattatggacaaacagtcaaacttgtgtgctcagttactggcatggcactcccaagattggtatggctctacttttgctttagtgataatgtgaagtaaaaattaatttcttaaacaggaaaatcacaacattcaaatggaaaaacacacctcagttttatgctttttaattttaaaaggtatgttagtaatcagtgctgtttataattgacagttatgctctaccttatttcagaaatgctttaaggtaatagccagtttttacaagtacattcttaatgattttttcttaaatgatttccaatatattttggtggcaatttcctttttggctgtttatctgaagatgttcagtagagggcactataaattacatttcttttctttactaatgcggataaaccgtattcatttttttgtggtacctgccatatcccaatgtaggaccaagtttgcaaacagaagacattcttatttcttttgaaatataagcgtaatttttgttagcttactctctcacaagaagatagat

SEQ ID NO: 438079 - DNA, 1194 bp, Homo sapiens
cgcagcgcaggccgcgatatcgcagcggatcggagcaggccggaggggcaattaagaccccggccgtgtgcgtccggcctcagcagccccgccgctcggcggacacgcagaccccgccggcccgggcgcgaacactcagcgcacccccgttccactggtcccgccgcgccttccggtgcgccagcggcggtgcgccttccgctccgccccttcaggcaggaagtgtcggcgccgccactgtccggccacagcctaacgctcttcgctgtcgtttgcggtctcgcgcagggcggccccggttctggtgtttggcgtcggaattaaacaaccaccatgtcgagcaaaaaggcaaagaccaagaccaccaagaagcgccctcagcgtgcaacatccaatgtgtttgccatgtttgaccagtcacagattcaggagttcaaagaggccttcaacatgattgatcagaacagagatggcttcatcgacaaggaagatttgcatgatatgcttgcttctctagggaagaatcccactgatgcataccttgatgccatgatgaatgaggccccagggcccatcaatttcaccatgttcctgaccatgtttggtgagaagttaaatggcacagatcctgaagatgtcatcagaaacgcctttgcttgctttgatgaagaagcaacaggcaccattcaggaagattacctaagagagctgctgacaaccatgggggatcggtttacagatgaggaagtggatgagctgtacagagaagcacctattgacaaaaaggggaatttcaattacatcgagttcacacgcatcctgaaacatggagccaaagacaaagatgactgaaagaactttagctaaaatcttccagttacattgtcttactctcttttacttctcagacacttcccccaccctcatagaacctgttgcatgcaacttagtttcacagctttgcctcttctttttgatgtatttattccagacctttctgccacttagcacttgtataatcagactggaaatggggatgagggtgtaaattgtattgaaaaagatcgcgaataaaaatcaacaaatgtgaaagcccagaaaaatatattcgtatttctggttttgctggatttttacatttttatataataaaaatgttattttgaaataaagattatgctgactcaaatgcaa

SEQ ID NO: 438080 - DNA, 1152 bp, Homo sapiens
  misc_feature (1096)..(1096): n is a, c, g, or t
  misc_feature (1100)..(1100): n is a, c, g, or t
cgcagcgcaggccgcgatatcgcagcggatcggagcaggccggaggggcaattaagaccccggccgtgtgcgtccggcctcagcagccccgccgctcggcggacacgcagaccccgccggcccgggcgcgaacactcagcgcacccccgttccactggtcccgccgcgccttccggtgcgccagcggcggtgcgccttccgctccgccccttcaggcaggaagtgtcggcgccgccactgtccggccacagcctaacgctcttcgctgtcgtttgcggtctcgcgcagggcggccccggttctggtgtttggcgtcggaattaaacaaccaccatgtcgagcaaaaaggcaaagaccaagaccaccaagaagcgccctcagcgtgcaacatccaatgtgtttgccatgtttgaccagtcacagattcaggagttcaaagaggccttcaacatgattgatcagaacagagatggcttcatcgacaaggaagatttgcatgatatgcttgcttctctagggaagaatcccactgatgcataccttgatgccatgatgaatgaggccccagggcccatcaatttcaccatgttcctgaccatgtttggtgagaagttaaatggcacagatcctgaagatgtcatcagaaacgcctttgcttgctttgatgaagaagcaacaggcaccattcaggaagattacctaagagagctgctgacaaccatgggggatcggtttacagatgaggaagtggatgagctgtacagagaagcacctattgacaaaaaggggaatttcaattacatcgagttcacacgcatcctgaaacatggagccaaagacaaagatgactgaaagaactttagctaaaatcttccagttacattgtcttactctcttttacttctcagacacttcccccaccctcatagaacctgttgcatgcaacttagtttcacagctttgcctcttctttttgatgtatttattccagacctttctgccacttagcacttgtataatcagactggaaatggggatgagggtgtaaattgtattgaaaaagatcgcgaataaattacaatgtggagccaaaatntcgnttcggtcggattcctttttaaaacaggtttgaaaaatgtggccaacaaaagc

SEQ ID NO: 438081 - DNA, 988 bp, Homo sapiens
  misc_feature (872)..(872): n is a, c, g, or t
  misc_feature (967)..(967): n is a, c, g, or t
  misc_feature (988)..(988): n is a, c, g, or t
cgcagcgcaggccgcgatatcgcagcggatcggagcaggccggaggggcaattaagaccccggccgtgtgcgtccggcctcagcagccccgccgctcggcggacacgcagaccccgccggcccgggcgcgaacactcagcgcacccccgttccactggtcccgccgcgccttccggtgcgccagcggcggtgcgccttccgctccgccccttcaggcaggaagtgtcggcgccgccactgtccggccacagcctaacgctcttcgctgtcgtttgcggtctcgcgcagggcggccccggttctggtgtttggcgtcggaattaaacaaccaccatgtcgagcaaaaaggcaaagaccaagaccaccaagaagcgccctcagcgtgcaacatccaatgtgtttgccatgtttgaccagtcacagattcaggagttcaaagaggccttcaacatgattgatcagaacagagatggcttcatcgacaaggaagatttgcatgatatgcttgcttctctagggaagaatcccactgatgcataccttgatgccatgatgaatgaggccccagggcccatcaatttcaccatgttcctgaccatgtttggtgagaagttaaatggcacagatcctgaagatgtcatcagaaacgcctttgcttgctttgatgaagaagcaacaggcaccattcaggaagattacctaagagagctgctgacaaccatgggggatcggtttacagatgaggaagtggatgagctgtacagagaagcacctattgacaaaaaggggaatttcaattacatcgagttcacacgcatcctgaaacatggagccaaagacaaagaatgaacttggaaaaagaaactttttanccttaaaaatccttcccagtttacatttggtccttactcctcctttttaactttcctcaagaacaacttccccccccacccctccattaaaaaanccttgtttggccattgccaan

SEQ ID NO: 438082 - DNA, 444 bp, Homo sapiens
ccccccagccagaccgacccagcagcagcacctcaggtcagcctgggtgcccctgcccagtggccactgtgacctgcagacaccaggaggccaggcctggttgctggggacccccttggggggcccggcagtatcctaggcccaaagagctggtgccatcttgaagctgattcagggaagaggccaggctggacggtaggggtaggtgtgagaagctccccagcgtgtccaggccacgggagcagcaagggtctgcggggagcccaggctggatgggccccccagccacgggccccccaccctcatagaacctgttgcatgcaacttagtttcacagctttgcctcttctttttgatgtatttattccagacctttctgccacttagcacttgtataatcagactggaaatggggatggggctgctggctcggcgggggtaccg

SEQ ID NO: 438083 - DNA, 236 bp, Homo sapiens
ggcagaaaggtctggaataaatacatcaaaaagaagaggcaaagctgtgaaactaagttgcatgcaacaggttctatgaggagggtgtaaattgtattgaaaaagatcgcgaataaaaatcaacaaatgtgaaagcccagaaaaatatattcgtatttctggttttgctggatttttacatttttatataataaaaatgttattttgaaataaagattatgctgactcaaatgcaa

SEQ ID NO: 438084 - DNA, 1424 bp, Homo sapiens
  misc_feature (1240)..(1241): n is a, c, g, or t
  misc_feature (1243)..(1243): n is a, c, g, or t
  misc_feature (1388)..(1388): n is a, c, g, or t
cgcagcgcaggccgcgatatcgcagcggatcggagcaggccggaggggcaattaagaccccggccgtgtgcgtccggcctcagcagccccgccgctcggcggacacgcagaccccgccggcccgggcgcgaacactcagcgcacccccgttccactggtcccgccgcgccttccggtgcgccagcggcggtgcgccttccgctccgccccttcaggcaggaagtgtcggcgccgccactgtccggccacagcctaacgctcttcgctgtcgtttgcggtctcgcgcagggcggccccggttctggtgtttggcgtcggaattaaacaaccaccatgtcgagcaaaaaggcaaagaccaagaccaccaagaagcgccctcagcgtgcaacatccaatgtgtttgccatgtttgaccagtcacagattcaggagttcaaagaggccttcaacatgattgatcagaacagagatggcttcatcgacaaggaagatttgcatgatatgcttgcttctctagggaagaatcccactgatgcataccttgatgccatgatgaatgaggccccagggcccatcaatttcaccatgttcctgaccatgtttggtgagaagttaaatggcacagatcctgaagatgtcatcagaaacgcctttgcttgctttgatgaagaagcaacaggcaccattcaggaagattacctaagagagctgctgacaaccatgggggatcggtttacagatgaggaagtggatgagctgtacagagaagcacctattgacaaaaaggggaatttcaattacatcgagttcacacgcatcctgaaacatggagccaaagacaaagatgactgaaagaactttagctaaaatcttccagttacattgtcttactctcttttacttctcagacacttcccccaccctcatagaacctgttgcatgcaacttagtttcacagctttgcctcttctttttgatgtatttattccagacctttctgccacttagcacttgtataatcagactggaaatggggatgagggtgtaaattgtattgaaaaagatcgcgaataaaaatcaacaaatgtgaaagcccagaaaaatatattcgtatttctggttttgctggatttttacatttttatataataaaaatgttattttgaaataaagattatgctgactcaaatgcaaaaaaaaaaaaaaaaactcgagttttttttttttttttttttttttnntntgtccaaaactcttctttatttcaagatgatgtttctgtggctatgtgtggtatgtggtataaatctcaatctatggtcacacgaggggcattttccttgttgtaagtgtagtctaacccagtaggaaggaggtttaattgccanaacagccctcgtgccgaatttcctgcagcccggggg

SEQ ID NO: 438085 - DNA, 1337 bp, Homo sapiens
  misc_feature (375)..(375): n is a, c, g, or t
  misc_feature (427)..(427): n is a, c, g, or t
gctccgtacccccgcgcccccctcccgtcgcgcgcctgctggccggacccctgccccaggtctggccagtgcggctggcaggacctgtcagactggctgagaaggaggcgcggggccggaggtggagggaggagggttgctggcgaggccctggcccggacgtccagggccgggaggctccagtcgatggagccggtctggggagacgccctgctggagaagtggccgggtcccggccgtgcgttggccggccctgcgccacctgggtgacctcagacacctgggccttggacggcccggctgcccggcggccaacgctgccctcccggcgccgcggcgggtcctggcggtggattggggccgacccgggcgtgntcgtgtggagcacctgccctgtgcccaacactatcctagatgctttggaggntggaggagcctcctgttgcacggtcttgcctaagaattaaacaaccaccatgtcgagcaaaaaggcaaagaccaagaccaccaagaagcgccctcagcgtgcaacatccaatgtgtttgccatgtttgaccagtcacagattcaggagttcaaagaggccttcaacatgattgatcagaacagagatggcttcatcgacaaggaagatttgcatgatatgcttgcttctctagggaagaatcccactgatgcataccttgatgccatgatgaatgaggccccagggcccatcaatttcaccatgttcctgaccatgtttggtgagaagttaaatggcacagatcctgaagatgtcatcagaaacgcctttgcttgctttgatgaagaagcaacaggcaccattcaggaagattacctaagagagctgctgacaaccatgggggatcggtttacagatgaggaagtggatgagctgtacagagaagcacctattgacaaaaaggggaatttcaattacatcgagttcacacgcatcctgaaacatggagccaaagacaaagatgactgaaagaactttagctaaaatcttccagttacattgtcttactctcttttacttctcagacacttcccccaccctcatagaacctgttgcatgcaacttagtttcacagctttgcctcttctttttgatgtatttattccagacctttctgccacttagcacttgtataatcagactggaaatggggatgagggtgtaaattgtattgaaaaagatcgcgaataaaaatcaacaaatgtgaaagcccagaaaaatatattcgtatttctggttttgctggatttttacatttttatataataaaaatgttattttgaaataaagattatgctgactcaaatgcaa

SEQ ID NO: 438086 - DNA, 1140 bp, Homo sapiens
cgcagcgcaggccgcgatatcgcagcggatcggagcaggccggaggggcaattaagaccccggccgtgtgcgtccggcctcagcagccccgccgctcggcggacacgcagaccccgccggcccgggcgcgaacactcagcgcacccccgttccactggtcccgccgcgccttccggtgcgccagcggcggtgcgccttccgctccgccccttcaggcaggaagtgtcggcgccgccactgtccggccacagcctaacgctcttcgctgtcgtttgcggtctcgcgcagggcggccccggttctggtgtttggcgtcggaattaaacaaccaccatgtcgagcatgtttgccatgtttgaccagtcacagattcaggagttcaaagaggccttcaacatgattgatcagaacagagatggcttcatcgacaaggaagatttgcatgatatgcttgcttctctagggaagaatcccactgatgcataccttgatgccatgatgaatgaggccccagggcccatcaatttcaccatgttcctgaccatgtttggtgagaagttaaatggcacagatcctgaagatgtcatcagaaacgcctttgcttgctttgatgaagaagcaacaggcaccattcaggaagattacctaagagagctgctgacaaccatgggggatcggtttacagatgaggaagtggatgagctgtacagagaagcacctattgacaaaaaggggaatttcaattacatcgagttcacacgcatcctgaaacatggagccaaagacaaagatgactgaaagaactttagctaaaatcttccagttacattgtcttactctcttttacttctcagacacttcccccaccctcatagaacctgttgcatgcaacttagtttcacagctttgcctcttctttttgatgtatttattccagacctttctgccacttagcacttgtataatcagactggaaatggggatgagggtgtaaattgtattgaaaaagatcgcgaataaaaatcaacaaatgtgaaagcccagaaaaatatattcgtatttctggttttgctggatttttacatttttatataataaaaatgttattttgaaataaagattatgctgactcaaatgcaa

SEQ ID NO: 438087 - DNA, 1100 bp, Homo sapiens
cgcagcgcaggccgcgatatcgcagcggatcggagcaggccggaggggcaattaagaccccggccgtgtgcgtccggcctcagcagccccgccgctcggcggacacgcagaccccgccggcccgggcgcgaacactcagcgcacccccgttccactggtcccgccgcgccttccggtgcgccagcggcggtgcgccttccgctccgccccttcaggcaggaagtgtcggcgccgccactgtccggccacagcctaacgctcttcgctgtcgtttgcggtctcgcgcagggcggccccggttctggtgtttggcgtcggaattaaacaaccaccatgtcgagcaaaaaggcaaagaccaagaccaccaagaagcgccctcagcgtgcaacatccaatgtgtttgccatgtttgaccagtcacagattcaggagttcaaagaggccttcaacatgattgatcagaacagagatggcttcatcgacaaggaagatttgcatgatatgcttgcttctctagggaagaatcccactgatgcataccttgatgccatgatgaatgaggccccagggcccatcaatttcaccatgttcctgaccatgtttggtgagaagttaaatggcacagatcctgaagatgtcatcagaaacgcctttgcttgctttgatgaagaagcaacaggcaccattcaggaagattacctaagagagctgctgacaaccatgggggatcggtttacagatgaggaagtggatgagctgtacagagaagcacctattgacaaaaaggggaatttcaattacatcgagttcacacgcatcctgaaacatggagccaaagacaaagatgactgaaagaactttagctaaaatcttccagttacattgtcttactctcttttacttctcagacacttcccccaccctcatagaacctgttgcatgcaacttagtttcacagctttgcctcttctttttgatgtatttattccagacctttctgccacttagcacttgtataatcagactggaaatggggatctcagtggtgtgggtggtgtggactcaggtggtgtggactcaggtggtgtgggtgcgagtca

SEQ ID NO: 438088 - DNA, 1102 bp, Homo sapiens
  misc_feature (1053)..(1053): n is a, c, g, or t
cgcagcgcaggccgcgatatcgcagcggatcggagcaggccggaggggcaattaagaccccggccgtgtgcgtccggcctcagcagccccgccgctcggcggacacgcagaccccgccggcccgggcgcgaacactcagcgcacccccgttccactggtcccgccgcgccttccggtgcgccagcggcggtgcgccttccgctccgccccttcaggcaggaagtgtcggcgccgccactgtccggccacagcctaacgctcttcgctgtcgtttgcggtctcgcgcagggcggccccggttctggtgtttggcgtcggaattaaacaaccaccatgtcgagcaaaaaggcaaagaccaagaccaccaagaagcgccctcagcgtgcaacatccaatgtgtttgccatgtttgaccagtcacagattcaggagttcaaagaggccttcaacatgattgatcagaacagagatggcttcatcgacaaggaagatttgcatgatatgcttgcttctctagggaagaatcccactgatgcataccttgatgccatgatgaatgaggccccagggcccatcaatttcaccatgttcctgaccatgtttggtgagaagttaaatggcacagatcctgaagatgtcatcagaaacgcctttgcttgctttgatgaagaagcaacaggcaccattcaggaagattacctaagagagctgctgacaaccatgggggatcggtttacagatgaggaagtggatgagctgtacagagaagcacctattgacaaaaaggggaatttcaattacatcgagttcacacgcatcctgaaacatggagccaaagacaaagatgactgaaagaactttagctaaaatcttccagttacattgtcttactctcttttacttctcagacacttcccccaccctcatagaacctgttgcatgcaacttagtttcacagctttgcctcttctttttgatgtatttattccagacctttctgccacttagcacttgtataatcagactggaaatggggatagagtggtatagagnggtatagtggtggtatagggtggtatagctagtggtatggtggtatcag

SEQ ID NO: 438089 - DNA, 895 bp, Homo sapiens
ccagacctacctaatcctaaaatgcgagtttttatttttaataactgtaccaaggaataagtatgaaaacagttctctgttaccatattttgtattctggaccacttactggtgaaagcaaccatgcaaaagaaattaatttggccaggcacagtggctcatgcctgtaatcccagcactttgagaggccacagtgggtagatcatccgcaagcagggggaagaatcccactgatgcataccttgatgccatgatgaatgaggccccagggcccatcaatttcaccatgttcctgaccatgtttggtgagaagttaaatggcacagatcctgaagatgtcatcagaaacgcctttgcttgctttgatgaagaagcaacaggcaccattcaggaagattacctaagagagctgctgacaaccatgggggatcggtttacagatgaggaagtggatgagctgtacagagaagcacctattgacaaaaaggggaatttcaattacatcgagttcacacgcatcctgaaacatggagccaaagacaaagatgactgaaagaactttagctaaaatcttccagttacattgtcttactctcttttacttctcagacacttcccccaccctcatagaacctgttgcatgcaacttagtttcacagctttgcctcttctttttgatgtatttattccagacctttctgccacttagcacttgtataatcagactggaaatggggatgagggtgtaaattgtattgaaaaagatcgcgaataaaaatcaacaaatgtgaaagcccagaaaaatatattcgtatttctggttttgctggatttttacatttttatataataaaaatgttattttgaaataaagattatgctgactcaaatgcaa

SEQ ID NO: 438090 - DNA, 1004 bp, Homo sapiens
cgcagcgcaggccgcgatatcgcagcggatcggagcaggccggaggggcaattaagaccccggccgtgtgcgtccggcctcagcagccccgccgctcggcggacacgcagaccccgccggcccgggcgcgaacactcagcgcacccccgttccactggtcccgccgcgccttccggtgcgccagcggcggtgcgccttccgctccgccccttcaggcaggaagtgtcggcgccgccactgtccggccacagcctaacgctcttcgctgtcgtttgcggtctcgcgcagggcggccccggttctggtgtttggcgtcggaattaaacaaccaccatgtcgagcaaaaaggcaaagaccaagaccaccaagaagcgccctcagcgtgcaacatccaatgtgtttgccatgtttgaccagtcacagattcaggagttcaaagaggccttcaacatgattgatcagaacagagatggcttcatcgacaaggaagatttgcatgatatgcttgcttctctagggaagaatcccactgatgcataccttgatgccatgatgaatgaggccccagggcccatcaatttcaccatgttcctgaccatgtttggtgagaagttaaatggcacagatcctgaagatgtcatcagaaacgcctttgcttgctttgatgaagaagcaacaggcaccattcaggaagattacctaagagagctgctgacaaccatgggggatcggtttacagatgaggaagtggatgagctgtacagagaagcacctattgacaaaaaggggaatttcaattacatcgagttcacacgcatcctgaaacatggagccaaagacaaagatgactgaaagaactttagctaaaatcttccagttacattgtcttactctcttttacttctcagacacttcccccaccctcatagaacctgttgcatgcaacttagtttcacagctttgcctcttctttttgatgtatttgagaggtagggtaagagctc

SEQ ID NO: 438091 - DNA, 639 bp, Homo sapiens
ctaagtcctgcggagatactgtgcatgatgatgagccggccacaatcacagtctgacatgtgtgagagtaatgccagatctgagaatgttagaaaagcctttgtgcgttgatgaagaagcacaggcaccattcaggaagattacctaagagagctgctgacaaccatgggggatcggtttacagatgaggaagtggatgagctgtacagagaagcacctattgacaaaaaggggaatttcaattacatcgagttcacacgcatcctgaaacatggagccaaagacaaagatgactgaaagaactttagctaaaatcttccagttacattgtcttactctcttttacttctcagacacttcccccaccctcatagaacctgttgcatgcaacttagtttcacagctttgcctcttctttttgatgtatttattccagacctttctgccacttagcacttgtataatcagactggaaatggggatgagggtgtaaattgtattgaaaaagatcgcgaataaaaatcaacaaatgtgaaagcccagaaaaatatattcgtatttctggttttgctggatttttacatttttatataataaaaatgttattttgaaataaagattatgctgactcaaatgcaa

SEQ ID NO: 438092 - DNA, 870 bp, Homo sapiens
cgcagcgcaggccgcgatatcgcagcggatcggagcaggccggaggggcaattaagaccccggccgtgtgcgtccggcctcagcagccccgccgctcggcggacacgcagaccccgccggcccgggcgcgaacactcagcgcacccccgttccactggtcccgccgcgccttccggtgcgccagcggcggtgcgccttccgctccgccccttcaggcaggaagtgtcggcgccgccactgtccggccacagcctaacgctcttcgctgtcgtttgcggtctcgcgcagggcggccccggttctggtgtttggcgtcggaattaaacaaccaccatgtcgagcaaaaaggcaaagaccaagaccaccaagaagcgccctcagcgtgcaacatccaatgtgtttgccatgtttgaccagtcacagattcaggagttcaaagaggccttcaacatgattgatcagaacagagatggcttcatcgacaaggaagatttgcatgatatgcttgcttctctagggaagaatcccactgatgcataccttgatgccatgatgaatgaggccccagggcccatcaatttcaccatgttcctgaccatgtttggtgagaagttaaatggcacagatcctgaagatgtcatcagaaacgcctttgcttgctttgatgaagaagcaacaggcaccattcaggaagattacctaagagagctgctgacaaccatgggggatcggtttacagatgaggaagtggatgagctgtacagagaagcacctattgacaaaaaggggaatttcaattacatcgagttcacacgcatcctgaaacatggagccaaagacaaaagttcagagccagggggtaccgagctc

SEQ ID NO: 438093 - DNA, 514 bp, Homo sapiens
ggactctagaggatcccctgctgactatttgttgacaaccatgggggatcggtttacagatgaggaagtggatgagctgtacagagaagcacctattgacaaaaaggggaatttcaattacatcgagttcacacgcatcctgaaacatggagccaaagacaaagatgactgaaagaactttagctaaaatcttccagttacattgtcttactctcttttacttctcagacacttcccccaccctcatagaacctgttgcatgcaacttagtttcacagctttgcctcttctttttgatgtatttattccagacctttctgccacttagcacttgtataatcagactggaaatggggatgagggtgtaaattgtattgaaaaagatcgcgaataaaaatcaacaaatgtgaaagcccagaaaaatatattcgtatttctggttttgctggatttttacatttttatataataaaaatgttattttgaaataaagattatgctgactcaaatgcaa

SEQ ID NO: 438094 - DNA, 613 bp, Homo sapiens
ggggatcggtttacagatgaggaagtggatgagctgtacagagaagcacctattgacaaaaggggaatttcaattacatcgagttcacacgcatcctgaaacatggagccaaagacaaagatgactgaaagtgacaaccatgggggatcggtttacagatgaggaagtggatgagctgtacagagaagcacctattgacaaaaaggggaatttcaattacatcgagttcacacgcatcctgaaacatggagccaaagacaaagatgactgaaagaactttagctaaaatcttccagttacattgtcttactctcttttacttctcagacacttcccccaccctcatagaacctgttgcatgcaacttagtttcacagctttgcctcttctttttgatgtatttattccagacctttctgccacttagcacttgtataatcagactggaaatggggatgagggtgtaaattgtattgaaaaagatcgcgaataaaaatcaacaaatgtgaaagcccagaaaaatatattcgtatttctggttttgctggatttttacatttttatataataaaaatgttattttgaaataaagattatgctgactcaaatgcaa

SEQ ID NO: 438095 - DNA, 1088 bp, Homo sapiens
cgcagcgcaggccgcgatatcgcagcggatcggagcaggccggaggggcaattaagaccccggccgtgtgcgtccggcctcagcagccccgccgctcggcggacacgcagaccccgccggcccgggcgcgaacactcagcgcacccccgttccactggtcccgccgcgccttccggtgcgccagcggcggtgcgccttccgctccgccccttcaggcaggaagtgtcggcgccgccactgtccggccacagcctaacgctcttcgctgtcgtttgcggtctcgcgcagggcggccccggttctggtgtttggcgtcggaattaaacaaccaccatgtcgagcaaaaaggcaaagaccaagaccaccaagaagcgccctcagcgtgcaacatccaatgtgtttgccatgtttgaccagtcacagattcaggagttcaaagaggccttcaacatgattgatcagaacagagatggcttcatcgacaaggaagatttgcatgatatgcttgcttctctagggaagaatcccactgatgcataccttgatgccatgatgaatgaggccccagggcccatcaatttcaccatgttcctgaccatgtttggtgagaagttaaatggcacagatcctgaagatgtcatcagaaacgcctttgcttgctttgatgaagaagcaacaggcaccattcaggaagattacctaagagagctgctgacaaccatgggggatcggtttacagatgaggggagaagatggcgtcccatcagttagggtggggcaggaacaaatcacaatgttggaatgtcatcagttaaggctgtttttacttcttttgtggatcttcagttactttaggccatctggatgtatacgtgcaagtcacaggggatgcgatggcctggcctgggctcagaggcctgacattcctgccttcttatattaataagacaaataaaacaaaatagtgttgaagtgttggggcagcgaaaattttaggggggtggtatggagagataatgggcgatgtttctcagggctgcttcaagcgggattaggggcggcgtgggagcctagagtgggagagatgg

SEQ ID NO: 438096 - DNA, 705 bp, Homo sapiens
cgcagcgcaggccgcgatatcgcagcggatcggagcaggccggaggggcaattaagaccccggccgtgtgcgtccggcctcagcagccccgccgctcggcggacacgcagaccccgccggcccgggcgcgaacactcagcgcacccccgttccactggtcccgccgcgccttccggtgcgccagcggcggtgcgccttccgctccgccccttcaggcaggaagtgtcggcgccgccactgtccggccacagcctaacgctcttcgctgtcgtttgcggtctcgcgcagggcggccccggttctggtgtttggcgtcggaattaaacaaccaccatgtcgagcaaaaaggcaaagaccaagaccaccaagaagcgccctcagcgtgcaacatccaatgtgtttgccatgtttgaccagtcacagattcaggagttcaaagaggccttcaacatgattgttagtttcacagctttgcctcttctttttgatgtatttattccagacctttctgccacttagcacttgtataatcagactggaaatggggatgagggtgtaaattgtattgaaaaagatcgcgaataaaaatcaacaaatgtgaaagcccagaaaaatatattcgtatttctggttttgctggatttttacatttttatataataaaaatgttattttgaaataaagattatgctgactcaaatgcaa

SEQ ID NO: 438097 - DNA, 1570 bp, Homo sapiens
  misc_feature (1222)..(1222): n is a, c, g, or t
cgcagcgcaggccgcgatatcgcagcggatcggagcaggccggaggggcaattaagaccccggccgtgtgcgtccggcctcagcagccccgccgctcggcggacacgcagaccccgccggcccgggcgcgaacactcagcgcacccccgttccactggtcccgccgcgccttccggtgcgccagcggcggtgcgccttccgctccgccccttcaggcaggaagtgtcggcgccgccactgtccggccacagcctaacgctcttcgctgtcgtttgcggtctcgcgcagggcggccccggttctggtgtttggcgtcggaattaaacaaccaccatgtcgagcaaaaaggcaaagaccaagaccaccaagaagcgccctcagcgtgcaacatccaatgtgtttgccatgtttgaccagtcacagattcaggagttcaaagaggccttcaacatgattgatcagaacagagatggcttcatcgacaaggaagatttgcatgatatgcttgcttctctagggaagaatcccactgatgcataccttgatgccatgatgaatgaggccccagggcccatcaatttcaccatgttcctgaccatgtttggtgagaagttaaatggcacagatcctgaagatgtcatcagaaacgcctttgcttgctttgatgaagaagcaacaggcaccattcaggaagattacctaagagagctgctgacaaccatgggggatcggtttacagatgaggaagtggatgagctgtacagagaagcacctattgacaaaaaggggaatttcaattacatcgagttcacacgcatcctgaaacatggagccaaagacaaagatgactgaaagaactttagctaaaatcttccagttacattgtcttactctcttttacttctcagacacttcccccaccctcatagaacctgttgcatgcaacttagtttcacagctttgcctcttctttttgatgtatttattccagacctttctgccacttagcacttgtataatcagactggaaatggggatgagggtgtaaattgtattgaaaaagatcgcgaataaaaatcaacaaatgtgaaagcccagaaaaatatattcgtatttctggttttgctggatttttacatttttatataataaaaatgttattttgaaataaagattatgctgactcaaatgcaaaaaaaaaaaacaaaaaaaaaaaaaaaanaaaaaaaaaaaaaaaaaaaaaaaaaaaaaaaaaaaaaaaaaaaaaaaaaaaagaggaggggggcgggcgccccaaaaaacccccccgggggggcgcccataagccagagacgaaccccacccattttgataagaacaagaggggccccccaaagaggagagagggccttatctattaaaccagacacgaaacggagggcagcgcatcataaaacaaagacacacggggggggaaaaaaacgcgagtggcgggaaaaacgtggggaaagacaaaccccaacacggggggggggacgaacaagaggcgaaaaacccaccacgagaaaaaatacaccacacaagaacaaaa

SEQ ID NO: 438098 - DNA, 1146 bp, Homo sapiens
cgcagcgcaggccgcgatatcgcagcggatcggagcaggccggaggggcaattaagaccccggccgtgtgcgtccggcctcagcagccccgccgctcggcggacacgcagaccccgccggcccgggcgcgaacactcagcgcacccccgttccactggtcccgccgcgccttccggtgcgccagcggcggtgcgccttccgctccgccccttcaggcaggaagtgtcggcgccgccactgtccggccacagcctaacgctcttcgctgtcgtttgcggtctcgcgcagggcggccccggttctggtgtttggcgtcggaattaaacaaccaccatgtcgagcaaaaaggcaaagaccaagaccaccaagaagcgccctcagcgtgcaacatccaatgtgtttgccatgtttgaccagtcacagattcaggagttcaaagaggccttcaacatgattgatcagaacagagatggcttcatcgacaaggaagatttgcatgatatgcttgcttctctagggaagaatcccactgatgcataccttgatgccatgatgaatgaggccccagggcccatcaatttcaccatgttcctgaccatgtttggtgagaagttaaatggcacagatcctgaagatgtcatcagaaacgcctttgcttgctttgatgaagaagcaacaggcaccattcaggaagattacctaagagagctgctgacaaccatgggggatcggtttacagatgaggaagtggatgagctgtacagagaagcacctattgacaaaaaggggaatttcaattacatcgagttcacacgcatcctgaaacatggagccaaagacaacaaattccagccaaacgttccttgttgccactttgggtattctgagattttctcttgcatgcccttagctttacagcttttgcatttcctgttgtatttattctcagccattttgggcatatgtatctttataatcagactggaaacgggactttctattaatatcattttcagaataaaaaataggataatttaacctaccagcccttctcccccaataactgtggtctatacagagtcaatatattttttcagagaaagttattcgctcgattttttctgaatcataattaaactttatgat

SEQ ID NO: 438099 - DNA, 1326 bp, Homo sapiens
cgcagcgcaggccgcgatatcgcagcggatcggagcaggccggaggggcaattaagaccccggccgtgtgcgtccggcctcagcagccccgccgctcggcggacacgcagaccccgccggcccgggcgcgaacactcagcgcacccccgttccactggtcccgccgcgccttccggtgcgccagcggcggtgcgccttccgctccgccccttcaggcaggaagtgtcggcgccgccactgtccggccacagcctaacgctcttcgctgtcgtttgcggtctcgcgcagggcggccccggttctggtgtttggcgtcggaattaaacaaccaccatgtcgagcaaaaaggcaaagaccaagaccaccaagaagcgccctcagcgtgcaacatccaatgtgtttgccatgtttgaccagtcacagattcaggagttcaaagaggccttcaacatgattgatcagaacagagatggcttcatcgacaaggaagatttgcatgatatgcttgcttctctagggaagaatcccactgatgcataccttgatgccatgatgaatgaggccccagggcccatcaatttcaccatgttcctgaccatgtttggtgagaagttaaatggcacagatcctgaagatgtcatcagaaacgcctttgcttgctttgatgaagaagcaacaggcaccattcaggaagattacctaagagagctgctgacaaccatgggggatcggtttacagatgaggaagtggatgagctgtacagagaagcacctattgacaaaaaggggaatttcaattacatcgagttcacacgcatcctgaaacatggagccaaagacaaagatgactgaaagaactttagctaaaatcttccagttacattgtcttactctcttttacttctcagacacttcccccaccctcatagaacctgttgcatgcaacttagtttcacagctttgcctcttctttttgatgtatttattccagacctttctgccacttagcacttgtataatcagactggaaatggggatgagggtgtaaattgtattgaaaaagatcgcgaataaaaatcaacaaatgtgaaagcccagaaaaatatattcgtatttctggtttgcgatttacctttttattataaatgttttgaataagatttctgatcagaaaaaaaaagggggggctaaattcccaggggcagttagttcccttttgcaaggcgcagggcgttaaaagcggcggtaaaggggaagatgtttgggacttgggtaggaccagaaacggaaaattttgactgtggtgtattatataacgccactaac

SEQ ID NO: 438100 - DNA, 1365 bp, Homo sapiens
  misc_feature (375)..(375): n is a, c, g, or t
  misc_feature (427)..(427): n is a, c, g, or t
gctccgtacccccgcgcccccctcccgtcgcgcgcctgctggccggacccctgccccaggtctggccagtgcggctggcaggacctgtcagactggctgagaaggaggcgcggggccggaggtggagggaggagggttgctggcgaggccctggcccggacgtccagggccgggaggctccagtcgatggagccggtctggggagacgccctgctggagaagtggccgggtcccggccgtgcgttggccggccctgcgccacctgggtgacctcagacacctgggccttggacggcccggctgcccggcggccaacgctgccctcccggcgccgcggcgggtcctggcggtggattggggccgacccgggcgtgntcgtgtggagcacctgccctgtgcccaacactatcctagatgctttggaggntggaggagcctcctgttgcacggtcttgcctaaggtgaagcctccgaggaagccattagcataattaaacaaccaccatgtcgagcaaaaaggcaaagaccaagaccaccaagaagcgccctcagcgtgcaacatccaatgtgtttgccatgtttgaccagtcacagattcaggagttcaaagaggccttcaacatgattgatcagaacagagatggcttcatcgacaaggaagatttgcatgatatgcttgcttctctagggaagaatcccactgatgcataccttgatgccatgatgaatgaggccccagggcccatcaatttcaccatgttcctgaccatgtttggtgagaagttaaatggcacagatcctgaagatgtcatcagaaacgcctttgcttgctttgatgaagaagcaacaggcaccattcaggaagattacctaagagagctgctgacaaccatgggggatcggtttacagatgaggaagtggatgagctgtacagagaagcacctattgacaaaaaggggaatttcaattacatcgagttcacacgcatcctgaaacatggagccaaagacaaagatgactgaaagaactttagctaaaatcttccagttacattgtcttactctcttttacttctcagacacttcccccaccctcatagaacctgttgcatgcaacttagtttcacagctttgcctcttctttttgatgtatttattccagacctttctgccacttagcacttgtataatcagactggaaatggggatgagggtgtaaattgtattgaaaaagatcgcgaataaaaatcaacaaatgtgaaagcccagaaaaatatattcgtatttctggttttgctggatttttacatttttatataataaaaatgttattttgaaataaagattatgctgactcaaatgcaa

SEQ ID NO: 438101 - DNA, 1075 bp, Homo sapiens
cgcagcgcaggccgcgatatcgcagcggatcggagcaggccggaggggcaattaagaccccggccgtgtgcgtccggcctcagcagccccgccgctcggcggacacgcagaccccgccggcccgggcgcgaacactcagcgcacccccgttccactggtcccgccgcgccttccggtgcgccagcggcggtgcgccttccgctccgccccttcaggcaggaagtgtcggcgccgccactgtccggccacagcctaacgctcttcgctgtcgtttgcggtctcgcgcagggcggccccggttctggtgtttggcgtcggaattaaacaaccaccatgtcgagcaaaaaggcaaagaccaagaccaccaagaagcgccctcagcgtgcaacatccaatgtgtttgccatgtttgaccagtcacagattcaggagttcaaagaggccttcaacatgattgatcagaacagagatggcttcatcgacaaggaagatttgcatgatatgcttgcttctctagggaagaatcccactgatgcataccttgatgccatgatgaatgaggccccagggcccatcaatttcaccatgttcctgaccatgtttggtgagaagttaaatggcacagatcctgaagatgtcatcagaaacgcctttgcttgctttgatgaagaagcaacaggcaccattcaggaagattacctaagagagctgctgacaaccatgggggatcggtttacagatgaggaagtggatgagctgtacagagaagcacctattgacaaaaaggggaatttcaattacatcgagttcacacgcatcctgaaacatggagccaaagacaaagatgactgaaagaactttagctaaaatcttccagttacattgtcttactctcttttacttctcagacacttcccccaccctcatagaacctgttgcatgcaacttagtttcacagctttgcctcttctttttgatgtatttattccagacctttctgccacttagcacttgtataatcagactggaaatggggattttcggttttaaaacagaggttctctcgggcagtctc

SEQ ID NO: 438102 - DNA, 829 bp, Homo sapiens
cttgtggcgacaaatcctgatggggcagcatacaatgggcctgccatgtgggagcactttgcaggagttcaaagaggccttcaacatgattgatcagaacagagatggcttcatcgacaaggaagatttgcatgatatgcttgcttctctagggaagaatcccactgatgcataccttgatgccatgatgaatgaggccccagggcccatcaatttcaccatgttcctgaccatgtttggtgagaagttaaatggcacagatcctgaagatgtcatcagaaacgcctttgcttgctttgatgaagaagcaacaggcaccattcaggaagattacctaagagagctgctgacaaccatgggggatcggtttacagatgaggaagtggatgagctgtacagagaagcacctattgacaaaaaggggaatttcaattacatcgagttcacacgcatcctgaaacatggagccaaagacaaagatgactgaaagaactttagctaaaatcttccagttacattgtcttactctcttttacttctcagacacttcccccaccctcatagaacctgttgcatgcaacttagtttcacagctttgcctcttctttttgatgtatttattccagacctttctgccacttagcacttgtataatcagactggaaatggggatgagggtgtaaattgtattgaaaaagatcgcgaataaaaatcaacaaatgtgaaagcccagaaaaatatattcgtatttctggttttgctggatttttacatttttatataataaaaatgttattttgaaataaagattatgctgactcaaatgcaa

SEQ ID NO: 438103 - DNA, 1118 bp, Homo sapiens
cgcagcgcaggccgcgatatcgcagcggatcggagcaggccggaggggcaattaagaccccggccgtgtgcgtccggcctcagcagccccgccgctcggcggacacgcagaccccgccggcccgggcgcgaacactcagcgcacccccgttccactggtcccgccgcgccttccggtgcgccagcggcggtgcgccttccgctccgccccttcaggcaggaagtgtcggcgccgccactgtccggccacagcctaacgctcttcgctgtcgtttgcggtctcgcgcagggcggccccggttctggtgtttggcgtcggaattaaacaaccaccatgtcgagcaaaaaggcaaagaccaagaccaccaagaagcgccctcagcgtgcaacatccaatgtgtttgccatgtttgaccagtcacagattcaggagttcaaagaggccttcaacatgattgatcagaacagagatggcttcatcgacaaggaagatttgcatgatatgcttgcttctctagggaagaatcccactgatgcataccttgatgccatgatgaatgaggccccagggcccatcaatttcaccatgttcctgaccatgtttggtgagaagttaaatggcacagatcctgaagatgtcatcagaaacgcctttgcttgctttgatgaagaagcaacaggcaccattcaggaagattacctaagagagctgctgacaaccatgggggatcggtttacagatgaggaagtggatgagctgtacagagaagcacctattgacaaaaaggggaatttcaattacatcgagttcacacgcatcctgaaacatggagccaaagacaacaccctcatagaacctgttgcatgcaacttagtttcacagctttgcctcttctttttgatgtatttattccagacctttctgccacttagcacttgtataatcagactggaaatggggatgagggtgtaaattgtattgaaaaagatcgcgaataaaaatcaacaaatgtgaaagcccagaaaaatatattcgtatttctggttttgctggatttttacatttttatataataaaaatgttattttgaaataaagattatgctgactcaaatgcaa

SEQ ID NO: 438104 - DNA, 1131 bp, Homo sapiens
cgcagcgcaggccgcgatatcgcagcggatcggagcaggccggaggggcaattaagaccccggccgtgtgcgtccggcctcagcagccccgccgctcggcggacacgcagaccccgccggcccgggcgcgaacactcagcgcacccccgttccactggtcccgccgcgccttccggtgcgccagcggcggtgcgccttccgctccgccccttcaggcaggaagtgtcggcgccgccactgtccggccacagcctaacgctcttcgctgtcgtttgcggtctcgcgcagggcggccccggttctggtgtttggcgtcggaattaaacaaccaccatgtcgagcaaaaaggcaaagaccaagaccaccaagaagcgccctcagcgtgcaacatccaatgtgtttgccatgtttgaccagtcacagattcaggagttcaaagaggccttcaacatgattgatcagaacagagatggcttcatcgacaaggaagatttgcatgatatgcttgcttctctagggaagaatcccactgatgcataccttgatgccatgatgaatgaggccccagggcccatcaatttcaccatgttcctgaccatgtttggtgagaagttaaatggcacagatcctgaagatgtcatcagaaacgcctttgcttgctttgatgaagaagcaacaggcaccattcaggaagattacctaagagagctgctgacaaccatgggggatcggtttacagatgaggaagtggatgagctgtacagagaagcacctattgaagatgactgaaagaactttagctaaaatcttccagttacattgtcttactctcttttacttctcagacacttcccccaccctcatagaacctgttgcatgcaacttagtttcacagctttgcctcttctttttgatgtatttattccagacctttctgccacttagcacttgtataatcagactggaaatggggatgagggtgtaaattgtattgaaaaagatcgcgaataaaaatcaacaaatgtgaaagcccagaaaaatatattcgtatttctggttttgctggatttttacatttttatataataaaaatgttattttgaaataaagattatgctgactcaaatgcaa

SEQ ID NO: 438105 - DNA, 571 bp, Homo sapiens
taatggcaccatgaatttaccgcaattttacattacgaactccatcttattagggaaatttctgccctccgaggcacaagatattccggccacgaggcgtgcacgtagggggcagggtaagcaagtggatgagctgtacagagaagcacctattgacaaaaaggggaatttcaattacatcgagttcacacgcatcctgaaacatggagccaaagacaaagatgactgaaagaactttagctaaaatcttccagttacattgtcttactctcttttacttctcagacacttcccccaccctcatagaacctgttgcatgcaacttagtttcacagctttgcctcttctttttgatgtatttattccagacctttctgccacttagcacttgtataatcagactggaaatggggatgagggtgtaaattgtattgaaaaagatcgcgaataaaaatcaacaaatgtgaaagcccagaaaaatatattcgtatttctggttttgctggatttttacatttttatataataaaaatgttattttgaaataaagattatgctgactcaaatgcaa

SEQ ID NO: 438106 - DNA, 2472 bp, Homo sapiens
agaccttcccctccctatccccaactttaaaggtgtgagagtattaggaaacatgagcagcatatggcttttgatcagtttttcagtggcagcatccacgccatcgtgcagacgctggtccacttcatcaacccggaaacggtgcccaagccctgctgtgcgcccacgcagctcaatgccatctccgtcctctacttcgatgacagctccaacgtcatcctgaagaaatacagaaacatggtggtccgggcctgtggctgccactagctcctccgagaattcagaccctttggggccaagtttttctggatcctccattgctcgccttggccaggaaccagcagaccaactgccttttgtgagaccttcccctccctatccccaactttaaaggtgtgagagtattaggaaacatgagcagcatatggcttttgatcagtttttcagtggcagcatccaatgaacaagatcctacaagctgtgcaggcaaaacctagcaggaaaaaaaaacaacgcataaagaaaaatggccgggccaggtcattggctgggaagtctcagccatgcacggactcgtttccagaggtaattatgagcgcccaccagccaggccacccagccgtgggaggaagggggcgtggcaaggggtgggcacattggtgtctgtgcgaaaggaaaattgacccggaagttcctgtaataaatgtcacaataaaacgaatgaatgaaaatggttaggacgttacagatatattttcctaaacaatttatccccatttctcggtttatcctgatgcgtaaacagaagctgtgtcaagtggagggcggggaggtccctctccattccctacagttttcatcctgaggcttgcagaggcccagtgtttaccgaggtttgcccaaatccaagatctagtgggaggggaaagagcaaatgtctgctccgaggagggcggtgtgttgatctttggaggaaaaatatgttctgttgttcagctggatttgccgtggcagaaatgaaactaggtgtgtgaaatacccgcagacatttgggattggcttttcacctcgccccagtggtagtaaatccatgtgaaattgcagaggggacaaggacagcaagtaggatggaacttgcaactcaaccctgttgttaagaagcaccaatgggccgggcacagtagctcccacctgtaatcccagcactttgggaggctgaggtgggcggatcatttgaggtcaggagttcgagaccagcctggccaacatggtgaaaccccatctctactaaaaatacaaaaattagccgggcatggtggcacgcacctgtaatcccagctactctggaggctgaggcaggagaattgcttgaaccccagaggtggaggttgcagtgagccaagatcgtcccactgcactccagcttgggtgacaaaacaagactccatctcaaaagaaaaaaaaaacagcaccaatgaagcctagttctccacgggagtggggtgagcaggagcactgcacatcgccccagtggaccctctggtctttgtctgcagtggcattccaaggctgggccctggcaagggcacccgtggctgtctcttcatttgcagaccctgatcagaagtctctgcaaacaaatttgctccttgaattaagggggagatggcataataggaggtctgatgggtgcaggatgtgctggacttacattgcaaatagaagccttgttgagggtgacatcctaaccaagtgtcccgatttggaggtggcatttctgacgtggctcttggtgtaagcctgccttgccttggctggtgagtcccataaatagtatgcactcagcctccggccacaaacacaaggcctcggggagggctagactgtctgcaaacgttttctgcatctgtaaagaaaacaaggtgatcgaaaactgtggccatgtggaacccggtcttgtgggggactgtttctccatcttgactcagacagttcctggaaacaccggggctctgtttttattttctttgatgtttttcttctttagtagcttgggctgcagcctccactctctagtcactggggaggagtattttttgttatgtttggtttcatttgctggcagagctggggctttttgtgtgatccctcttggtgtgagttttctgacccaaccagcctctggttagcatcatttgtacatttaaacctgtaaatagttgttacaaagcaaagagattatttatttccatccaaagctcttttgaacaccccccccctttaatccctcgttcaggacgatgagcttgctttccttcaacctgtttgttttcttatttaagactatttattaatggttggaccaatgtactcacagctgttgcgtcgagcagtccttagtgaaaattctgtataaatagacaaaatgaaaagggtttgaccttgcaataaaaggagacgtttggttctggc

SEQ ID NO: 438107 - DNA, 3001 bp, Homo sapiens
ttatcctcattttctgaaccccaggcctgaggccaggccagctggggcctggcttccaggagctggacttgctcctgtctccattggtgcagactttggttccaggtgaagggaatcggatctcttcctgctcgacagccgtaccctctgggcctcggaggagggctggctggtgtttgacatcacagccaccagcaaccactgggtggtcaatccgcggcacaacctgggcctgcagctctcggtggagacgctggatgggcagagcatcaaccccaagttggcgggcctgattgggcggcacgggccccagaacaagcagcccttcatggtggctttcttcaaggccacggaggtccacttccgcagcatccggtccacggggagcaaacagcgcagccagaaccgctccaagacgcccaagaaccaggaagccctgcggatggccaacgtggcagagaacagcagcagcgaccagaggcaggcctgtaagaagcacgagctgtatgtcagcttccgagacctgggctggcaggactggatcatcgcgcctgaaggctacgccgcctactactgtgagggggagtgtgccttccctctgaactcctacatgaacgccaccaaccacgccatcgtgcagacgctggtccacttcatcaacccggaaacggtgcccaagccctgctgtgcgcccacgcagctcaatgccatctccgtcctctacttcgatgacagctccaacgtcatcctgaagaaatacagaaacatggtggtccgggcctgtggctgccactagctcctccgagaattcagaccctttggggccaagtttttctggatcctccattgctcgccttggccaggaaccagcagaccaactgccttttgtgagaccttcccctccctatccccaactttaaaggtgtgagagtattaggaaacatgagcagcatatggcttttgatcagtttttcagtggcagcatccaatgaacaagatcctacaagctgtgcaggcaaaacctagcaggaaaaaaaaacaacgcataaagaaaaatggccgggccaggtcattggctgggaagtctcagccatgcacggactcgtttccagaggtaattatgagcgcccaccagccaggccacccagccgtgggaggaagggggcgtggcaaggggtgggcacattggtgtctgtgcgaaaggaaaattgacccggaagttcctgtaataaatgtcacaataaaacgaatgaatgaaaatggttaggacgttacagatatattttcctaaacaatttatccccatttctcggtttatcctgatgcgtaaacagaagctgtgtcaagtggagggcggggaggtccctctccattccctacagttttcatcctgaggcttgcagaggcccagtgtttaccgaggtttgcccaaatccaagatctagtgggaggggaaagagcaaatgtctgctccgaggagggcggtgtgttgatctttggaggaaaaatatgttctgttgttcagctggatttgccgtggcagaaatgaaactaggtgtgtgaaatacccgcagacatttgggattggcttttcacctcgccccagtggtagtaaatccatgtgaaattgcagaggggacaaggacagcaagtaggatggaacttgcaactcaaccctgttgttaagaagcaccaatgggccgggcacagtagctcccacctgtaatcccagcactttgggaggctgaggtgggcggatcatttgaggtcaggagttcgagaccagcctggccaacatggtgaaaccccatctctactaaaaatacaaaaattagccgggcatggtggcacgcacctgtaatcccagctactctggaggctgaggcaggagaattgcttgaaccccagaggtggaggttgcagtgagccaagatcgtcccactgcactccagcttgggtgacaaaacaagactccatctcaaaagaaaaaaaaaacagcaccaatgaagcctagttctccacgggagtggggtgagcaggagcactgcacatcgccccagtggaccctctggtctttgtctgcagtggcattccaaggctgggccctggcaagggcacccgtggctgtctcttcatttgcagaccctgatcagaagtctctgcaaacaaatttgctccttgaattaagggggagatggcataataggaggtctgatgggtgcaggatgtgctggacttacattgcaaatagaagccttgttgagggtgacatcctaaccaagtgtcccgatttggaggtggcatttctgacgtggctcttggtgtaagcctgccttgccttggctggtgagtcccataaatagtatgcactcagcctccggccacaaacacaaggcctcggggagggctagactgtctgcaaacgttttctgcatctgtaaagaaaacaaggtgatcgaaaactgtggccatgtggaacccggtcttgtgggggactgtttctccatcttgactcagacagttcctggaaacaccggggctctgtttttattttctttgatgtttttcttctttagtagcttgggctgcagcctccactctctagtcactggggaggagtattttttgttatgtttggtttcatttgctggcagagctggggctttttgtgtgatccctcttggtgtgagttttctgacccaaccagcctctggttagcatcatttgtacatttaaacctgtaaatagttgttacaaagcaaagagattatttatttccatccaaagctcttttgaacaccccccccctttaatccctcgttcaggacgatgagcttgctttccttcaacctgtttgttttcttatttaagactatttattaatggttggaccaatgtactcacagctgttgcgtcgagcagtccttagtgaaaattctgtataaatagacaaaatgaaaagggtttgaccttgcaataaaaggagacgtttggttctggc

SEQ ID NO: 438108 - DNA, 1897 bp, Homo sapiens
agaccttcccctccctatccccaactttaaaggtgtgagagtattaggaaacatgagcagcatatggcttttgatcagtttttcgatgacagctccaacgtcatcctgaagaaatacagaaacatggtggtccgggcctgtggctgccactagctcctccgagaattcagaccctttggggccaagtttttctggatcctccattgctcgccttggccaggaaccagcagaccaactgccttttgtgagaccttcccctccctatcccttccctacagttttcatcctgaggcttgcagaggcccagtgtttaccgaggtttgcccaaatccaagatctagtgggaggggaaagagcaaatgtctgctccgaggagggcggtgtgttgatctttggaggaaaaatatgttctgttgttcagctggatttgccgtggcagaaatgaaactaggtgtgtgaaatacccgcagacatttgggattggcttttcacctcgccccagtggtagtaaatccatgtgaaattgcagaggggacaaggacagcaagtaggatggaacttgcaactcaaccctgttgttaagaagcaccaatgggccgggcacagtagctcccacctgtaatcccagcactttgggaggctgaggtgggcggatcatttgaggtcaggagttcgagaccagcctggccaacatggtgaaaccccatctctactaaaaatacaaaaattagccgggcatggtggcacgcacctgtaatcccagctactctggaggctgaggcaggagaattgcttgaaccccagaggtggaggttgcagtgagccaagatcgtcccactgcactccagcttgggtgacaaaacaagactccatctcaaaagaaaaaaaaaacagcaccaatgaagcctagttctccacgggagtggggtgagcaggagcactgcacatcgccccagtggaccctctggtctttgtctgcagtggcattccaaggctgggccctggcaagggcacccgtggctgtctcttcatttgcagaccctgatcagaagtctctgcaaacaaatttgctccttgaattaagggggagatggcataataggaggtctgatgggtgcaggatgtgctggacttacattgcaaatagaagccttgttgagggtgacatcctaaccaagtgtcccgatttggaggtggcatttctgacgtggctcttggtgtaagcctgccttgccttggctggtgagtcccataaatagtatgcactcagcctccggccacaaacacaaggcctcggggagggctagactgtctgcaaacgttttctgcatctgtaaagaaaacaaggtgatcgaaaactgtggccatgtggaacccggtcttgtgggggactgtttctccatcttgactcagacagttcctggaaacaccggggctctgtttttattttctttgatgtttttcttctttagtagcttgggctgcagcctccactctctagtcactggggaggagtattttttgttatgtttggtttcatttgctggcagagctggggctttttgtgtgatccctcttggtgtgagttttctgacccaaccagcctctggttagcatcatttgtacatttaaacctgtaaatagttgttacaaagcaaagagattatttatttccatccaaagctcttttgaacaccccccccctttaatccctcgttcaggacgatgagcttgctttccttcaacctgtttgttttcttatttaagactatttattaatggttggaccaatgtactcacagctgttgcgtcgagcagtccttagtgaaaattctgtataaatagacaaaatgaaaagggtttgaccttgcaataaaaggagacgtttggttctggc

SEQ ID NO: 438109 - DNA, 4003 bp, Homo sapiens
gcggcctcttgtgcgatccagggcgcacaaggctgggagagcgccccggggcccctgctatccgcgccggaggttggaagagggtgggttgccgccgcccgagggcgagagcgccagaggagcgggaagaaggagcgctcgcccgcccgcctgcctcctcgctgcctccccggcgttggctctctggactcctaggcttgctggctgctcctcccacccgcgcccgcctcctcactcgccttttcgttcgccggggctgctttccaagccctgcggtgcgcccgggcgagtgcggggcgaggggcccggggccagcaccgagcagggggcgggggtccgggcagagcgcggccggccggggaggggccatgtctggcgcgggcgcagcggggcccgtctgcagcaagtgaccgagcggcgcggacggccgcctgccccctctgccacctggggcggtgcgggcccggagcccggagcccgggtagcgcgtagagccggcgcgatgcacgtgcgctcactgcgagctgcggcgccgcacagcttcgtggcgctctgggcacccctgttcctgctgcgctccgccctggccgacttcagcctggacaacgaggtgcactcgagcttcatccaccggcgcctccgcagccaggagcggcgggagatgcagcgcgagatcctctccattttgggcttgccccaccgcccgcgcccgcacctccagggcaagcacaactcggcacccatgttcatgctggacctgtacaacgccatggcggtggaggagggcggcgggcccggcggccagggcttctcctacccctacaaggccgtcttcagtacccagggcccccctctggccagcctgcaagatagccatttcctcaccgacgccgacatggtcatgagcttcgtcaacctcgtggaacatgacaaggaattcttccacccacgctaccaccatcgagagttccggtttgatctttccaagatcccagaaggggaagctgtcacggcagccgaattccggatctacaaggactacatccgggaacgcttcgacaatgagacgttccggatcagcgtttatcaggtgctccaggagcacttgggcagggaatcggatctcttcctgctcgacagccgtaccctctgggcctcggaggagggctggctggtgtttgacatcacagccaccagcaaccactgggtggtcaatccgcggcacaacctgggcctgcagctctcggtggagacgctggatgggcagagcatcaaccccaagttggcgggcctgattgggcggcacgggccccagaacaagcagcccttcatggtggctttcttcaaggccacggaggtccacttccgcagcatccggtccacggggagcaaacagcgcagccagaaccgctccaagacgcccaagaaccaggaagccctgcggatggccaacgtggcagagaacagcagcagcgaccagaggcaggcctgtaagaagcacgagctgtatgtcagcttccgagacctgggctggcaggactggatcatcgcgcctgaaggctacgccgcctactactgtgagggggagtgtgccttccctctgaactcctacatgaacgccaccaaccacgccatcgtgcagacgctggtccacttcatcaacccggaaacggtgcccaagccctgctgtgcgcccacgcagctcaatgccatctccgtcctctacttcgatgacagctccaacgtcatcctgaagaaatacagaaacatggtggtccgggcctgtggctgccactagctcctccgagaattcagaccctttggggccaagtttttctggatcctccattgctcgccttggccaggaaccagcagaccaactgccttttgtgagaccttcccctccctatccccaactttaaaggtgtgagagtattaggaaacatgagcagcatatggcttttgatcagtttttcagtggcagcatccaatgaacaagatcctacaagctgtgcaggcaaaacctagcaggaaaaaaaaacaacgcataaagaaaaatggccgggccaggtcattggctgggaagtctcagccatgcacggactcgtttccagaggtaattatgagcgcccaccagccaggccacccagccgtgggaggaagggggcgtggcaaggggtgggcacattggtgtctgtgcgaaaggaaaattgacccggaagttcctgtaataaatgtcacaataaaacgaatgaatgaaaatggttaggacgttacagatatattttcctaaacaatttatccccatttctcggtttatcctgatgcgtaaacagaagctgtgtcaagtggagggcggggaggtccctctccattccctacagttttcatcctgaggcttgcagaggcccagtgtttaccgaggtttgcccaaatccaagatctagtgggaggggaaagagcaaatgtctgctccgaggagggcggtgtgttgatctttggaggaaaaatatgttctgttgttcagctggatttgccgtggcagaaatgaaactaggtgtgtgaaatacccgcagacatttgggattggcttttcacctcgccccagtggtagtaaatccatgtgaaattgcagaggggacaaggacagcaagtaggatggaacttgcaactcaaccctgttgttaagaagcaccaatgggccgggcacagtagctcccacctgtaatcccagcactttgggaggctgaggtgggcggatcatttgaggtcaggagttcgagaccagcctggccaacatggtgaaaccccatctctactaaaaatacaaaaattagccgggcatggtggcacgcacctgtaatcccagctactctggaggctgaggcaggagaattgcttgaaccccagaggtggaggttgcagtgagccaagatcgtcccactgcactccagcttgggtgacaaaacaagactccatctcaaaagaaaaaaaaaacagcaccaatgaagcctagttctccacgggagtggggtgagcaggagcactgcacatcgccccagtggaccctctggtctttgtctgcagtggcattccaaggctgggccctggcaagggcacccgtggctgtctcttcatttgcagaccctgatcagaagtctctgcaaacaaatttgctccttgaattaagggggagatggcataataggaggtctgatgggtgcaggatgtgctggacttacattgcaaatagaagccttgttgagggtgacatcctaaccaagtgtcccgatttggaggtggcatttctgacgtggctcttggtgtaagcctgccttgccttggctggtgagtcccataaatagtatgcactcagcctccggccacaaacacaaggcctcggggagggctagactgtctgcaaacgttttctgcatctgtaaagaaaacaaggtgatcgaaaactgtggccatgtggaacccggtcttgtgggggactgtttctccatcttgactcagacagttcctggaaacaccggggctctgtttttattttctttgatgtttttcttctttagtagcttgggctgcagcctccactctctagtcactggggaggagtattttttgttatgtttggtttcatttgctggcagagctggggctttttgtgtgatccctcttggtgtgagttttctgacccaaccagcctctggttagcatcatttgtacatttaaacctgtaaatagttgttacaaagcaaagagattatttatttccatccaaagctcttttgaacaccccccccctttaatccctcgttcaggacgatgagcttgctttccttcaacctgtttgttttcttatttaagactatttattaatggttggaccaatgtactcacagctgttgcgtcgagcagtccttagtgaaaattctgtataaatagacaaaatgaaaagggtttgaccttgcaataaaaggagacgtttggttctggc

SEQ ID NO: 438110 - DNA, 2110 bp, Homo sapiens
gcggcctcttgtgcgatccagggcgcacaaggctgggagagcgccccggggcccctgctatccgcgccggaggttggaagagggtgggttgccgccgcccgagggcgagagcgccagaggagcgggaagaaggagcgctcgcccgcccgcctgcctcctcgctgcctccccggcgttggctctctggactcctaggcttgctggctgctcctcccacccgcgcccgcctcctcactcgccttttcgttcgccggggctgctttccaagccctgcggtgcgcccgggcgagtgcggggcgaggggcccggggccagcaccgagcagggggcgggggtccgggcagagcgcggccggccggggaggggccatgtctggcgcgggcgcagcggggcccgtctgcagcaagtgaccgagcggcgcggacggccgcctgccccctctgccacctggggcggtgcgggcccggagcccggagcccgggtagcgcgtagagccggcgcgatgcacgtgcgctcactgcgagctgcggcgccgcacagcttcgtggcgctctgggcacccctgttcctgctgcgctccgccctggccgacttcagcctggacaacgaggtgcactcgagcttcatccaccggcgcctccgcagccaggagcggcgggagatgcagcgcgagatcctctccattttgggcttgccccaccgcccgcgcccgcacctccagggcaagcacaactcggcacccatgttcatgctggacctgtacaacgccatggcggtggaggagggcggcgggcccggcggccagggcttctcctacccctacaaggccgtcttcagtacccagggcccccctctggccagcctgcaagatagccatttcctcaccgacgccgacatggtcatgagcttcgtcaacctcgtggaacatgacaaggaattcttccacccacgctaccaccatcgagagttccggtttgatctttccaagatcccagaaggggaagctgtcacggcagccgaattccggatctacaaggactacatccgggaacgcttcgacaatgagacgttccggatcagcgtttatcaggtgctccaggagcacttgggcagggaatcggatctcttcctgctcgacagccgtaccctctgggcctcggaggagggctggctggtgtttgacatcacagccaccagcaaccactgggtggtcaatccgcggcacaacctgggcctgcagctctcggtggagacgctggatgggcagagcatcaaccccaagttggcgggcctgattgggcggcacgggccccagaacaagcagcccttcatggtggctttcttcaaggccacggaggtccacttccgcagcatccggtccacggggagcaaacagcgcagccagaaccgctccaagacgcccaagaaccaggaagccctgcggatggccaacgtggcagagaacagcagcagcgaccagaggcaggcctgtaagaagcacgagctgtatgtcagcttccgagacctgggctggcaggactggatcatcgcgcctgaaggctacgccgcctactactgtgagggggagtgtgccttccctctgaactcctacatgaacgccaccaaccacgccatcgtgcagacgctggtccacttcatcaacccggaaacggtgcccaagccctgctgtgcgcccacgcagctcaatgccatctccgtcctctacttcgatgacagctccaacgtcatcctgaagaaatacagaaacatggtggtccgggcctgtggctgccactagctcctccgagaattcagaccctttggggccaagtttttctggatcctccattgctcgccttggccaggaaccagcagaccaactgccttttgtgagaccttcccctccctatccccccctttaatccctcgttcaggacgatgagcttgctttccttcaacctgtttgttttcttatttaagactatttattaatggttggaccaatgtactcacagctgttgcgtcgagcagtccttagtgaaaattctgtataaatagacaaaatgaaaagggtttgaccttgcaataaaaggagacgtttggttctggc

SEQ ID NO: 438111 - DNA, 482 bp, Homo sapiens
tttacagggtctctagttctgtgtaaattaaatatgctgatcattgcaacacggtctctcatgagagaccgtgttgcaaatgggtacgcccaagcccatgccagtgtctagatcatactgctagcaagtgatggagcgcgacttagaaggaagcggttctcttaacctctgtgccatattgccttctgattacaagaaccttgcagatcctgttctctccagcccccgacctgccttcctagcctctcattctgttattgcatctgacaaacacagcccaatactcaatccagtctgagttgctgcgcaattccttaacgctctaggcttctgggcttcctctggttgcattcctaaacataactgacaaacttctccccatccttcaaggcccaacttaaatgtcacaccaataaaacctttccagattccccgaagcattgtcatgcctttctttttgccctcgggttttttcctaatta

SEQ ID NO: 438112 - DNA, 410 bp, Homo sapiens
ccatgaggaaaggaaccacgtcctaagcctctgtaatccccaatactagcagggtacccagcacaaagtgggtactcagtagattccttttggcggagtagaggacagtaaaaattcctggtcaggcgcagtggctcatgcctataatcccagcactttgggaggctaaggtgggaggatcacttgagcccaggacttcaagaacagcctaggcaacatagtaagacctcatctctactaaaaatttaaaaattagccaggcatggtagcatgcacatgcagtctcaactacttggggggctgaggcaagaggattgcttgagcccaggagtttgaggttgcagtgagctgtgatcacaccaccgcactccagcctgagtgttaaaacaagaccttgtcgcaaaaaaaaa

SEQ ID NO: 438113 - DNA, 277 bp, Homo sapiens
atgagctgcacgctgccctaactgactgatacccactcagtcatttaagccgtataagaaaaaaactattttcccatgttgcaaatgggtacgcccaagcccatgccagtgtctagatcatactgctagcaagtgatggagcgcgacttagaaggaagcggttctcttaacctctgtgccatattgccttctgattacaagaacgttgcagtgagctgtgatcacaccaccgcactccagcctgagtgttaaaacaagaccttgtcgcaaaaaaaaa

SEQ ID NO: 438114 - DNA, 583 bp, Homo sapiens
agtgtaaaatatattgatggctgtaaagggacaacttggggatattttaggtctgctgagatgatgcacagcatacatacatgctctagtttttggaacaatgtcattaagttttcaaatacatctgttttgaacatggtattttgtttttctcattagcacgaattactactctacagtttcttctagagtaaataaatataatggctgtttgcagagcgactacagacttacttagatgtttaacaaggtgaacgatttcacaattagatcaaccattgagttaacagcaaggtgtttttcatctgttttgtttactgctatagtggggacaggtaacttctccaatttattctttgttgacatctttagttaccaacagactcccaaaagtaatgaaaagtcgattaaaaagaaaattgtaattatgccatgggttttcccaagatccttaaagtcagctcatttaaatttacaagagaaaaataacaggcatcatggaaaactaagtaacaaaaagctattgaaaaatacatctgtggaacacagtggtcagttgtaaacagctcagaagagcaaaaaa

SEQ ID NO: 438115 - DNA, 537 bp, Homo sapiens
ttcgtgtagaagaaagggaccgaaaaaaaaaataatattattttttgagacaatgtcgaaaaatatccaaaaaaactatatttttgacaaagagtaatgtatttatcaataaggcacaataacaactaaccagtttcttctagagtaaataaatataatggctgtttgcagagcgactacagacttacttagatgtttaacaaggtgaacgatttcacaattagatcaaccattgagttaacagcaaggtgtttttcatctgttttgtttactgctatagtggggacaggtaacttctccaatttattctttgttgacatctttagttaccaacagactcccaaaagtaatgaaaagtcgattaaaaagaaaattgtaattatgccatgggttttcccaagatccttaaagtcagctcatttaaatttacaagagaaaaataacaggcatcatggaaaactaagtaacaaaaagctattgaaaaatacatctgtggaacacagtggtcagttgtaaacagctcagaagagcaaaaaa

SEQ ID NO: 438116 - DNA, 270 bp, Homo sapiens
ggaggaggtcaacagcgaccacattaacaacagtgaaacccgtcattcacacggagaaaacatccgcatgtgcagtcatcgcgatctcgtaatacatcatattcttctaacatgtctaaataacccgagccacttacaattactaaatgcccctacccctccttctaactttattgctgtattctcttcactctatatttctctctatttgctaatattgcattgctgttacaataaaaattcaataaagatttagtggttaagtgcaaa

SEQ ID NO: 438117 - DNA, 6266 bp, Homo sapiens
atgaagatgttactcctgctgcattgccttggggtgtttctgtcctgttctggacacatccaggatgagcacccccaatatcacagccctccggatgtggtgattcctgtgaggataactggcaccaccagaggcatgacacctccaggctggctctcctatatcctgccctttggaggccagaaacacattatccacataaaggtcaagaagcttttgttttccaaacacctccctgtgttcacctacacagaccagggtgctatccttgaggaccagccatttgtccagaataactgctactatcatggttatgtggaaggggacccagaatccctggtttccctcagtacctgttttgggggttttcaaggaatattacagataaatgactttgcttatgaaatcaagcccctagcattttctaccacgtttgaacatctggtatacaagatggacagtgaggagaaacaattttcaaccatgagatccggatttatgcaaaatgaaataacatgccgaatggaatttgaagaaattgataattccactcagaagcaaagttcttatgtgggctggtggatccattttaggattgttgaaattgtagtcgtcattgataattatctgtacattcgttatgaaaggaacgactcaaagttgctggaggatctatatgttattgttaatatagtggattccattttggatgtcattggtgttaaggtgttattatttggtttggagatctggaccaataaaaacctcattgtagtagatgatgtaaggaaatctgtgcacctgtattgcaagtggaagtcggagaacattacgccccggatgcaacatgacacctcacatcttttcacaactctaggattaagagggttaagtggcataggagcttttagaggaatgtgtacaccacaccgtagttgtgcaattgttactttcatgaacaaaactttgggcactttttcaattgcagtggctcatcatctaggtcataatttgggcatgaaccatgatgaggatacatgtcgttgttcacaacctagatgcataatgcatgaaggcaacccaccaataactaaatttagcaattgtagttatggtgatttttgggaatatactgtagagaggacaaagtgtttgcttgaaacagtacacacaaaggacatctttaatgtgaagcgctgtgggaatggtgttgttgaagaaggagaagagtgtgactgtggacctttaaagcattgtgcaaaagatccctgctgtctgtcaaattgcactctgactgatggttctacttgtgcttttgggctttgttgcaaagactgcaagttcctaccatcagggaaagtgtgtagaaaggaggtcaatgaatgtgatcttccagagtggtgcaatggtacttcccataagtgcccagatgacttttatgtggaagatggaattccctgtaaggagaggggctactgctatgaaaagagctgtcatgaccgcaatgaacagtgtaggaggatttttggtgcaggcgcaaatactgcaagtgagacttgctacaaagaattgaacaccttaggtgaccgtgttggtcactgtggtatcaaaaatgctacatatataaagtgtaatatctcagatgtccagtgtggaagaattcagtgtgagaatgtgacagaaattcccaatatgagtgatcatactactgtgcattgggctcgcttcaatgacataatgtgctggagtactgattaccatttggggatgaagggacctgatattggtgaagtgaaagatggaacagagtgtgggatagatcatatatgcatccacaggcactgtgtccatataaccatcttgaatagtaattgctcacctgcattttgtaacaagaggggcatctgcaacaataaacatcactgccattgcaattatctgtgggaccctcccaactgcctgataaaaggctatggaggtagtgttgacagtggtccaccccctaagagaaagaagaaaaagaagttctgttatctgtgtatattgttgcttattgttttgtttattttattatgttgtctttatcgactttgtaaaaaaagtaaaccaataaaaaagcagcaagatgttcaaactccatctgcaaaagaagaggaaaaaattcagcgtcgacctcatgagttacctccccagagtcaaccttgggtgatgccttcccagagtcaacctcctgtgacgccttcccagagtcatcctcaggtgatgccttcccagagtcaacctcctcaaaatttattcctgttcagcttctcaatcagtgactgtgtgctaaattttaggctactgtatcttcaggccacctgaggcacatcctctctgaaacggctatggaaggttagggccactctggactggcacacatcctaaagcaccaaaagaccttcaacattttctgagagcaacagagtatttgccaataaatgatctctcatttttccaccttgactgccaatctaactaaaataattaataagtttactttccagccagtcctggaagtctgggttttacctgccaaaacctccatcaccatctaaattataggctgccaaatttgctgtttaacatttacagagaagctgatacaaacgcaggaaatgctgatttctttatggagggggagacgaggaggaggaggacatgacttttcttgcggtttcggtaccctctttttaaatcactggaggactgaggccttattaaggaagccaaaattatcggtgcagtgtggaaaggcttccgtgatcctctcgctgcacccttagaaacttcaccgtcttcaaactccatttccatggttctgttaattctcaaggagcagcaactcgactggttctcccaggagcaggaaaaacccttgtgacatgaaacatctcaggcctgaaaagaaagtgctctctcagatggactcttgcatgttaagactatgtcttcacatcatggtgcaaatcacatgtacccaatgactccggctttgacacaacaccttaccatcatcatgccatgatggcttccacaaagcattaaacctggtaaccagagattactggtggctccagcgttgttagatgttcatgaaatgtgaccacctctcaatcacctttgagggctaaagagtagcacatcaaaaggactccaaaatcccatacccaactcttaagagatttgtcctggtacttcagaaagaattttcatgagtgttcttaattggctggaaaagcaccagctgacgttttggaagaatctatccatgtgtctgcctccatatgcatctgggcatttcatcttcagtcccctcattagactgtagcattaggatgtgtggagagaggagaaatgatttagcacccagattcacactcctatgcctggaagggggacatctttgaagaagaggaattagggctgtggacactgtcttgaggatgtggacttccttagtgagctccacattacttgatggtaaccacttcaaaaggatcagaatccacgtaatgaaaaaggtccctctagaggatggagctgatgtgaagctgccaatggatgaaaagcctcagaaagcaactcaaaggactcaaagcaacggacaacacaagagttgtcttcagcccagtgacacctctgatgtcccctggaagctttgtgctaacctgggactgcctgacttcctttagcctggtcccttgctactaccttgaactgttttatctaacctctctttttctgtttaattctttgctactgccattgaccctgctgcaggatttgtgtcattttcctgcctggttgctgagactccattttgctgccacacacagagatgtaagaggcaggctttaattgccaaagcacagtttgagcagtagaaaacaacatggtgtatatctcaaattgcctgacatgaagaggagtctaacggtgaagtttcacttttcatcagcatcatctttcacatgttcattatcatccgctcttattcttgcatgtttaaacacttaaaatttttagtataatttttagtgtgttttgaagtggtgactaggctttcaaaaacttccattgaattacaaagcactatccagttcttattgttaaactaagtaaaaatgataagtaacatagtgtaaaatattcctttactgtgaacttcttacaatgctgtgaatgagaggctcctcagaactggagcatttgtataataattcatcctgttcatcttcaattttaacatcatatataatttcaattctatcaattgggcctttaaaaatcatataaaaggatataaaatttgaaaagagaaacctaattggctatttaatccaaaacaactttttttttccttcaatggaatcagaaagcttgtcaatcactcatgtgttttagagtaattacttttaaaatggtgcatttgtgcttctgaactattttgaagagtcacttctgtttacctcaagtatcaattcatcctccatacatttgaattcaagttgttttttgtcaaatttacagttgtcaattgatcttcaagctgcagggtgcctagaaatgggccgttgtctgtagccctggcatgtgcacacggacatttgccaccactgcaagcaaaagtctggagaagttcaccaacgacaagaacgattagggaaaatatgctgctgtgggttaacaactcagaaagtccctgatccacatttggctgtttactaaagcttgtgattaactttttggcagtgtgtactatgctctattgctatatatgctatctataaatgtagatgttaaggataagtaattctaaatttattattctatagttttgaagtttggttaagtttcctttcactcaattgatttattttgttgttaatcaaatttatgttaattggatcctttaaattttttttggcattttccaacaaaaatggctttattcataagaaaggaaaaaaatcaatggaatttgatatctaaagaagttagaaagggagcaaaataaaaaacataaaggagatagatgaattagtaagcaaatcagtagtcgagtttttcaaactggcaaaattaattaattgacttttagcccaaatttacattgttaattaaatcaagaaggaagaagatctaagagctcccattgataggcaagcctagagagaactagctaaatttatcatgctaggatattgaaacacagaaagtttacatacatttatgaagggtcaatttagtttggacagtgaggtatttgtcttagtggaaaaaaggagaattagtctgatcaaatcgtgaagtaatacagtgaacttgcaggtgcacaaaataagagggccacatctatatggtgcagtctggaattctgtttaagtttgtaggtacctcttggacttctgaattgatccagttgtcatccaccacagacatctcacatcagatacagacagttccaagattgacaacagagaacaacctgctggaaagacctgggcagaaatggagagccctgcgggaaccatgctacattttcatctaaagagagaatgcacatctgatgagactgaaagttctttgttgttttagattgtagaatggtattgaattggtctgtggaaaattgcattgcttttatttctttgtgtaatcaagtttaagtaataggggatatataatcataagcattttagggtgggagggactattaagtaattttaagtgggtggggttatttagaatgttagaataatattatgtattagatatcgctataagtggacatgcgtacttacttgtaaccctttaccctataattgctatccttaaagatttcaaataaactcggagggaactgcagggagaccaacttatttagagcgaattggacatggataaaaaccccagtgggagaaagttcaaaggtgattagattaataatttaatagaggatgagtgacctctgataaattactgctagaatgaacttgtcaatgatggatggtaaattttcatggaagttataaaagtgataaataaaaacccttgcttttacccctgtcagtagccctcctcctaccactgaaccccattgcccctacccctccttctaactttattgctgtattctcttcactctatatttctctctatttgctaatattgcattgctgttacaataaaaattcaataaagatttagtggttaagtgcaaa

SEQ ID NO: 438118 - DNA, 6212 bp, Homo sapiens
atgaagatgttactcctgctgcattgccttggggtgtttctgtcctgttctggacacatccaggatgagcacccccaatatcacagccctccggatgtggtgattcctgtgaggataactggcaccaccagaggcatgacacctccaggctggctctcctatatcctgccctttggaggccagaaacacattatccacataaaggtcaagaagcttttgttttccaaacacctccctgtgttcacctacacagaccagggtgctatccttgaggaccagccatttgtccagaataactgctactatcatggttatgtggaaggggacccagaatccctggtttccctcagtacctgttttgggggttttcaaggaatattacagataaatgactttgcttatgaaatcaagcccctagcattttctaccacgtttgaacatctggtatacaagatggacagtgaggagaaacaattttcaaccatgagatccggatttatgcaaaatgaaataacatgccgaatggaatttgaagaaattgataattccactcagaagcaaagttcttatgtgggctggtggatccattttaggattgttgaaattgtagtcgtcattgataattatctgtacattcgttatgaaaggaacgactcaaagttgctggaggatctatatgttattgttaatatagtggattccattttggatgtcattggtgttaaggtgttattatttggtttggagatctggaccaataaaaacctcattgtagtagatgatgtaaggaaatctgtgcacctgtattgcaagtggaagtcggagaacattacgccccggatgcaacatgacacctcacatcttttcacaactctaggattaagagggttaagtggcataggagcttttagaggaatgtgtacaccacaccgtagttgtgcaattgttactttcatgaacaaaactttgggcactttttcaattgcagtggctcatcatctaggtcataatttgggcatgaaccatgatgaggatacatgtcgttgttcacaacctagatgcataatgcatgaaggcaacccaccaataactaaatttagcaattgtagttatggtgatttttgggaatatactgtagagaggacaaagtgtttgcttgaaacagtacacacaaaggacatctttaatgtgaagcgctgtgggaatggtgttgttgaagaaggagaagagtgtgactgtggacctttaaagcattgtgcaaaagatccctgctgtctgtcaaattgcactctgactgatggttctacttgtgcttttgggctttgttgcaaagactgcaagttcctaccatcagggaaagtgtgtagaaaggaggtcaatgaatgtgatcttccagagtggtgcaatggtacttcccataagtgcccagatgacttttatgtggaagatggaattccctgtaaggagaggggctactgctatgaaaagagctgtcatgaccgcaatgaacagtgtaggaggatttttggtgcaggcgcaaatactgcaagtgagacttgctacaaagaattgaacaccttaggtgaccgtgttggtcactgtggtatcaaaaatgctacatatataaagtgtaatatctcagatgtccagtgtggaagaattcagtgtgagaatgtgacagaaattcccaatatgagtgatcatactactgtgcattgggctcgcttcaatgacataatgtgctggagtactgattaccatttggggatgaagggacctgatattggtgaagtgaaagatggaacagagtgtgggatagatcatatatgcatccacaggcactgtgtccatataaccatcttgaatagtaattgctcacctgcattttgtaacaagaggggcatctgcaacaataaacatcactgccattgcaattatctgtgggaccctcccaactgcctgataaaaggctatggaggtagtgttgacagtggtccaccccctaagagaaagaagaaaaagaagttctgttatctgtgtatattgttgcttattgttttgtttattttattatgttgtctttatcgactttgtaaaaaaagtaaaccaataaaaaagcagcaagatgttcaaactccatctgcaaaagaagaggaaaaaattcagcgtcgacctcatgagttacctccccagagtcaaccttgggtgatgccttcccagagtcaacctcctgtgacgccttcccagagtcatcctcaggtgatgccttcccagagtcaacctcctcaaaatttattcctgttcagcttctcaatcagtgactgtgtgctaaattttaggctactgtatcttcaggccacctgaggcacatcctctctgaaacggctatggaaggttagggccactctggactggcacacatcctaaagcaccaaaagaccttcaacattttctgagagcaacagagtatttgccaataaatgatctctcatttttccaccttgactgccaatctaactaaaataattaataagtttactttccagccagtcctggaagtctgggttttacctgccaaagagaagctgatacaaacgcaggaaatgctgatttctttatggagggggagacgaggaggaggaggacatgacttttcttgcggtttcggtaccctctttttaaatcactggaggactgaggccttattaaggaagccaaaattatcggtgcagtgtggaaaggcttccgtgatcctctcgctgcacccttagaaacttcaccgtcttcaaactccatttccatggttctgttaattctcaaggagcagcaactcgactggttctcccaggagcaggaaaaacccttgtgacatgaaacatctcaggcctgaaaagaaagtgctctctcagatggactcttgcatgttaagactatgtcttcacatcatggtgcaaatcacatgtacccaatgactccggctttgacacaacaccttaccatcatcatgccatgatggcttccacaaagcattaaacctggtaaccagagattactggtggctccagcgttgttagatgttcatgaaatgtgaccacctctcaatcacctttgagggctaaagagtagcacatcaaaaggactccaaaatcccatacccaactcttaagagatttgtcctggtacttcagaaagaattttcatgagtgttcttaattggctggaaaagcaccagctgacgttttggaagaatctatccatgtgtctgcctccatatgcatctgggcatttcatcttcagtcccctcattagactgtagcattaggatgtgtggagagaggagaaatgatttagcacccagattcacactcctatgcctggaagggggacatctttgaagaagaggaattagggctgtggacactgtcttgaggatgtggacttccttagtgagctccacattacttgatggtaaccacttcaaaaggatcagaatccacgtaatgaaaaaggtccctctagaggatggagctgatgtgaagctgccaatggatgaaaagcctcagaaagcaactcaaaggactcaaagcaacggacaacacaagagttgtcttcagcccagtgacacctctgatgtcccctggaagctttgtgctaacctgggactgcctgacttcctttagcctggtcccttgctactaccttgaactgttttatctaacctctctttttctgtttaattctttgctactgccattgaccctgctgcaggatttgtgtcattttcctgcctggttgctgagactccattttgctgccacacacagagatgtaagaggcaggctttaattgccaaagcacagtttgagcagtagaaaacaacatggtgtatatctcaaattgcctgacatgaagaggagtctaacggtgaagtttcacttttcatcagcatcatctttcacatgttcattatcatccgctcttattcttgcatgtttaaacacttaaaatttttagtataatttttagtgtgttttgaagtggtgactaggctttcaaaaacttccattgaattacaaagcactatccagttcttattgttaaactaagtaaaaatgataagtaacatagtgtaaaatattcctttactgtgaacttcttacaatgctgtgaatgagaggctcctcagaactggagcatttgtataataattcatcctgttcatcttcaattttaacatcatatataatttcaattctatcaattgggcctttaaaaatcatataaaaggatataaaatttgaaaagagaaacctaattggctatttaatccaaaacaactttttttttccttcaatggaatcagaaagcttgtcaatcactcatgtgttttagagtaattacttttaaaatggtgcatttgtgcttctgaactattttgaagagtcacttctgtttacctcaagtatcaattcatcctccatacatttgaattcaagttgttttttgtcaaatttacagttgtcaattgatcttcaagctgcagggtgcctagaaatgggccgttgtctgtagccctggcatgtgcacacggacatttgccaccactgcaagcaaaagtctggagaagttcaccaacgacaagaacgattagggaaaatatgctgctgtgggttaacaactcagaaagtccctgatccacatttggctgtttactaaagcttgtgattaactttttggcagtgtgtactatgctctattgctatatatgctatctataaatgtagatgttaaggataagtaattctaaatttattattctatagttttgaagtttggttaagtttcctttcactcaattgatttattttgttgttaatcaaatttatgttaattggatcctttaaattttttttggcattttccaacaaaaatggctttattcataagaaaggaaaaaaatcaatggaatttgatatctaaagaagttagaaagggagcaaaataaaaaacataaaggagatagatgaattagtaagcaaatcagtagtcgagtttttcaaactggcaaaattaattaattgacttttagcccaaatttacattgttaattaaatcaagaaggaagaagatctaagagctcccattgataggcaagcctagagagaactagctaaatttatcatgctaggatattgaaacacagaaagtttacatacatttatgaagggtcaatttagtttggacagtgaggtatttgtcttagtggaaaaaaggagaattagtctgatcaaatcgtgaagtaatacagtgaacttgcaggtgcacaaaataagagggccacatctatatggtgcagtctggaattctgtttaagtttgtaggtacctcttggacttctgaattgatccagttgtcatccaccacagacatctcacatcagatacagacagttccaagattgacaacagagaacaacctgctggaaagacctgggcagaaatggagagccctgcgggaaccatgctacattttcatctaaagagagaatgcacatctgatgagactgaaagttctttgttgttttagattgtagaatggtattgaattggtctgtggaaaattgcattgcttttatttctttgtgtaatcaagtttaagtaataggggatatataatcataagcattttagggtgggagggactattaagtaattttaagtgggtggggttatttagaatgttagaataatattatgtattagatatcgctataagtggacatgcgtacttacttgtaaccctttaccctataattgctatccttaaagatttcaaataaactcggagggaactgcagggagaccaacttatttagagcgaattggacatggataaaaaccccagtgggagaaagttcaaaggtgattagattaataatttaatagaggatgagtgacctctgataaattactgctagaatgaacttgtcaatgatggatggtaaattttcatggaagttataaaagtgataaataaaaacccttgcttttacccctgtcagtagccctcctcctaccactgaaccccattgcccctacccctccttctaactttattgctgtattctcttcactctatatttctctctatttgctaatattgcattgctgttacaataaaaattcaataaagatttagtggttaagtgcaaa

SEQ ID NO: 438119 - DNA, 3487 bp, Homo sapiens
aaaatagtgactattttgaagtatgctatgttaattcttactttgggagtctgaaaataaattgcatttttttccctaaaacttagaattcactcctttcagcaactcgactggttctcccaggagcaggaaaaacccttgtgacatgaaacatctcaggcctgaaaagaaagtgctctctcagatggactcttgcatgttaagactatgtcttcacatcatggtgcaaatcacatgtacccaatgactccggctttgacacaacaccttaccatcatcatgccatgatggcttccacaaagcattaaacctggtaaccagagattactggtggctccagcgttgttagatgttcatgaaatgtgaccacctctcaatcacctttgagggctaaagagtagcacatcaaaaggactccaaaatcccatacccaactcttaagagatttgtcctggtacttcagaaagaattttcatgagtgttcttaattggctggaaaagcaccagctgacgttttggaagaatctatccatgtgtctgcctccatatgcatctgggcatttcatcttcagtcccctcattagactgtagcattaggatgtgtggagagaggagaaatgatttagcacccagattcacactcctatgcctggaagggggacatctttgaagaagaggaattagggctgtggacactgtcttgaggatgtggacttccttagtgagctccacattacttgatggtaaccacttcaaaaggatcagaatccacgtaatgaaaaaggtccctctagaggatggagctgatgtgaagctgccaatggatgaaaagcctcagaaagcaactcaaaggactcaaagcaacggacaacacaagagttgtcttcagcccagtgacacctctgatgtcccctggaagctttgtgctaacctgggactgcctgacttcctttagcctggtcccttgctactaccttgaactgttttatctaacctctctttttctgtttaattctttgctactgccattgaccctgctgcaggatttgtgtcattttcctgcctggttgctgagactccattttgctgccacacacagagatgtaagaggcaggctttaattgccaaagcacagtttgagcagtagaaaacaacatggtgtatatctcaaattgcctgacatgaagaggagtctaacggtgaagtttcacttttcatcagcatcatctttcacatgttcattatcatccgctcttattcttgcatgtttaaacacttaaaatttttagtataatttttagtgtgttttgaagtggtgactaggctttcaaaaacttccattgaattacaaagcactatccagttcttattgttaaactaagtaaaaatgataagtaacatagtgtaaaatattcctttactgtgaacttcttacaatgctgtgaatgagaggctcctcagaactggagcatttgtataataattcatcctgttcatcttcaattttaacatcatatataatttcaattctatcaattgggcctttaaaaatcatataaaaggatataaaatttgaaaagagaaacctaattggctatttaatccaaaacaactttttttttccttcaatggaatcagaaagcttgtcaatcactcatgtgttttagagtaattacttttaaaatggtgcatttgtgcttctgaactattttgaagagtcacttctgtttacctcaagtatcaattcatcctccatacatttgaattcaagttgttttttgtcaaatttacagttgtcaattgatcttcaagctgcagggtgcctagaaatgggccgttgtctgtagccctggcatgtgcacacggacatttgccaccactgcaagcaaaagtctggagaagttcaccaacgacaagaacgattagggaaaatatgctgctgtgggttaacaactcagaaagtccctgatccacatttggctgtttactaaagcttgtgattaactttttggcagtgtgtactatgctctattgctatatatgctatctataaatgtagatgttaaggataagtaattctaaatttattattctatagttttgaagtttggttaagtttcctttcactcaattgatttattttgttgttaatcaaatttatgttaattggatcctttaaattttttttggcattttccaacaaaaatggctttattcataagaaaggaaaaaaatcaatggaatttgatatctaaagaagttagaaagggagcaaaataaaaaacataaaggagatagatgaattagtaagcaaatcagtagtcgagtttttcaaactggcaaaattaattaattgacttttagcccaaatttacattgttaattaaatcaagaaggaagaagatctaagagctcccattgataggcaagcctagagagaactagctaaatttatcatgctaggatattgaaacacagaaagtttacatacatttatgaagggtcaatttagtttggacagtgaggtatttgtcttagtggaaaaaaggagaattagtctgatcaaatcgtgaagtaatacagtgaacttgcaggtgcacaaaataagagggccacatctatatggtgcagtctggaattctgtttaagtttgtaggtacctcttggacttctgaattgatccagttgtcatccaccacagacatctcacatcagatacagacagttccaagattgacaacagagaacaacctgctggaaagacctgggcagaaatggagagccctgcgggaaccatgctacattttcatctaaagagagaatgcacatctgatgagactgaaagttctttgttgttttagattgtagaatggtattgaattggtctgtggaaaattgcattgcttttatttctttgtgtaatcaagtttaagtaataggggatatataatcataagcattttagggtgggagggactattaagtaattttaagtgggtggggttatttagaatgttagaataatattatgtattagatatcgctataagtggacatgcgtacttacttgtaaccctttaccctataattgctatccttaaagatttcaaataaactcggagggaactgcagggagaccaacttatttagagcgaattggacatggataaaaaccccagtgggagaaagttcaaaggtgattagattaataatttaatagaggatgagtgacctctgataaattactgctagaatgaacttgtcaatgatggatggtaaattttcatggaagttataaaagtgataaataaaaacccttgcttttacccctgtcagtagccctcctcctaccactgaaccccattgcccctacccctccttctaactttattgctgtattctcttcactctatatttctctctatttgctaatattgcattgctgttacaataaaaattcaataaagatttagtggttaagtgcaaa

SEQ ID NO: 438120 - DNA, 6158 bp, Homo sapiens
atgaagatgttactcctgctgcattgccttggggtgtttctgtcctgttctggacacatccaggatgagcacccccaatatcacagccctccggatgtggtgattcctgtgaggataactggcaccaccagaggcatgacacctccaggctggctctcctatatcctgccctttggaggccagaaacacattatccacataaaggtcaagaagcttttgttttccaaacacctccctgtgttcacctacacagaccagggtgctatccttgaggaccagccatttgtccagaataactgctactatcatggttatgtggaaggggacccagaatccctggtttccctcagtacctgttttgggggttttcaaggaatattacagataaatgactttgcttatgaaatcaagcccctagcattttctaccacgtttgaacatctggtatacaagatggacagtgaggagaaacaattttcaaccatgagatccggatttatgcaaaatgaaataacatgccgaatggaatttgaagaaattgataattccactcagaagcaaagttcttatgtgggctggtggatccattttaggattgttgaaattgtagtcgtcattgataattatctgtacattcgttatgaaaggaacgactcaaagttgctggaggatctatatgttattgttaatatagtggattccattttggatgtcattggtgttaaggtgttattatttggtttggagatctggaccaataaaaacctcattgtagtagatgatgtaaggaaatctgtgcacctgtattgcaagtggaagtcggagaacattacgccccggatgcaacatgacacctcacatcttttcacaactctaggattaagagggttaagtggcataggagcttttagaggaatgtgtacaccacaccgtagttgtgcaattgttactttcatgaacaaaactttgggcactttttcaattgcagtggctcatcatctaggtcataatttgggcatgaaccatgatgaggatacatgtcgttgttcacaacctagatgcataatgcatgaaggcaacccaccaataactaaatttagcaattgtagttatggtgatttttgggaatatactgtagagaggacaaagtgtttgcttgaaacagtacacacaaaggacatctttaatgtgaagcgctgtgggaatggtgttgttgaagaaggagaagagtgtgactgtggacctttaaagcattgtgcaaaagatccctgctgtctgtcaaattgcactctgactgatggttctacttgtgcttttgggctttgttgcaaagactgcaagttcctaccatcagggaaagtgtgtagaaaggaggtcaatgaatgtgatcttccagagtggtgcaatggtacttcccataagtgcccagatgacttttatgtggaagatggaattccctgtaaggagaggggctactgctatgaaaagagctgtcatgaccgcaatgaacagtgtaggaggatttttggtgcaggcgcaaatactgcaagtgagacttgctacaaagaattgaacaccttaggtgaccgtgttggtcactgtggtatcaaaaatgctacatatataaagtgtaatatctcagatgtccagtgtggaagaattcagtgtgagaatgtgacagaaattcccaatatgagtgatcatactactgtgcattgggctcgcttcaatgacataatgtgctggagtactgattaccatttggggatgaagggacctgatattggtgaagtgaaagatggaacagagtgtgggatagatcatatatgcatccacaggcactgtgtccatataaccatcttgaatagtaattgctcacctgcattttgtaacaagaggggcatctgcaacaataaacatcactgccattgcaattatctgtgggaccctcccaactgcctgataaaaggctatggaggtagtgttgacagtggtccaccccctaagagaaagaagaaaaagaagttctgttatctgtgtatattgttgcttattgttttgtttattttattatgttgtctttatcgactttgtaaaaaaagtaaaccaataaaaaagcagcaagatgttcaaactccatctgcaaaagaagaggaaaaaattcagcgtcgacctcatgagttacctccccagagtcaaccttgggtgatgccttcccagagtcaacctcctgtgacgccttcccagagtcatcctcaggtgatgccttcccagagtcaacctcctcaaaatttattcctgttcagcttctcaatcagtgactgtgtgctaaattttaggctactgtatcttcaggccacctgaggcacatcctctctgaaacggctatggaaggttagggccactctggactggcacacatcctaaagcaccaaaagaccttcaacattttctgagagcaacagagtatttgccaataaatgatctctcatttttccaccttgactgccaatctaactaaaataattaataagtttactttccagccagtcctggaagtctgggttttacctgccaaagagaagctgatacaaacgcaggaaatgctgatttctttatggagggggagacgaggaggaggaggacatgacttttcttgcggtttcggtaccctctttttaaatcactggaggactgaggccttattaaggaagccaaaattatcggtgcagtgtggaaaggcttccgtgatcctctcgctgcacccttagaaacttcaccgtcttcaaactccatttccatggttctgttaattctcaaggagcagcaactcgactggttctcccaggagcaggaaaaacccttgtgacatgaaacatctcaggcctgaaaagaaagtgctctctcagatggactcttgcatgttaagactatgtcttcacatcatggtgcaaatcacatgtacccaatgactccggctttgacacaacaccttaccatcatcatgccatgatggcttccacaaagcattaaacctggtaaccagagattactggtggctccagcgttgttagatgttcatgaaatgtgaccacctctcaatcacctttgagggctaaagagtagcacatcaaaaggactccaaaatcccatacccaactcttaagagatttgtcctggtacttcagaaagaattttcatgagtgttcttaattggctggaaaagcaccagctgacgttttggaagaatctatccatgtgtctgcctccatatgcatctgggcatttcatcttcagtcccctcattagactgtagcattaggatgtgtggagagaggagaaatgatttagcacccagattcacactcctatgcctggaagggggacatctttgaagaagaggaattagggctgtggacactgtcttgaggatgtggacttccttagtgagctccacattacttgatggtaaccacttcaaaaggatcagaatccacgtaatgaaaaaggtccctctagaggatggagctgatgtgaagctgccaatggatgaaaagcctcagaaagcaactcaaaggactcaaagcaacggacaacacaagagttgtcttcagcccagtgacacctctgatgtcccctggaagctttgtgctaacctgggactgcctgacttcctttagcctggtcccttgctactaccttgaactgttttatctaacctctctttttctgtttaattctttgctactgccattgaccctgctgcaggatttgtgtcattttcctgcctggttgctgagactccattttgctgccacacacagagatgtaagaggcaggctttaattgccaaagcacagtttgagcagtagaaaacaacatggtgtatatctcaaattgcctgacatgaagaggagtctaacggtgaagtttcacttttcatcagcatcatctttcacatgttcattatcatccgctcttattcttgcatgtttaaacacttaaaatttttagtataatttttagtgtgttttgaagtggtgactaggctttcaaaaacttccattgaattacaaagcactatccagttcttattgttaaactaagtaaaaatgataagtaacatagtgtaaaatattcctttactgtgaacttcttacaatgctgtgaatgagaggctcctcagaactggagcatttgtataataattcatcctgttcatcttcaattttaacatcatatataatttcaattctatcaattgggcctttaaaaatcatataaaaggatataaaatttgaaaagagaaacctaattggctatttaatccaaaacaactttttttttccttcaatggaatcagaaagcttgtcaatcactcatgtgttttagagtaattacttttaaaatggtgcatttgtgcttctgaactattttgaagagtcacttctgtttacctcaagtatcaattcatcctccatacatttgaattcaagttgttttttgtcaaatttacagttgtcaattgatcttcaagctgcagggtgcctagaaatgggccgttgtctgtagccctggcatgtgcacacggacatttgccaccactgcaagcaaaagtctggagaagttcaccaacgacaagaacgattagggaaaatatgctgctgtgggttaacaactcagaaagtccctgatccacatttggctgtttactaaagcttgtgattaactttttggcagtgtgtactatgctctattgctatatatgctatctataaatgtagatgttaaggataagtaattctaaatttattattctatagttttgaagtttggttaagtttcctttcactcaattgatttattttgttgttaatcaaatttatgttaattggatcctttaaattttttttggcattttccaacaaaaatggctttattcataagaaaggaaaaaaatcaatggaatttgatatctaaagaagttagaaagggagcaaaataaaaaacataaaggagatagatgaattagtaagcaaatcagtagtcgagtttttcaaactggcaaaattaattaattgacttttagcccaaatttacattgttaattaaatcaagaaggaagaagatctaagagctcccattgataggcaagcctagagagaactagctaaatttatcatgctaggatattgaaacacagaaagtttacatacatttatgaagggtcaatttagtttggacagtgaggtatttgtcttagtggaaaaaaggagaattagtctgatcaaatcgtgaagtaatacagtgaacttgcaggtgcacaagtacctcttggacttctgaattgatccagttgtcatccaccacagacatctcacatcagatacagacagttccaagattgacaacagagaacaacctgctggaaagacctgggcagaaatggagagccctgcgggaaccatgctacattttcatctaaagagagaatgcacatctgatgagactgaaagttctttgttgttttagattgtagaatggtattgaattggtctgtggaaaattgcattgcttttatttctttgtgtaatcaagtttaagtaataggggatatataatcataagcattttagggtgggagggactattaagtaattttaagtgggtggggttatttagaatgttagaataatattatgtattagatatcgctataagtggacatgcgtacttacttgtaaccctttaccctataattgctatccttaaagatttcaaataaactcggagggaactgcagggagaccaacttatttagagcgaattggacatggataaaaaccccagtgggagaaagttcaaaggtgattagattaataatttaatagaggatgagtgacctctgataaattactgctagaatgaacttgtcaatgatggatggtaaattttcatggaagttataaaagtgataaataaaaacccttgcttttacccctgtcagtagccctcctcctaccactgaaccccattgcccctacccctccttctaactttattgctgtattctcttcactctatatttctctctatttgctaatattgcattgctgttacaataaaaattcaataaagatttagtggttaagtgcaaa

SEQ ID NO: 438121 - DNA, 6479 bp, Homo sapiens
atgaagatgttactcctgctgcattgccttggggtgtttctgtcctgttctggacacatccaggatgagcacccccaatatcacagccctccggatgtggtgattcctgtgaggataactggcaccaccagaggcatgacacctccaggctggctctcctatatcctgccctttggaggccagaaacacattatccacataaaggtcaagaagcttttgttttccaaacacctccctgtgttcacctacacagaccagggtgctatccttgaggaccagccatttgtccagaataactgctactatcatggttatgtggaaggggacccagaatccctggtttccctcagtacctgttttgggggttttcaaggaatattacagataaatgactttgcttatgaaatcaagcccctagcattttctaccacgtttgaacatctggtatacaagatggacagtgaggagaaacaattttcaaccatgagatccggatttatgcaaaatgaaataacatgccgaatggaatttgaagaaattgataattccactcagaagcaaagttcttatgtgggctggtggatccattttaggattgttgaaattgtagtcgtcattgataattatctgtacattcgttatgaaaggaacgactcaaagttgctggaggatctatatgttattgttaatatagtggattccattttggatgtcattggtgttaaggtgttattatttggtttggagatctggaccaataaaaacctcattgtagtagatgatgtaaggaaatctgtgcacctgtattgcaagtggaagtcggagaacattacgccccggatgcaacatgacacctcacatcttttcacaactctaggattaagagggttaagtggcataggagcttttagaggaatgtgtacaccacaccgtagttgtgcaattgttactttcatgaacaaaactttgggcactttttcaattgcagtggctcatcatctaggtcataatttgggcatgaaccatgatgaggatacatgtcgttgttcacaacctagatgcataatgcatgaaggcaacccaccaataactaaatttagcaattgtagttatggtgatttttgggaatatactgtagagaggacaaagtgtttgcttgaaacagtacacacaaaggacatctttaatgtgaagcgctgtgggaatggtgttgttgaagaaggagaagagtgtgactgtggacctttaaagcattgtgcaaaagatccctgctgtctgtcaaattgcactctgactgatggttctacttgtgcttttgggctttgttgcaaagactgcaagttcctaccatcagggaaagtgtgtagaaaggaggtcaatgaatgtgatcttccagagtggtgcaatggtacttcccataagtgcccagatgacttttatgtggaagatggaattccctgtaaggagaggggctactgctatgaaaagagctgtcatgaccgcaatgaacagtgtaggaggatttttggtgcaggcgcaaatactgcaagtgagacttgctacaaagaattgaacaccttaggtgaccgtgttggtcactgtggtatcaaaaatgctacatatataaagtgtaatatctcagatgtccagtgtggaagaattcagtgtgagaatgtgacagaaattcccaatatgagtgatcatactactgtgcattgggctcgcttcaatgacataatgtgctggagtactgattaccatttggggatgaagggacctgatattggtgaagtgaaagatggaacagagtgtgggatagatcatatatgcatccacaggcactgtgtccatataaccatcttgaatagtaattgctcacctgcattttgtaacaagaggggcatctgcaacaataaacatcactgccattgcaattatctgtgggaccctcccaactgcctgataaaaggctatggaggtagtgttgacagtggtccaccccctaagagaaagaagaaaaagaagttctgttatctgtgtatattgttgcttattgttttgtttattttattatgttgtctttatcgactttgtaaaaaaagtaaaccaataaaaaagcagcaagatgttcaaactccatctgcaaaagaagaggaaaaaattcagcgtcgacctcatgagttacctccccagagtcaaccttgggtgatgccttcccagagtcaacctcctgtgacgccttcccagagtcatcctcaggtgatgccttcccagagtcaacctcctcaaaatttattcctgttcagcttctcaatcagtgactgtgtgctaaattttaggctactgtatcttcaggccacctgaggcacatcctctctgaaacggctatggaaggttagggccactctggactggcacacatcctaaagcaccaaaagaccttcaacattttctgagagcaacagagtatttgccaataaatgatctctcatttttccaccttgactgccaatctaactaaaataattaataagtttactttccagccagtcctggaagtctgggttttacctgccaaagagaagctgatacaaacgcaggaaatgctgatttctttatggagggggagacgaggaggaggaggacatgacttttcttgcggtttcggtaccctctttttaaatcactggaggactgaggccttattaaggaagccaaaattatcggtgcagtgtggaaaggcttccgtgatcctctcgctgcacccttagaaacttcaccgtcttcaaactccatttccatggttctgttaattctcaaggagcagcaactcgactggttctcccaggagcaggaaaaacccttgtgacatgaaacatctcaggcctgaaaagaaagtgctctctcagatggactcttgcatgttaagactatgtcttcacatcatggtgcaaatcacatgtacccaatgactccggctttgacacaacaccttaccatcatcatgccatgatggcttccacaaagcattaaacctggtaaccagagattactggtggctccagcgttgttagatgttcatgaaatgtgaccacctctcaatcacctttgagggctaaagagtagcacatcaaaaggactccaaaatcccatacccaactcttaagagatttgtcctggtacttcagaaagaattttcatgagtgttcttaattggctggaaaagcaccagctgacgttttggaagaatctatccatgtgtctgcctccatatgcatctgggcatttcatcttcagtcccctcattagactgtagcattaggatgtgtggagagaggagaaatgatttagcacccagattcacactcctatgcctggaagggggacatctttgaagaagaggaattagggctgtggacactgtcttgaggatgtggacttccttagtgagctccacattacttgatggtaaccacttcaaaaggatcagaatccacgtaatgaaaaaggtccctctagaggatggagctgatgtgaagctgccaatggatgaaaagcctcagaaagcaactcaaaggactcaaagcaacggacaacacaagagttgtcttcagcccagtgacacctctgatgtcccctggaagctttgtgctaacctgggactgcctgacttcctttagcctggtcccttgctactaccttgaactgttttatctaacctctctttttctgtttaattctttgctactgccattgaccctgctgcaggatttgtgtcattttcctgcctggttgctgagactccattttgctgccacacacagagatgtaagaggcaggctttaattgccaaagcacagtttgagcagtagaaaacaacatggtgtatatctcaaattgcctgacatgaagaggagtctaacggtgaagtttcacttttcatcagcatcatctttcacatgttcattatcatccgctcttattcttgcatgtttaaacacttaaaatttttagtataatttttagtgtgttttgaagtggtgactaggctttcaaaaacttccattgaattacaaagcactatccagttcttattgttaaactaagtaaaaatgataagtaacatagtgtaaaatattcctttactgtgaacttcttacaatgctgtgaatgagaggctcctcagaactggagcatttgtataataattcatcctgttcatcttcaattttaacatcatatataatttcaattctatcaattgggcctttaaaaatcatataaaaggatataaaatttgaaaagagaaacctaattggctatttaatccaaaacaactttttttttccttcaatggaatcagaaagcttgtcaatcactcatgtgttttagagtaattacttttaaaatggtgcatttgtgcttctgaactattttgaagagtcacttctgtttacctcaagtatcaattcatcctccatacatttgaattcaagttgttttttgtcaaatttacagttgtcaattgatcttcaagctgcagggtgcctagaaatgggccgttgtctgtagccctggcatgtgcacacggacatttgccaccactgcaagcaaaagtctggagaagttcaccaacgacaagaacgattagggaaaatatgctgctgtgggttaacaactcagaaagtccctgatccacatttggctgtttactaaagcttgtgattaactttttggcagtgtgtactatgctctattgctatatatgctatctataaatgtagatgttaaggataagtaattctaaatttattattctatagttttgaagtttggttaagtttcctttcactcaattgatttattttgttgttaatcaaatttatgttaattggatcctttaaattttttttggcattttccaacaaaaatggctttattcataagaaaggaaaaaaatcaatggaatttgatatctaaagaagttagaaagggagcaaaataaaaaacataaaggagatagatgaattagtaagcaaatcagtagtcgagtttttcaaactggcaaaattaattaattgacttttagcccaaatttacattgttaattaaatcaagaaggaagaagatctaagagctcccattgataggcaagcctagagagaactagctaaatttatcatgctaggatattgaaacacagaaagtttacatacatttatgaagggtcaatttagtttggacagtgaggtatttgtcttagtggaaaaaaggagaattagtctgatcaaatcgtgaagtaatacagtgaacttgcaggtgcacaaaataagagggccacatctatatggtgcagtctggaattctgtttaagtttgtaggtacctcttggacttctgaattgatccagttgtcatccaccacagacatctcacatcagatacagacagttccaagattgacaacagagaacaacctgctggaaagacctgggcagaaatggagagccctgcgggaaccatgctacattttcatctaaagagagaatgcacatctgatgagactgaaagttctttgttgttttagattgtagaatggtattgaattggtctgtggaaaattgcattgcttttatttctttgtgtaatcaagtttaagtaataggggatatataatcataagcattttagggtgggagggactattaagtaattttaagtgggtggggttatttagaatgttagaataatattatgtattagatatcgctataagtggacatgcgtacttacttgtaaccctttaccctataattgctatccttaaagatttcaaataaactcggagggaactgcagggagaccaacttatttagagcgaattggacatggataaaaaccccagtgggagaaagttcaaaggtgattagattaataatttaatagaggatgagtgacctctgataaattactgctagaatgaacttgtcaatgatggatggtaaattttcatggaagttataaaagtgataaataaaaacccttgcttttacccctgtcagtagccctcctcctaccactgaaccccattgcccctacccctccttctaactttattgctgtattctcttcactctatatttctctctatttgctaatattgcattgctgttacaataaaaattcaataaagatttagtggttaagtgcaaaaaaaaaagagaaagaaaaaaaaaatttgtggggggcggggcggaaaaagccttcaacaccagtcgttgtgggacgggggccccaaaaggtgtgagcgaaaacaaagtggccacagcatgcccacaaagagaacaccggggacagacacaagggggaggattccagacaagaaaaaaagccgcgggggtcaaggaagggttcggaaaaaacccaaaggaggtgagagacacaagggctctgacagaagagcaaggagcgcaatcaatc

SEQ ID NO: 438122 - DNA, 5733 bp, Homo sapiens
atgaagatgttactcctgctgcattgccttggggtgtttctgtcctgttctggacacatccaggatgagcacccccaatatcacagccctccggatgtggtgattcctgtgaggataactggcaccaccagaggcatgacacctccaggctggctctcctatatcctgccctttggaggccagaaacacattatccacataaaggtcaagaagcttttgttttccaaacacctccctgtgttcacctacacagaccagggtgctatccttgaggaccagccatttgtccagaataactgctactatcatggttatgtggaaggggacccagaatccctggtttccctcagtacctgttttgggggttttcaaggaatattacagataaatgactttgcttatgaaatcaagcccctagcattttctaccacgtttgaacatctggtatacaagatggacagtgaggagaaacaattttcaaccatgagatccggatttatgcaaaatgaaataacatgccgaatggaatttgaagaaattgataattccactcagaagcaaagttcttatgtgggctggtggatccattttaggattgttgaaattgtagtcgtcattgataattatctgtacattcgttatgaaaggaacgactcaaagttgctggaggatctatatgttattgttaatatagtggattccattttggatgtcattggtgttaaggtgttattatttggtttggagatctggaccaataaaaacctcattgtagtagatgatgtaaggaaatctgtgcacctgtattgcaagtggaagtcggagaacattacgccccggatgcaacatgacacctcacatcttttcacaactctaggattaagagggttaagtggcataggagcttttagaggaatgtgtacaccacaccgtagttgtgcaattgttactttcatgaacaaaactttgggcactttttcaattgcagtggctcatcatctaggtcataatttgggcatgaaccatgatgaggatacatgtcgttgttcacaacctagatgcataatgcatgaaggcaacccaccaataactaaatttagcaattgtagttatggtgatttttgggaatatactgtagagaggacaaagtgtttgcttgaaacagtacacacaaaggacatctttaatgtgaagcgctgtgggaatggtgttgttgaagaaggagaagagtgtgactgtggacctttaaagcattgtgcaaaagatccctgctgtctgtcaaattgcactctgactgatggttctacttgtgcttttgggctttgttgcaaagactgcaagttcctaccatcagggaaagtgtgtagaaaggaggtcaatgaatgtgatcttccagagtggtgcaatggtacttcccataagtgcccagatgacttttatgtggaagatggaattccctgtaaggagaggggctactgctatgaaaagagctgtcatgaccgcaatgaacagtgtaggaggatttttggtgcaggcgcaaatactgcaagtgagacttgctacaaagaattgaacaccttaggtgaccgtgttggtcactgtggtatcaaaaatgctacatatataaagtgtaatatctcagatgtccagtgtggaagaattcagtgtgagaatgtgacagaaattcccaatatgagtgatcatactactgtgcattgggctcgcttcaatgacataatgtgctggagtactgattaccatttggggatgaagggacctgatattggtgaagtgaaagatggaacagagtgtgggatagatcatatatgcatccacaggcactgtgtccatataaccatcttgaatagtaattgctcacctgcattttgtaacaagaggggcatctgcaacaataaacatcactgccattgcaattatctgtgggaccctcccaactgcctgataaaaggctatggaggtagtgttgacagtggtccaccccctaagagaaagaagaaaaagaagttctgttatctgtgtatattgttgcttattgttttgtttattttattatgttgtctttatcgactttgtaaaaaaagtaaaccaataaaaaagcagcaagatgttcaaactccatctgcaaaagaagaggaaaaaattcagcgtcgacctcatgagttacctccccagagtcaaccttgggtgatgccttcccagagtcaacctcctgtgacgccttcccagagtcatcctcaggtgatgccttcccagagtcaacctcctcaaaatttattcctgttcagcttctcaatcagtgactgtgtgctaaattttaggctactgtatcttcaggccacctgaggcacatcctctctgaaacggctatggaaggttagggccactctggactggcacacatcctaaagcaccaaaagaccttcaacattttctgagagcaacagagtatttgccaataaatgatctctcatttttccaccttgactgccaatctaactaaaataattaataagtttactttccagccagtcctggaagtctgggttttacctgccaaagagaagctgatacaaacgcaggaaatgctgatttctttatggagggggagacgaggaggaggaggacatgacttttcttgcggtttcggtaccctctttttaaatcactggaggactgaggccttattaaggaagccaaaattatcggtgcagtgtggaaaggcttccgtgatcctctcgctgcacccttagaaacttcaccgtcttcaaactccatttccatggttctgttaattctcaaggagcagcaactcgactggttctcccaggagcaggaaaaacccttgtgacatgaaacatctcaggcctgaaaagaaagtgctctctcagatggactcttgcatgttaagactatgtcttcacatcatggtgcaaatcacatgtacccaatgactccggctttgacacaacaccttaccatcatcatgccatgatggcttccacaaagcattaaacctggtaaccagagattactggtggctccagcgttgttagatgttcatgaaatgtgaccacctctcaatcacctttgagggctaaagagtagcacatcaaaaggactccaaaatcccatacccaactcttaagagatttgtcctggtacttcagaaagaattttcatgagtgttcttaattggctggaaaagcaccagctgacgttttggaagaatctatccatgtgtctgcctccatatgcatctgggcatttcatcttcagtcccctcattagactgtagcattaggatgtgtggagagaggagaaatgatttagcacccagattcacactcctatgcctggaagggggacatctttgaagaagaggaattagggctgtggacactgtcttgaggatgtggacttccttagtgagctccacattacttgatggtaaccacttcaaaaggatcagaatccacgtaatgaaaaaggtccctctagaggatggagctgatgtgaagctgccaatggatgaaaagcctcagaaagcaactcaaaggactcaaagcaacggacaacacaagagttgtcttcagcccagtgacacctctgatgtcccctggaagctttgtgctaacctgggactgcctgacttcctttagcctggtcccttgctactaccttgaactgttttatctaacctctctttttctgtttaattctttgctactgccattgaccctgctgcaggatttgtgtcattttcctgcctggttgctgagactccattttgctgccacacacagagatgtaagaggcaggctttaattgccaaagcacagtttgagcagtagaaaacaacatggtgtatatctcaaattgcctgacatgaagaggagtctaacggtgaagtttcacttttcatcagcatcatctttcacatgttcattatcatccgctcttattcttgcatgtttaaacacttaaaatttttagtataatttttagtgtgttttgaagtggtgactaggctttcaaaaacttccattgaattacaaagcactatccagttcttattgttaaactaagtaaaaatgataagtaacatagtgtaaaatattcctttactgtgaacttcttacaatgctgtgaatgagaggctcctcagaactggagcatttgtataataattcatcctgttcatcttcaattttaacatcatatataatttcaattctatcaattgggcctttaaaaatcatataaaaggatataaaatttgaaaagagaaacctaattggctatttaatccaaaacaactttttttttccttcaatggaatcagaaagcttgtcaatcactcatgtgttttagagtaattacttttaaaatggtgcatttgtgcttctgaactattttgaagagtcacttctgtttacctcaagtatcaattcatcctccatacatttgaattcaagttgttttttgtcaaatttacagttgtcaattgatcttcaagctgcagggtgcctagaaatgggccgttgtctgtagccctggcatgtgcacacggacatttgccaccactgcaagcaaaagtctggagaagttcaccaacgacaagaacgattagggaaaatatgctgctgtgggttaacaactcagaaagtccctgatccacatttggctgtttactaaagcttgtgattaactttttggcagtgtgtactatgctctattgctatatatgctatctataaatgtagatgttaaggataagtaattctaaatttattattctatagttttgaagtttggttaagtttcctttcactcaattgatttattttgttgttaatcaaatttatgttaattggatcctttaaattttttttggcattttccaacaaaaatggctttattcataagaaaggaaaaaaatcaatggaatttgatatctaaagaagttagaaagggagcaaaataaaaaacataaaggagatagatgaattagtaagcaaatcagtagtcgagtttttcaaactggcaaaattaattaattgacttttagcccaaatttacattgttaattaaatcaagaaggaagaagatctaagagctcccattgataggcaagcctagagagaactagctaaatttatcatgctaggatattgaaacacagaaagtttacatacatttatgaagggtcaatttagtttggacagtgaggtatttgtcttagtggaaaaaaggagaattagtctgatcaaatcgtgaagtaatacagtgaacttgcaggtgcacaaaataagagggccacatctatatggtgcagtctggaattctgtttaagtttgtaggtacctcttggacttctgaattgatccagttgtcatccaccacagacatctcacatcagatacagacagttccaagattgacaacagagaacaacctgctggaaagacctgggcagaaatggagagccctgcgggaaccatgctacattttcatctaaagagagaagcgcctcgggtagaccgaagtcctcgggggtcaatggtgacggcttgacgggcgcggaacagctgcctcatacctcggaacactgagcggttgacaaaccaacggggggggacacacaagggggcgggggactcatatagaacagaggaaggacaacctctaaacaaagaggtgtccgcccgtcta

SEQ ID NO: 438123 - DNA, 5367 bp, Homo sapiens
atgaagatgttactcctgctgcattgccttggggtgtttctgtcctgttctggacacatccaggatgagcacccccaatatcacagccctccggatgtggtgattcctgtgaggataactggcaccaccagaggcatgacacctccaggctggctctcctatatcctgccctttggaggccagaaacacattatccacataaaggtcaagaagcttttgttttccaaacacctccctgtgttcacctacacagaccagggtgctatccttgaggaccagccatttgtccagaataactgctactatcatggttatgtggaaggggacccagaatccctggtttccctcagtacctgttttgggggttttcaaggaatattacagataaatgactttgcttatgaaatcaagcccctagcattttctaccacgtttgaacatctggtatacaagatggacagtgaggagaaacaattttcaaccatgagatccggatttatgcaaaatgaaataacatgccgaatggaatttgaagaaattgataattccactcagaagcaaagttcttatgtgggctggtggatccattttaggattgttgaaattgtagtcgtcattgataattatctgtacattcgttatgaaaggaacgactcaaagttgctggaggatctatatgttattgttaatatagtggattccattttggatgtcattggtgttaaggtgttattatttggtttggagatctggaccaataaaaacctcattgtagtagatgatgtaaggaaatctgtgcacctgtattgcaagtggaagtcggagaacattacgccccggatgcaacatgacacctcacatcttttcacaactctaggattaagagggttaagtggcataggagcttttagaggaatgtgtacaccacaccgtagttgtgcaattgttactttcatgaacaaaactttgggcactttttcaattgcagtggctcatcatctaggtcataatttgggcatgaaccatgatgaggatacatgtcgttgttcacaacctagatgcataatgcatgaaggcaacccaccaataactaaatttagcaattgtagttatggtgatttttgggaatatactgtagagaggacaaagtgtttgcttgaaacagtacacacaaaggacatctttaatgtgaagcgctgtgggaatggtgttgttgaagaaggagaagagtgtgactgtggacctttaaagcattgtgcaaaagatccctgctgtctgtcaaattgcactctgactgatggttctacttgtgcttttgggctttgttgcaaagactgcaagttcctaccatcagggaaagtgtgtagaaaggaggtcaatgaatgtgatcttccagagtggtgcaatggtacttcccataagtgcccagatgacttttatgtggaagatggaattccctgtaaggagaggggctactgctatgaaaagagctgtcatgaccgcaatgaacagtgtaggaggatttttggtgcaggcgcaaatactgcaagtgagacttgctacaaagaattgaacaccttaggtgaccgtgttggtcactgtggtatcaaaaatgctacatatataaagtgtaatatctcagatgtccagtgtggaagaattcagtgtgagaatgtgacagaaattcccaatatgagtgatcatactactgtgcattgggctcgcttcaatgacataatgtgctggagtactgattaccatttggggatgaagggacctgatattggtgaagtgaaagatggaacagagtgtgggatagatcatatatgcatccacaggcactgtgtccatataaccatcttgaatagtaattgctcacctgcattttgtaacaagaggggcatctgcaacaataaacatcactgccattgcaattatctgtgggaccctcccaactgcctgataaaaggctatggaggtagtgttgacagtggtccaccccctaagagaaagaagaaaaagaagttctgttatctgtgtatattgttgcttattgttttgtttattttattatgttgtctttatcgactttgtaaaaaaagtaaaccaataaaaaagcagcaagatgttcaaactccatctgcaaaagaagaggaaaaaattcagcgtcgacctcatgagttacctccccagagtcaaccttgggtgatgccttcccagagtcaacctcctgtgacgccttcccagagtcatcctcaggtgatgccttcccagagtcaacctcctcaaaatttattcctgttcagcttctcaatcagtgactgtgtgctaaattttaggctactgtatcttcaggccacctgaggcacatcctctctgaaacggctatggaaggttagggccactctggactggcacacatcctaaagcaccaaaagaccttcaacattttctgagagcaacagagtatttgccaataaatgatctctcatttttccaccttgactgccaatctaactaaaataattaataagtttactttccagccagtcctggaagtctgggttttacctgccaaagagaagctgatacaaacgcaggaaatgctgatttctttatggagggggagacgaggaggaggaggacatgacttttcttgcggtttcggtaccctctttttaaatcactggaggactgaggccttattaaggaagccaaaattatcggtgcagtgtggaaaggcttccgtgatcctctcgctgcacccttagaaacttcaccgtcttcaaactccatttccatggttctgttaattctcaaggagcagcaactcgactggttctcccaggagcaggaaaaacccttgtgacatgaaacatctcaggcctgaaaagaaagtgctctctcagatggactcttgcatgttaagactatgtcttcacatcatggtgcaaatcacatgtacccaatgactccggctttgacacaacaccttaccatcatcatgccatgatggcttccacaaagcattaaacctggtaaccagagattactggtggctccagcgttgttagatgttcatgaaatgtgaccacctctcaatcacctttgagggctaaagagtagcacatcaaaaggactccaaaatcccatacccaactcttaagagatttgtcctggtacttcagaaagaattttcatgagtgttcttaattggctggaaaagcaccagctgacgttttggaagaatctatccatgtgtctgcctccatatgcatctgggcatttcatcttcagtcccctcattagactgtagcattaggatgtgtggagagaggagaaatgatttagcacccagattcacactcctatgcctggaagggggacatctttgaagaagaggaattagggctgtggacactgtcttgaggatgtggacttccttagtgagctccacattacttgatggtaaccacttcaaaaggatcagaatccacgtaatgaaaaaggtccctctagaggatggagctgatgtgaagctgccaatggatgaaaagcctcagaaagcaactcaaaggactcaaagcaacggacaacacaagagttgtcttcagcccagtgacacctctgatgtcccctggaagctttgtgctaacctgggactgcctgacttcctttagcctggtcccttgctactaccttgaactgttttatctaacctctctttttctgtttaattctttgctactgccattgaccctgctgcaggatttgtgtcattttcctgcctggttgctgagactccattttgctgccacacacagagatgtaagaggcaggctttaattgccaaagcacagtttgagcagtagaaaacaacatggtgtatatctcaaattgcctgacatgaagaggagtctaacggtgaagtttcacttttcatcagcatcatctttcacatgttcattatcatccgctcttattcttgcatgtttaaacacttaaaatttttagtataatttttagtgtgttttgaagtggtgactaggctttcaaaaacttccattgaattacaaagcactatccagttcttattgttaaactaagtaaaaatgataagtaacatagtgtaaaatattcctttactgtgaacttcttacaatgctgtgaatgagaggctcctcagaactggagcatttgtataataattcatcctgttcatcttcaattttaacatcatatataatttcaattctatcaattgggcctttaaaaatcatataaaaggatataaaatttgaaaagagaaacctaattggctatttaatccaaaacaactttttttttccttcaatggaatcagaaagcttgtcaatcactcatgtgttttagagtaattacttttaaaatggtgcatttgtgcttctgaactattttgaagagtcacttctgtttacctcaagtatcaattcatcctccatacatttgaattcaagttgttttttgtcaaatttacagttgtcaattgatcttcaagctgcagggtgcctagaaatgggccgttgtctgtagccctggcatgtgcacacggacatttgccaccactgcaagcaaaagtctggagaagttcaccaacgacaagaacgattagggaaaatatgctgctgtgggttaacaactcagaaagtccctgatccacatttggctgtttactaaagcttgtgattaactttttggcagtgtgtactatgctctattgctatatatgctatctataaatgtagatgttaaggataagtaattctaaatttattattctatagttttgaagtttggttaagtttcctttcactcaattgatttattttgttgttaatcaaatttatgttaattggatcctttaaattttttttggcattttccaacaaaaatggctttattcataagaaaggaaaaaaatcaatggaatttgatatctaaagaagttagaaagggagcaaaataaaaaacataaaggagatagatgaattagtaagcaaatcagtagtcgagtttttcaaactggcaaaattaattaattgacttttagcccaaatttacattgttaattaaatcaagaaggaagaagatctaagagctcccattgataggcaagcctagagagaactagctaaatttatcatgctaggatattgaaacacagaaagtttacatacatttatgaagggtcaatttagtttggacagtgaggtatttgtcttagtggaaaaaaggaggggtggaataatccataagaaaaagttttaaaaatattggaaaagaaccctagtgatgaaaatttgagagacccttatactataatttggt

SEQ ID NO: 438124 - DNA, 1127 bp, Homo sapiens
atattgaaacacagaaagtttacatatcctagcatgataaatttagctagttctctctaggcttgcctatcaatgggagctctagctaaatttatcatgctaggatattgaaacacagaaagtttacatacatttatgaagggtcaatttagtttggacagtgaggtatttgtcttagtggaaaaaaggagaattagtctgatcaaatcgtgaagtaatacagtgaacttgcaggtgcacaaaataagagggccacatctatatggtgcagtctggaattctgtttaagtttgtaggtacctcttggacttctgaattgatccagttgtcatccaccacagacatctcacatcagatacagacagttccaagattgacaacagagaacaacctgctggaaagacctgggcagaaatggagagccctgcgggaaccatgctacattttcatctaaagagagaatgcacatctgatgagactgaaagttctttgttgttttagattgtagaatggtattgaattggtctgtggaaaattgcattgcttttatttctttgtgtaatcaagtttaagtaataggggatatataatcataagcattttagggtgggagggactattaagtaattttaagtgggtggggttatttagaatgttagaataatattatgtattagatatcgctataagtggacatgcgtacttacttgtaaccctttaccctataattgctatccttaaagatttcaaataaactcggagggaactgcagggagaccaacttatttagagcgaattggacatggataaaaaccccagtgggagaaagttcaaaggtgattagattaataatttaatagaggatgagtgacctctgataaattactgctagaatgaacttgtcaatgatggatggtaaattttcatggaagttataaaagtgataaataaaaacccttgcttttacccctgtcagtagccctcctcctaccactgaaccccattgcccctacccctccttctaactttattgctgtattctcttcactctatatttctctctatttgctaatattgcattgctgttacaataaaaattcaataaagatttagtggttaagtgcaaa

SEQ ID NO: 438125 - DNA, 1029 bp, Homo sapiens
atcattagtcatggtgtgtctctagtgaagatccgtggctcatgacgtagtgcgttggatttctcaccaatagaaaacgcccgggggtcaacctgatgcgttcttgtacaaagtcccgtattggagtttctgaggtcatgtacgtggatctattcatctggtagtccaaggcgagtctcggatatcaatttacgccccgtacctcttggacttctgaattgatccagttgtcatccaccacagacatctcacatcagatacagacagttccaagattgacaacagagaacaacctgctggaaagacctgggcagaaatggagagccctgcgggaaccatgctacattttcatctaaagagagaatgcacatctgatgagactgaaagttctttgttgttttagattgtagaatggtattgaattggtctgtggaaaattgcattgcttttatttctttgtgtaatcaagtttaagtaataggggatatataatcataagcattttagggtgggagggactattaagtaattttaagtgggtggggttatttagaatgttagaataatattatgtattagatatcgctataagtggacatgcgtacttacttgtaaccctttaccctataattgctatccttaaagatttcaaataaactcggagggaactgcagggagaccaacttatttagagcgaattggacatggataaaaaccccagtgggagaaagttcaaaggtgattagattaataatttaatagaggatgagtgacctctgataaattactgctagaatgaacttgtcaatgatggatggtaaattttcatggaagttataaaagtgataaataaaaacccttgcttttacccctgtcagtagccctcctcctaccactgaaccccattgcccctacccctccttctaactttattgctgtattctcttcactctatatttctctctatttgctaatattgcattgctgttacaataaaaattcaataaagatttagtggttaagtgcaaa

SEQ ID NO: 438126 - DNA, 601 bp, Homo sapiens
gcacttaaccactaaatctttattgaatttttattgtaacagccatgcaatattagccaatagagagaaatatagagtgaagagaatacagcattaagtaattttaagtgggtggggttatttagaatgttagaataatattatgtattagatatcgctataagtggacatgcgtacttacttgtaaccctttaccctataattgctatccttaaagatttcaaataaactcggagggaactgcagggagaccaacttatttagagcgaattggacatggataaaaaccccagtgggagaaagttcaaaggtgattagattaataatttaatagaggatgagtgacctctgataaattactgctagaatgaacttgtcaatgatggatggtaaattttcatggaagttataaaagtgataaataaaaacccttgcttttacccctgtcagtagccctcctcctaccactgaaccccattgcccctacccctccttctaactttattgctgtattctcttcactctatatttctctctatttgctaatattgcattgctgttacaataaaaattcaataaagatttagtggttaagtgcaaa

SEQ ID NO: 438127 - DNA, 3899 bp, Homo sapiens
atgaagatgttactcctgctgcattgccttggggtgtttctgtcctgttctggacacatccaggatgagcacccccaatatcacagccctccggatgtggtgattcctgtgaggataactggcaccaccagaggcatgacacctccaggctggctctcctatatcctgccctttggaggccagaaacacattatccacataaaggtcaagaagcttttgttttccaaacacctccctgtgttcacctacacagaccagggtgctatccttgaggaccagccatttgtccagaataactgctactatcatggttatgtggaaggggacccagaatccctggtttccctcagtacctgttttgggggttttcaaggaatattacagataaatgactttgcttatgaaatcaagcccctagcattttctaccacgtttgaacatctggtatacaagatggacagtgaggagaaacaattttcaaccatgagatccggatttatgcaaaatgaaataacatgccgaatggaatttgaagaaattgataattccactcagaagcaaagttcttatgtgggctggtggatccattttaggattgttgaaattgtagtcgtcattgataattatctgtacattcgttatgaaaggaacgactcaaagttgctggaggatctatatgttattgttaatatagtggattccattttggatgtcattggtgttaaggtgttattatttggtttggagatctggaccaataaaaacctcattgtagtagatgatgtaaggaaatctgtgcacctgtattgcaagtggaagtcggagaacattacgccccggatgcaacatgacacctcacatcttttcacaactctaggattaagagggttaagtggcataggagcttttagaggaatgtgtacaccacaccgtagttgtgcaattgttactttcatgaacaaaactttgggcactttttcaattgcagtggctcatcatctaggtcataatttgggcatgaaccatgatgaggatacatgtcgttgttcacaacctagatgcataatgcatgaaggcaacccaccaataactaaatttagcaattgtagttatggtgatttttgggaatatactgtagagaggacaaagtgtttgcttgaaacagtacacacaaaggacatctttaatgtgaagcgctgtgggaatggtgttgttgaagaaggagaagagtgtgactgtggacctttaaagcattgtgcaaaagatccctgctgtctgtcaaattgcactctgactgatggttctacttgtgcttttgggctttgttgcaaagactgcaagttcctaccatcagggaaagtgtgtagaaaggaggtcaatgaatgtgatcttccagagtggtgcaatggtacttcccataagtgcccagatgacttttatgtggaagatggaattccctgtaaggagaggggctactgctatgaaaagagctgtcatgaccgcaatgaacagtgtaggaggatttttggtgcaggcgcaaatactgcaagtgagacttgctacaaagaattgaacaccttaggtgaccgtgttggtcactgtggtatcaaaaatgctacatatataaagtgtaatatctcagatgtccagtgtggaagaattcagtgtgagaatgtgacagaaattcccaatatgagtgatcatactactgtgcattgggctcgcttcaatgacataatgtgctggagtactgattaccatttggggatgaagggacctgatattggtgaagtgaaagatggaacagagtgtgggatagatcatatatgcatccacaggcactgtgtccatataaccatcttgaatagtaattgctcacctgcattttgtaacaagaggggcatctgcaacaataaacatcactgccattgcaattatctgtgggaccctcccaactgcctgataaaaggctatggaggtagtgttgacagtggtccaccccctaagagaaagaagaaaaagaagttctgttatctgtgtatattgttgcttattgttttgtttattttattatgttgtctttatcgactttgtaaaaaaagtaaaccaataaaaaagcagcaagatgttcaaactccatctgcaaaagaagaggaaaaaattcagcgtcgacctcatgagttacctccccagagtcaaccttgggtgatgccttcccagagtcaacctcctgtgacgccttcccagagtcatcctcaggtgatgccttcccagagtcaacctcctcaaaatttattcctgttcagcttctcaatcagtgactgtgtgctaaattttaggctactgtatcttcaggccacctgaggcacatcctctctgaaacggctatggaaggttagggccactctggactggcacacatcctaaagcaccaaaagaccttcaacattttctgagagcaacagagtatttgccaataaatgatctctcatttttccaccttgactgccaatctaactaaaataattaataagtttactttccagccagtcctggaagtctgggttttacctgccaaagagaagctgatacaaacgcaggaaatgctgatttctttatggagggggagacgaggaggaggaggacatgacttttcttgcggtttcggtaccctctttttaaatcactggaggactgaggccttattaaggaagccaaaattatcggtgcagtgtggaaaggcttccgtgatcctctcgctgcacccttagaaacttcaccgtcttcaaactccatttccatggttctgttaattctcaaggagcagcaactcgactggttctcccaggagcaggaaaaacccttgtgacatgaaacatctcaggcctgaaaagaaagtgctctctcagatggactcttgcatgttaagactatgtcttcacatcatggtgcaaatcacatgtacccaatgactccggctttgacacaacaccttaccatcatcatgccatgatggcttccacaaagcattaaacctggtaaccagagattactggtggctccagcgttgttagatgttcatgaaatgtgaccacctctcaatcacctttgagggctaaagagtagcacatcaaaaggactccaaaatcccatacccaactcttaagagatttgtcctggtacttcagaaagaattttcatgagtgttcttaattggctggaaaagcaccagctgacgttttggaagaatctatccatgtgtctgcctccatatgcatctgggcatttcatcttcagtcccctcattagactgtagcattaggatgtgtggagagaggagaaatgatttagcacccagattcacactcctatgcctggaagggggacatctttgaagaagaggaattagggctgtggacactgtcttgaggatgtggacttccttagtgagctccacattacttgatggtaaccacttcaaaaggatcagaatccacgtaatgaaaaaggtccctctagaggatggagctgatgtgaagctgccaatggatgaaaagcctcagaaagcaactcaaaggactcaagaagatcttggacagcgtgggtatcgaggcggacgacgaccggctcaacaaggttatcagtgagctgaatggaaaaaacattgaagacgtcattgcccagggtattggcaagcttgccagtgtacctgctggtgggctgtagccgtctctgctgccccaggctctcgagcccctgctgctggttctgcccctgctgcagcagaggagaagaaagatgagaagaaggaggagtctgaagagtcagatgatgacatgggatttggcctttttgattaaattcctgctcccctgcaaataaagcctttttacacatca

SEQ ID NO: 438128 - DNA, 6574 bp, Homo sapiens
gtacacgcgcttcaacttcggttggtgtgtgtcgaagaaacctgactgcgccctgaggagaacagcggagaaggtccaccgagcctggcgaaaggtccgctgagcgggctgtcgtccggagccactccgggctgcggagcacccagtggagaccgcgcctggctcaggtgtgggaccccatccttcctgtcttcgcagaggagtcctcgcgtgaaataagcgggttttgaaaacaaaaaaaagaaggagtggaagagggggccaggatccaggcctccatccccacagaagtgaagctacagctgggaggtctcctcccaccccaaccgtcaccctgggtcccgactgcccacctcctcctcctccccctccccccaacaacaacaacaacaacaactccaagcacaccggccataagagtgcgtgtgtccccaacatgaccgaacgaagaagggacgagctctctgaagagatcaacaacttaagagagaaggtcatgaagcagtcggaggagaacaacaacctgcagagccaggtgcagaagctcacagaggagaacaccacccttcgagagcaagtggaacccacccctgaggatgaggatgatgacatcgagctccgcggtgctgcagcagctgctgccccaccccctccaatagaggaagagtgcccagaagacctcccagagaagttcgatggcaacccagacatgctggctcctttcatggcccagtgccagatcttcatggaaaagagcaccagggatttctcagttgatcgtgtccgtgtctgcttcgtgacaagcatgatgaccggccgtgctgcccgttgggcctcagcaaagctggagcgctcccactacctgatgcacaactacccagctttcatgatggaaatgaagcatgtctttgaagaccctcagaggcgagaggttgccaaacgcaagatcagacgcctgcgccaaggcatggggtctgtcatcgactactccaatgctttccagatgattgcccaggacctggattggaacgagcctgcgctgattgaccagtaccacgagggcctcagcgaccacattcaggaggagctctcccacctcgaggtcgccaagtcgctgtctgctctgattgggcagtgcattcacattgagagaaggctggccagggctgctgcagctcgcaagccacgctcgccaccccgggcgctggtgttgcctcacattgcaagccaccaccaggtagatccaaccgagccggtgggaggtgcccgcatgcgcctgacgcaggaagaaaaagaaagacgcagaaagctgaacctgtgcctctactgtggaacaggaggtcactacgctgacaattgtcctgccaaggcctcaaagtcttcgccggcgggaaactccccggccccgctgtagagggaccttcagcgaccgggccagaaataataaggtccccacaagatgatgcctcatctccacacttgcaagtgatgctccagattcatcttccgggcagacacaccctgttcgtccgagccatgatcgattctggtgcttctggcaacttcattgatcacgaatatgttgctcaaaatggaattcctctaagaatcaaggactggccaatacttgtggaagcaattgatgggcgccccatagcatcgggcccagttgtccacgaaactcacgacctgatagttgacctgggagatcaccgagaggtgctgtcatttgatgtgactcagtctccattcttccctgtcgtcctaggggttcgctggctgagcacacatgatcccaatatcacatggagcactcgatctatcgtctttgattctgaatactgccgctaccactgccggatgtattctccaataccaccatcgctcccaccaccagcaccacaaccgccactctattatccagtagatggatacagagtttaccaaccagtgaggtattactatgtccagaatgtgtacactccagtagatgagcacgtctacccagatcaccgcctggttgaccctcacatagaaatgatacctggagcacacagtattcccagtggacatgtgtattcactgtccgaacctgaaatggcagctcttcgagattttgtggcaagaaatgtaaaagatgggctaattactccaacgattgcacctaatggagcccaagttctccaggtgaagagggggtggaaactgcaagtttcttatgattgccgagctccaaacaattttactatccagaatcagtatcctcgcctatctattccaaatttagaagaccaagcacacctggcaacgtacactgaattcgtacctcaaatacctggataccaaacataccccacatatgccgcgtacccgacctacccagtaggattcgcctggtacccagtgggacgagacggacaaggaagatcactatatgtacctgtgatgatcacttggaatccacactggtaccgccagcctccggtaccacagtacccgccgccacagccgccgcctccaccaccaccaccgccgccgcctccatcttacagtaccctgtaaatacctgtcatgtccttcaggatctctgccctcaaaatttattcctgttcagcttctcaatcagtgactgtgtgctaaattttaggctactgtatcttcaggccacctgaggcacatcctctctgaaacggctatggaaggttagggccactctggactggcacacatcctaaagcaccaaaagaccttcaacattttctgagagcaacagagtatttgccaataaatgatctctcatttttccaccttgactgccaatctaactaaaataattaataagtttactttccagccagtcctggaagtctgggttttacctgccaaaacctccatcaccatctaaattataggctgccaaatttgctgtttaacatttacagagaagctgatacaaacgcaggaaatgctgatttctttatggagggggagacgaggaggaggaggacatgacttttcttgcggtttcggtaccctctttttaaatcactggaggactgaggccttattaaggaagccaaaattatcggtgcagtgtggaaaggcttccgtgatcctctcgctgcacccttagaaacttcaccgtcttcaaactccatttccatggttctgttaattctcaaggagcagcaactcgactggttctcccaggagcaggaaaaacccttgtgacatgaaacatctcaggcctgaaaagaaagtgctctctcagatggactcttgcatgttaagactatgtcttcacatcatggtgcaaatcacatgtacccaatgactccggctttgacacaacaccttaccatcatcatgccatgatggcttccacaaagcattaaacctggtaaccagagattactggtggctccagcgttgttagatgttcatgaaatgtgaccacctctcaatcacctttgagggctaaagagtagcacatcaaaaggactccaaaatcccatacccaactcttaagagatttgtcctggtacttcagaaagaattttcatgagtgttcttaattggctggaaaagcaccagctgacgttttggaagaatctatccatgtgtctgcctccatatgcatctgggcatttcatcttcagtcccctcattagactgtagcattaggatgtgtggagagaggagaaatgatttagcacccagattcacactcctatgcctggaagggggacatctttgaagaagaggaattagggctgtggacactgtcttgaggatgtggacttccttagtgagctccacattacttgatggtaaccacttcaaaaggatcagaatccacgtaatgaaaaaggtccctctagaggatggagctgatgtgaagctgccaatggatgaaaagcctcagaaagcaactcaaaggactcaaagcaacggacaacacaagagttgtcttcagcccagtgacacctctgatgtcccctggaagctttgtgctaacctgggactgcctgacttcctttagcctggtcccttgctactaccttgaactgttttatctaacctctctttttctgtttaattctttgctactgccattgaccctgctgcaggatttgtgtcattttcctgcctggttgctgagactccattttgctgccacacacagagatgtaagaggcaggctttaattgccaaagcacagtttgagcagtagaaaacaacatggtgtatatctcaaattgcctgacatgaagaggagtctaacggtgaagtttcacttttcatcagcatcatctttcacatgttcattatcatccgctcttattcttgcatgtttaaacacttaaaatttttagtataatttttagtgtgttttgaagtggtgactaggctttcaaaaacttccattgaattacaaagcactatccagttcttattgttaaactaagtaaaaatgataagtaacatagtgtaaaatattcctttactgtgaacttcttacaatgctgtgaatgagaggctcctcagaactggagcatttgtataataattcatcctgttcatcttcaattttaacatcatatataatttcaattctatcaattgggcctttaaaaatcatataaaaggatataaaatttgaaaagagaaacctaattggctatttaatccaaaacaactttttttttccttcaatggaatcagaaagcttgtcaatcactcatgtgttttagagtaattacttttaaaatggtgcatttgtgcttctgaactattttgaagagtcacttctgtttacctcaagtatcaattcatcctccatacatttgaattcaagttgttttttgtcaaatttacagttgtcaattgatcttcaagctgcagggtgcctagaaatgggccgttgtctgtagccctggcatgtgcacacggacatttgccaccactgcaagcaaaagtctggagaagttcaccaacgacaagaacgattagggaaaatatgctgctgtgggttaacaactcagaaagtccctgatccacatttggctgtttactaaagcttgtgattaactttttggcagtgtgtactatgctctattgctatatatgctatctataaatgtagatgttaaggataagtaattctaaatttattattctatagttttgaagtttggttaagtttcctttcactcaattgatttattttgttgttaatcaaatttatgttaattggatcctttaaattttttttggcattttccaacaaaaatggctttattcataagaaaggaaaaaaatcaatggaatttgatatctaaagaagttagaaagggagcaaaataaaaaacataaaggagatagatgaattagtaagcaaatcagtagtcgagtttttcaaactggcaaaattaattaattgacttttagcccaaatttacattgttaattaaatcaagaaggaagaagatctaagagctcccattgataggcaagcctagagagaactagctaaatttatcatgctaggatattgaaacacagaaagtttacatacatttatgaagggtcaatttagtttggacagtgaggtatttgtcttagtggaaaaaaggagaattagtctgatcaaatcgtgaagtaatacagtgaacttgcaggtgcacaaaataagagggccacatctatatggtgcagtctggaattctgtttaagtttgtaggtacctcttggacttctgaattgatccagttgtcatccaccacagacatctcacatcagatacagacagttccaagattgacaacagagaacaacctgctggaaagacctgggcagaaatggagagccctgcgggaaccatgctacattttcatctaaagagagaatgcacatctgatgagactgaaagttctttgttgttttagattgtagaatggtattgaattggtctgtggaaaattgcattgcttttatttctttgtgtaatcaagtttaagtaataggggatatataatcataagcattttagggtgggagggactattaagtaattttaagtgggtggggttatttagaatgttagaataatattatgtattagatatcgctataagtggacatgcgtacttacttgtaaccctttaccctataattgctatccttaaagatttcaaataaactcggagggaactgcagggagaccaacttatttagagcgaattggacatggataaaaaccccagtgggagaaagttcaaaggtgattagattaataatttaatagaggatgagtgacctctgataaattactgctagaatgaacttgtcaatgatggatggtaaattttcatggaagttataaaagtgataaataaaaacccttgcttttacccctgtcagtagccctcctcctaccactgaaccccattgcccctacccctccttctaactttattgctgtattctcttcactctatatttctctctatttgctaatattgcattgctgttacaataaaaattcaataaagatttagtggttaagtgcaaa

SEQ ID NO: 438129 - DNA, 7373 bp, Homo sapiens
aaaaaagtaaatgtctttaggtgggaaatgcatgcccatgttgctatagttgcagcccctccctcttttaatcccactctttttacacagatagtcacctttctattttctaattaataactttgttcatatcagctaaccattgttgaatactcactacataatttacctgcactatttaattaagtcctcataattagtttgaggtatactattattgggcttctttgaatgtcccattttatagcttttcctaggaggcatcaattattatttcttgaatgactgcataatgacaaaggaaactgacatacacatattgctgcttagtgccatttctgtcccatagagaattttctttggggatttaaattatggtcagaaaagtaatttaggcagtcctgtggtttttgtggtggtggttgtttgatttgataaccagttaccttctcggtggcagtggaatagggttgtgacagttggccagagtaccctcctgcccacagggctgatgaatacatgcattgtgattttaatactcccttcttgctttaatgagattctattagttgcagtattaactatttttggcctggcttctttaataacaaaagttattattttggctttaatttgcataattgattttgtatccatgtttgccttgaagtttcttgctgtgtttgaatacaaaactacttgtttagagggtttcaacattcttttatagtttataaaggtaagcatgctgttgataatgtattgttgaatcataatgaacaggtggcctttgaggaagacaaggtcatttgaacatcaaaaagtactttgctttttgttatatatggtgctgattactaactttctcttgagagtttattttctttgttcactaattattaatgtaagcacgtagagcaagggataatttaaataccaaatcctttgtgtctgcttttgctgctttgaatgtataagttggatttatacatacatttatctttatttacagaaataagcgggttttgaaaacaaaaaaaagaaggagtggaagagggggccaggatccaggcctccatccccacagaagtgaagctacagctgggaggtctcctcccaccccaaccgtcaccctgggtcccgactgcccacctcctcctcctccccctccccccaacaacaacaacaacaacaactccaagcacaccggccataagagtgcgtgtgtccccaacatgaccgaacgaagaagggacgagctctctgaagagatcaacaacttaagagagaaggtcatgaagcagtcggaggagaacaacaacctgcagagccaggtgcagaagctcacagaggagaacaccacccttcgagagcaagtggaacccacccctgaggatgaggatgatgacatcgagctccgcggtgctgcagcagctgctgccccaccccctccaatagaggaagagtgcccagaagacctcccagagaagttcgatggcaacccagacatgctggctcctttcatggcccagtgccagatcttcatggaaaagagcaccagggatttctcagttgatcgtgtccgtgtctgcttcgtgacaagcatgatgaccggccgtgctgcccgttgggcctcagcaaagctggagcgctcccactacctgatgcacaactacccagctttcatgatggaaatgaagcatgtctttgaagaccctcagaggcgagaggttgccaaacgcaagatcagacgcctgcgccaaggcatggggtctgtcatcgactactccaatgctttccagatgattgcccaggacctggattggaacgagcctgcgctgattgaccagtaccacgagggcctcagcgaccacattcaggaggagctctcccacctcgaggtcgccaagtcgctgtctgctctgattgggcagtgcattcacattgagagaaggctggccagggctgctgcagctcgcaagccacgctcgccaccccgggcgctggtgttgcctcacattgcaagccaccaccaggtagatccaaccgagccggtgggaggtgcccgcatgcgcctgacgcaggaagaaaaagaaagacgcagaaagctgaacctgtgcctctactgtggaacaggaggtcactacgctgacaattgtcctgccaaggcctcaaagtcttcgccggcgggaaactccccggccccgctgtagagggaccttcagcgaccgggccagaaataataaggtccccacaagatgatgcctcatctccacacttgcaagtgatgctccagattcatcttccgggcagacacaccctgttcgtccgagccatgatcgattctggtgcttctggcaacttcattgatcacgaatatgttgctcaaaatggaattcctctaagaatcaaggactggccaatacttgtggaagcaattgatgggcgccccatagcatcgggcccagttgtccacgaaactcacgacctgatagttgacctgggagatcaccgagaggtgctgtcatttgatgtgactcagtctccattcttccctgtcgtcctaggggttcgctggctgagcacacatgatcccaatatcacatggagcactcgatctatcgtctttgattctgaatactgccgctaccactgccggatgtattctccaataccaccatcgctcccaccaccagcaccacaaccgccactctattatccagtagatggatacagagtttaccaaccagtgaggtattactatgtccagaatgtgtacactccagtagatgagcacgtctacccagatcaccgcctggttgaccctcacatagaaatgatacctggagcacacagtattcccagtggacatgtgtattcactgtccgaacctgaaatggcagctcttcgagattttgtggcaagaaatgtaaaagatgggctaattactccaacgattgcacctaatggagcccaagttctccaggtgaagagggggtggaaactgcaagtttcttatgattgccgagctccaaacaattttactatccagaatcagtatcctcgcctatctattccaaatttagaagaccaagcacacctggcaacgtacactgaattcgtacctcaaatacctggataccaaacataccccacatatgccgcgtacccgacctacccagtaggattcgcctggtacccagtgggacgagacggacaaggaagatcactatatgtacctgtgatgatcacttggaatccacactggtaccgccagcctccggtaccacagtacccgccgccacagccgccgcctccaccaccaccaccgccgccgcctccatcttacagtaccctgtaaatacctgtcatgtccttcaggatctctgccctcaaaatttattcctgttcagcttctcaatcagtgactgtgtgctaaattttaggctactgtatcttcaggccacctgaggcacatcctctctgaaacggctatggaaggttagggccactctggactggcacacatcctaaagcaccaaaagaccttcaacattttctgagagcaacagagtatttgccaataaatgatctctcatttttccaccttgactgccaatctaactaaaataattaataagtttactttccagccagtcctggaagtctgggttttacctgccaaaacctccatcaccatctaaattataggctgccaaatttgctgtttaacatttacagagaagctgatacaaacgcaggaaatgctgatttctttatggagggggagacgaggaggaggaggacatgacttttcttgcggtttcggtaccctctttttaaatcactggaggactgaggccttattaaggaagccaaaattatcggtgcagtgtggaaaggcttccgtgatcctctcgctgcacccttagaaacttcaccgtcttcaaactccatttccatggttctgttaattctcaaggagcagcaactcgactggttctcccaggagcaggaaaaacccttgtgacatgaaacatctcaggcctgaaaagaaagtgctctctcagatggactcttgcatgttaagactatgtcttcacatcatggtgcaaatcacatgtacccaatgactccggctttgacacaacaccttaccatcatcatgccatgatggcttccacaaagcattaaacctggtaaccagagattactggtggctccagcgttgttagatgttcatgaaatgtgaccacctctcaatcacctttgagggctaaagagtagcacatcaaaaggactccaaaatcccatacccaactcttaagagatttgtcctggtacttcagaaagaattttcatgagtgttcttaattggctggaaaagcaccagctgacgttttggaagaatctatccatgtgtctgcctccatatgcatctgggcatttcatcttcagtcccctcattagactgtagcattaggatgtgtggagagaggagaaatgatttagcacccagattcacactcctatgcctggaagggggacatctttgaagaagaggaattagggctgtggacactgtcttgaggatgtggacttccttagtgagctccacattacttgatggtaaccacttcaaaaggatcagaatccacgtaatgaaaaaggtccctctagaggatggagctgatgtgaagctgccaatggatgaaaagcctcagaaagcaactcaaaggactcaaagcaacggacaacacaagagttgtcttcagcccagtgacacctctgatgtcccctggaagctttgtgctaacctgggactgcctgacttcctttagcctggtcccttgctactaccttgaactgttttatctaacctctctttttctgtttaattctttgctactgccattgaccctgctgcaggatttgtgtcattttcctgcctggttgctgagactccattttgctgccacacacagagatgtaagaggcaggctttaattgccaaagcacagtttgagcagtagaaaacaacatggtgtatatctcaaattgcctgacatgaagaggagtctaacggtgaagtttcacttttcatcagcatcatctttcacatgttcattatcatccgctcttattcttgcatgtttaaacacttaaaatttttagtataatttttagtgtgttttgaagtggtgactaggctttcaaaaacttccattgaattacaaagcactatccagttcttattgttaaactaagtaaaaatgataagtaacatagtgtaaaatattcctttactgtgaacttcttacaatgctgtgaatgagaggctcctcagaactggagcatttgtataataattcatcctgttcatcttcaattttaacatcatatataatttcaattctatcaattgggcctttaaaaatcatataaaaggatataaaatttgaaaagagaaacctaattggctatttaatccaaaacaactttttttttccttcaatggaatcagaaagcttgtcaatcactcatgtgttttagagtaattacttttaaaatggtgcatttgtgcttctgaactattttgaagagtcacttctgtttacctcaagtatcaattcatcctccatacatttgaattcaagttgttttttgtcaaatttacagttgtcaattgatcttcaagctgcagggtgcctagaaatgggccgttgtctgtagccctggcatgtgcacacggacatttgccaccactgcaagcaaaagtctggagaagttcaccaacgacaagaacgattagggaaaatatgctgctgtgggttaacaactcagaaagtccctgatccacatttggctgtttactaaagcttgtgattaactttttggcagtgtgtactatgctctattgctatatatgctatctataaatgtagatgttaaggataagtaattctaaatttattattctatagttttgaagtttggttaagtttcctttcactcaattgatttattttgttgttaatcaaatttatgttaattggatcctttaaattttttttggcattttccaacaaaaatggctttattcataagaaaggaaaaaaatcaatggaatttgatatctaaagaagttagaaagggagcaaaataaaaaacataaaggagatagatgaattagtaagcaaatcagtagtcgagtttttcaaactggcaaaattaattaattgacttttagcccaaatttacattgttaattaaatcaagaaggaagaagatctaagagctcccattgataggcaagcctagagagaactagctaaatttatcatgctaggatattgaaacacagaaagtttacatacatttatgaagggtcaatttagtttggacagtgaggtatttgtcttagtggaaaaaaggagaattagtctgatcaaatcgtgaagtaatacagtgaacttgcaggtgcacaaaataagagggccacatctatatggtgcagtctggaattctgtttaagtttgtaggtacctcttggacttctgaattgatccagttgtcatccaccacagacatctcacatcagatacagacagttccaagattgacaacagagaacaacctgctggaaagacctgggcagaaatggagagccctgcgggaaccatgctacattttcatctaaagagagaatgcacatctgatgagactgaaagttctttgttgttttagattgtagaatggtattgaattggtctgtggaaaattgcattgcttttatttctttgtgtaatcaagtttaagtaataggggatatataatcataagcattttagggtgggagggactattaagtaattttaagtgggtggggttatttagaatgttagaataatattatgtattagatatcgctataagtggacatgcgtacttacttgtaaccctttaccctataattgctatccttaaagatttcaaataaactcggagggaactgcagggagaccaacttatttagagcgaattggacatggataaaaaccccagtgggagaaagttcaaaggtgattagattaataatttaatagaggatgagtgacctctgataaattactgctagaatgaacttgtcaatgatggatggtaaattttcatggaagttataaaagtgataaataaaaacccttgcttttacccctgtcagtagccctcctcctaccactgaaccccattgcccctacccctccttctaactttattgctgtattctcttcactctatatttctctctatttgctaatattgcattgctgttacaataaaaattcaataaagatttagtggttaagtgcaaa

SEQ ID NO: 438130 - DNA, 6159 bp, Homo sapiens
atgaagatgttactcctgctgcattgccttggggtgtttctgtcctgttctggacacatccaggatgagcacccccaatatcacagccctccggatgtggtgattcctgtgaggataactggcaccaccagaggcatgacacctccaggctggctctcctatatcctgccctttggaggccagaaacacattatccacataaaggtcaagaagcttttgttttccaaacacctccctgtgttcacctacacagaccagggtgctatccttgaggaccagccatttgtccagaataactgctactatcatggttatgtggaaggggacccagaatccctggtttccctcagtacctgttttgggggttttcaaggaatattacagataaatgactttgcttatgaaatcaagcccctagcattttctaccacgtttgaacatctggtatacaagatggacagtgaggagaaacaattttcaaccatgagatccggatttatgcaaaatgaaataacatgccgaatggaatttgaagaaattgataattccactcagaagcaaagttcttatgtgggctggtggatccattttaggattgttgaaattgtagtcgtcattgataattatctgtacattcgttatgaaaggaacgactcaaagttgctggaggatctatatgttattgttaatatagtggattccattttggatgtcattggtgttaaggtgttattatttggtttggagatctggaccaataaaaacctcattgtagtagatgatgtaaggaaatctgtgcacctgtattgcaagtggaagtcggagaacattacgccccggatgcaacatgacacctcacatcttttcacaactctaggattaagagggttaagtggcataggagcttttagaggaatgtgtacaccacaccgtagttgtgcaattgttactttcatgaacaaaactttgggcactttttcaattgcagtggctcatcatctaggtcataatttgggcatgaaccatgatgaggatacatgtcgttgttcacaacctagatgcataatgcatgaaggcaacccaccaataactaaatttagcaattgtagttatggtgatttttgggaatatactgtagagaggacaaagtgtttgcttgaaacagtacacacaaaggacatctttaatgtgaagcgctgtgggaatggtgttgttgaagaaggagaagagtgtgactgtggacctttaaagcattgtgcaaaagatccctgctgtctgtcaaattgcactctgactgatggttctacttgtgcttttgggctttgttgcaaagactgcaagttcctaccatcagggaaagtgtgtagaaaggaggtcaatgaatgtgatcttccagagtggtgcaatggtacttcccataagtgcccagatgacttttatgtggaagatggaattccctgtaaggagaggggctactgctatgaaaagagctgtcatgaccgcaatgaacagtgtaggaggatttttggtgcaggcgcaaatactgcaagtgagacttgctacaaagaattgaacaccttaggtgaccgtgttggtcactgtggtatcaaaaatgctacatatataaagtgtaatatctcagatgtccagtgtggaagaattcagtgtgagaatgtgacagaaattcccaatatgagtgatcatactactgtgcattgggctcgcttcaatgacataatgtgctggagtactgattaccatttggggatgaagggacctgatattggtgaagtgaaagatggaacagagtgtgggatagatcatatatgcatccacaggcactgtgtccatataaccatcttgaatagtaattgctcacctgcattttgtaacaagaggggcatctgcaacaataaacatcactgccattgcaattatctgtgggaccctcccaactgcctgataaaaggctatggaggtagtgttgacagtggtccaccccctaagagaaagaagaaaaagaagttctgttatctgtgtatattgttgcttattgttttgtttattttattatgttgtctttatcgactttgtaaaaaaagtaaaccaataaaaaagcagcaagatgttcaaactccatctgcaaaagaagaggaaaaaattcagcgtcgacctcatgagttacctccccagagtcaaccttgggtgatgccttcccagagtcaacctcctgtgacgccttcccagagtcatcctcaggtgatgccttcccagagtcaacctcctcaaaatttattcctgttcagcttctcaatcagtgactgtgtgctaaattttaggctactgtatcttcaggccacctgaggcacatcctctctgaaacggctatggaaggttagggccactctggactggcacacatcctaaagcaccaaaagaccttcaacattttctgagagcaacagagtatttgccaataaatgatctctcatttttccaccttgactgccaatctaactaaaataattaataagtttactttccagccagtcctggaagtctgggttttacctgccaaagagaagctgatacaaacgcaggaaatgctgatttctttatggagggggagacgaggaggaggaggacatgacttttcttgcggtttcggtaccctctttttaaatcactggaggactgaggccttattaaggaagccaaaattatcggtgcagtgtggaaaggcttccgtgatcctctcgctgcacccttagaaacttcaccgtcttcaaactccatttccatggttctgttaattctcaaggagcagcaactcgactggttctcccaggagcaggaaaaacccttgtgacatgaaacatctcaggcctgaaaagaaagtgctctctcagatggactcttgcatgttaagactatgtcttcacatcatggtgcaaatcacatgtacccaatgactccggctttgacacaacaccttaccatcatcatgccatgatggcttccacaaagcattaaacctggtaaccagagattactggtggctccagcgttgttagatgttcatgaaatgtgaccacctctcaatcacctttgagggctaaagagtagcacatcaaaaggactccaaaatcccatacccaactcttaagagatttgtcctggtacttcagaaagaattttcatgagtgttcttaattggctggaaaagcaccagctgacgttttggaagaatctatccatgtgtctgcctccatatgcatctgggcatttcatcttcagtcccctcattagactgtagcattaggatgtgtggagagaggagaaatgatttagcacccagattcacactcctatgcctggaagggggacatctttgaagaagaggaattagggctgtggacactgtcttgaggatgtggacttccttagtgagctccacattacttgatggtaaccacttcaaaaggatcagaatccacgtaatgaaaaaggtccctctagaggatggagctgatgtgaagctgccaatggatgaaaagcctcagaaagcaactcaaaggactcaaagcaacggacaacacaagagttgtcttcagcccagtgacacctctgatgtcccctggaagctttgtgctaacctgggactgcctgacttcctttagcctggtcccttgctactaccttgaactgttttatctaacctctctttttctgtttaattctttgctactgccattgaccctgctgcaggatttgtgtcattttcctgcctggttgctgagactccattttgctgccacacacagagatgtaagaggcaggctttaattgccaaagcacagtttgagcagtagaaaacaacatggtgtatatctcaaattgcctgacatgaagaggagtctaacggtgaagtttcacttttcatcagcatcatctttcacatgttcattatcatccgctcttattcttgcatgtttaaacacttaaaatttttagtataatttttagtgtgttttgaagtggtgactaggctttcaaaaacttccattgaattacaaagcactatccagttcttattgttaaactaagtaaaaatgataagtaacatagtgtaaaatattcctttactgtgaacttcttacaatgctgtgaatgagaggctcctcagaactggagcatttgtataataattcatcctgttcatcttcaattttaacatcatatataatttcaattctatcaattgggcctttaaaaatcatataaaaggatataaaatttgaaaagagaaacctaattggctatttaatccaaaacaactttttttttccttcaatggaatcagaaagcttgtcaatcactcatgtgttttagagtaattactttctcaagtatcaattcatcctccatacatttgaattcaagttgttttttgtcaaatttacagttgtcaattgatcttcaagctgcagggtgcctagaaatgggccgttgtctgtagccctggcatgtgcacacggacatttgccaccactgcaagcaaaagtctggagaagttcaccaacgacaagaacgattagggaaaatatgctgctgtgggttaacaactcagaaagtccctgatccacatttggctgtttactaaagcttgtgattaactttttggcagtgtgtactatgctctattgctatatatgctatctataaatgtagatgttaaggataagtaattctaaatttattattctatagttttgaagtttggttaagtttcctttcactcaattgatttattttgttgttaatcaaatttatgttaattggatcctttaaattttttttggcattttccaacaaaaatggctttattcataagaaaggaaaaaaatcaatggaatttgatatctaaagaagttagaaagggagcaaaataaaaaacataaaggagatagatgaattagtaagcaaatcagtagtcgagtttttcaaactggcaaaattaattaattgacttttagcccaaatttacattgttaattaaatcaagaaggaagaagatctaagagctcccattgataggcaagcctagagagaactagctaaatttatcatgctaggatattgaaacacagaaagtttacatacatttatgaagggtcaatttagtttggacagtgaggtatttgtcttagtggaaaaaaggagaattagtctgatcaaatcgtgaagtaatacagtgaacttgcaggtgcacaaaataagagggccacatctatatggtgcagtctggaattctgtttaagtttgtaggtacctcttggacttctgaattgatccagttgtcatccaccacagacatctcacatcagatacagacagttccaagattgacaacagagaacaacctgctggaaagacctgggcagaaatggagagccctgcgggaaccatgctacattttcatctaaagagagaatgcacatctgatgagactgaaagttctttgttgttttagattgtagaatggtattgaattggtctgtggaaaattgcattgcttttatttctttgtgtaatcaagtttaagtaataggggatatataatcataagcattttagggtgggagggactattaagtaattttaagtgggtggggttatttagaatgttagaataatattatgtattagatatcgctataagtggacatgcgtacttacttgtaaccctttaccctataattgctatccttaaagatttcaaataaactcggagggaactgcagggagaccaacttatttagagcgaattggacatggataaaaaccccagtgggagaaagttcaaaggtgattagattaataatttaatagaggatgagtgacctctgataaattactgctagaatgaacttgtcaatgatggatggtaaattttcatggaagttataaaagtgataaataaaaacccttgcttttacccctgtcagtagccctcctcctaccactgaaccccattgcccctacccctccttctaactttattgctgtattctcttcactctatatttctctctatttgctaatattgcattgctgttacaataaaaattcaataaagatttagtggttaagtgcaaa

SEQ ID NO: 438131 - DNA, 6396 bp, Homo sapiens
atgaagatgttactcctgctgcattgccttggggtgtttctgtcctgttctggacacatccaggatgagcacccccaatatcacagccctccggatgtggtgattcctgtgaggataactggcaccaccagaggcatgacacctccaggctggctctcctatatcctgccctttggaggccagaaacacattatccacataaaggtcaagaagcttttgttttccaaacacctccctgtgttcacctacacagaccagggtgctatccttgaggaccagccatttgtccagaataactgctactatcatggttatgtggaaggggacccagaatccctggtttccctcagtacctgttttgggggttttcaaggaatattacagataaatgactttgcttatgaaatcaagcccctagcattttctaccacgtttgaacatctggtatacaagatggacagtgaggagaaacaattttcaaccatgagatccggatttatgcaaaatgaaataacatgccgaatggaatttgaagaaattgataattccactcagaagcaaagttcttatgtgggctggtggatccattttaggattgttgaaattgtagtcgtcattgataattatctgtacattcgttatgaaaggaacgactcaaagttgctggaggatctatatgttattgttaatatagtggattccattttggatgtcattggtgttaaggtgttattatttggtttggagatctggaccaataaaaacctcattgtagtagatgatgtaaggaaatctgtgcacctgtattgcaagtggaagtcggagaacattacgccccggatgcaacatgacacctcacatcttttcacaactctaggattaagagggttaagtggcataggagcttttagaggaatgtgtacaccacaccgtagttgtgcaattgttactttcatgaacaaaactttgggcactttttcaattgcagtggctcatcatctaggtcataatttgggcatgaaccatgatgaggatacatgtcgttgttcacaacctagatgcataatgcatgaaggcaacccaccaataactaaatttagcaattgtagttatggtgatttttgggaatatactgtagagaggacaaagtgtttgcttgaaacagtacacacaaaggacatctttaatgtgaagcgctgtgggaatggtgttgttgaagaaggagaagagtgtgactgtggacctttaaagcattgtgcaaaagatccctgctgtctgtcaaattgcactctgactgatggttctacttgtgcttttgggctttgttgcaaagactgcaagttcctaccatcagggaaagtgtgtagaaaggaggtcaatgaatgtgatcttccagagtggtgcaatggtacttcccataagtgcccagatgacttttatgtggaagatggaattccctgtaaggagaggggctactgctatgaaaagagctgtcatgaccgcaatgaacagtgtaggaggatttttggtgcaggcgcaaatactgcaagtgagacttgctacaaagaattgaacaccttaggtgaccgtgttggtcactgtggtatcaaaaatgctacatatataaagtgtaatatctcagatgtccagtgtggaagaattcagtgtgagaatgtgacagaaattcccaatatgagtgatcatactactgtgcattgggctcgcttcaatgacataatgtgctggagtactgattaccatttggggatgaagggacctgatattggtgaagtgaaagatggaacagagtgtgggatagatcatatatgcatccacaggcactgtgtccatataaccatcttgaatagtaattgctcacctgcattttgtaacaagaggggcatctgcaacaataaacatcactgccattgcaattatctgtgggaccctcccaactgcctgataaaaggctatggaggtagtgttgacagtggtccaccccctaagagaaagaagaaaaagaagttctgttatctgtgtatattgttgcttattgttttgtttattttattatgttgtctttatcgactttgtaaaaaaagtaaaccaataaaaaagcagcaagatgttcaaactccatctgcaaaagaagaggaaaaaattcagcgtcgacctcatgagttacctccccagagtcaaccttgggtgatgccttcccagagtcaacctcctgtgacgccttcccagagtcatcctcaggtgatgccttcccagagtcaacctcctcaaaatttattcctgttcagcttctcaatcagtgactgtgtgctaaattttaggctactgtatcttcaggccacctgaggcacatcctctctgaaacggctatggaaggttagggccactctggactggcacacatcctaaagcaccaaaagaccttcaacattttctgagagcaacagagtatttgccaataaatgatctctcatttttccaccttgactgccaatctaactaaaataattaataagtttactttccagccagtcctggaagtctgggttttacctgccaaagagaagctgatacaaacgcaggaaatgctgatttctttatggagggggagacgaggaggaggaggacatgacttttcttgcggtttcggtaccctctttttaaatcactggaggactgaggccttattaaggaagccaaaattatcggtgcagtgtggaaaggcttccgtgatcctctcgctgcacccttagaaacttcaccgtcttcaaactccatttccatggttctgttaattctcaaggagcagcaactcgactggttctcccaggagcaggaaaaacccttgtgacatgaaacatctcaggcctgaaaagaaagtgctctctcagatggactcttgcatgttaagactatgtcttcacatcatggtgcaaatcacatgtacccaatgactccggctttgacacaacaccttaccatcatcatgccatgatggcttccacaaagcattaaacctggtaaccagagattactggtggctccagcgttgttagatgttcatgaaatgtgaccacctctcaatcacctttgagggctaaagagtagcacatcaaaaggactccaaaatcccatacccaactcttaagagatttgtcctggtacttcagaaagaattttcatgagtgttcttaattggctggaaaagcaccagctgacgttttggaagaatctatccatgtgtctgcctccatatgcatctgggcatttcatcttcagtcccctcattagactgtagcattaggatgtgtggagagaggagaaatgatttagcacccagattcacactcctatgcctggaagggggacatctttgaagaagaggaattagggctgtggacactgtcttgaggatgtggacttccttagtgagctccacattacttgatggtaaccacttcaaaaggatcagaatccacgtaatgaaaaaggtccctctagaggatggagctgatgtgaagctgccaatggatgaaaagcctcagaaagcaactcaaaggactcaaagcaacggacaacacaagagttgtcttcagcccagtgacacctctgatgtcccctggaagctttgtgctaacctgggactgcctgacttcctttagcctggtcccttgctactaccttgaactgttttatctaacctctctttttctgtttaattctttgctactgccattgaccctgctgcaggatttgtgtcattttcctgcctggttgctgagactccattttgctgccacacacagagatgtaagaggcaggctttaattgccaaagcacagtttgagcagtagaaaacaacatggtgtatatctcaaattgcctgacatgaagaggagtctaacggtgaagtttcacttttcatcagcatcatctttcacatgttcattatcatccgctcttattcttgcatgtttaaacacttaaaatttttagtataatttttagtgtgttttgaagtggtgactaggctttcaaaaacttccattgaattacaaagcactatccagttcttattgttaaactaagtaaaaatgataagtaacatagtgtaaaatattcctttactgtgaacttcttacaatgctgtgaatgagaggctcctcagaactggagcatttgtataataattcatcctgttcatcttcaattttaacatcatatataatttcaattctatcaattgggcctttaaaaatcatataaaaggatataaaatttgaaaagagaaacctaattggctatttaatccaaaacaactttttttttccttcaatggaatcagaaagcttgtcaatcactcatgtgttttagagtaattacttttaaaatggtgcatttgtgcttctgaactattttgaagagtcacttctgtttacctcaagtatcaattcatcctccatacatttgaattcaagttgttttttgtcaaatttacagttgtcaattgatcttcaagctgcagggtgcctagaaatgggccgttgtctgtagccctggcatgtgcacacggacatttgccaccactgcaagcaaaagtctggagaagttcaccaacgacaagaacgattagggaaaatatgctgctgtgggttaacaactcagaaagtccctgatccacatttggctgtttactaaagcttgtgattaactttttggcagtgtgtactatgctctattgctatatatgctatctataaatgtagatgttaaggataagtaattctaaatttattattctatagttttgaagtttggttaagtttcctttcactcaattgatttattttgttgttaatcaaatttatgttaattggatcctttaaattttttttggcattttccaacaaaaatggctttattcataagaaaggaaaaaaatcaatggaatttgatatctaaagaagttagaaagggagcaaaataaaaaacataaaggagatagatgaattagtaagcaaatcagtagtcgagtttttcaaactggcaaaattaattaattgacttttagcccaaatttacattgttaattaaatcaagaaggaagaagatctaagagctcccattgataggcaagcctagagagaactagctaaatttatcatgctaggatattgaaacacagaaagtttacatacatttatgaagggtcaatttagtttggacagtgaggtatttgtcttagtggaaaaaaggagaattagtctgatcaaatcgtgaagtaatacagtgaacttgcaggtgcacaaaataagagggccacatctatatggtgcagtctggaattctgtttaagtttgtaggtacctcttggacttctgaattgatccagttgtcatccaccacagacatctcacatcagatacagacagttccaagattgacaacagagaacaacctgctggaaagacctgggcagaaatggagagccctgcgggaaccatgctacattttcatctaaagagagaatgcacatctgatgagactgaaagttctttgttgttttagattgtagaatggtattgaattggtctgtggaaaattgcattgcttttatttctttgtgtaatcaagtttaagtaataggggatatataatcataagcattttagggtgggagggactattaagtaattttaagtgggtggggttatttagaatgttagaataatattatgtattagatatcgctataagtggacatgcgtacttacttgtaaccctttaccctataattgctatccttaaagatttcaaataaactcggagggaactgcagggagaccaacttatttagagcgaattggacatggataaaaaccccagtgggagaaagttcaaaggtgattagattaataatttaatagaggatgagtgacctctgataaattactgctagaatgaacttgtcaatgatggatggtaaattttcatggaagttataaaagtgataaataaaaacccttgcttttacccctgtcagtagccctcctcctaccactgaaccccattgcccctacccctccttctaactttattgctgtattctcttcactctatatttctctctatttgctaatattgcattgctgttacaataaaaattcaataaagatttagtggttaagtgcaaaaaaaagaagcaaacaaacaattgtgggcgcccaccccgagaaaatttttgaaacaatgttgtgggcggccaagattggacacgaggcaaggttcccggaaactggcgaagaggtgtgtctcacaaaaaaaacgggccacggttgaaaactagggtgggcaatggatacaagacgacttatacgg

SEQ ID NO: 438132 - DNA, 6342 bp, Homo sapiens
atgaagatgttactcctgctgcattgccttggggtgtttctgtcctgttctggacacatccaggatgagcacccccaatatcacagccctccggatgtggtgattcctgtgaggataactggcaccaccagaggcatgacacctccaggctggctctcctatatcctgccctttggaggccagaaacacattatccacataaaggtcaagaagcttttgttttccaaacacctccctgtgttcacctacacagaccagggtgctatccttgaggaccagccatttgtccagaataactgctactatcatggttatgtggaaggggacccagaatccctggtttccctcagtacctgttttgggggttttcaaggaatattacagataaatgactttgcttatgaaatcaagcccctagcattttctaccacgtttgaacatctggtatacaagatggacagtgaggagaaacaattttcaaccatgagatccggatttatgcaaaatgaaataacatgccgaatggaatttgaagaaattgataattccactcagaagcaaagttcttatgtgggctggtggatccattttaggattgttgaaattgtagtcgtcattgataattatctgtacattcgttatgaaaggaacgactcaaagttgctggaggatctatatgttattgttaatatagtggattccattttggatgtcattggtgttaaggtgttattatttggtttggagatctggaccaataaaaacctcattgtagtagatgatgtaaggaaatctgtgcacctgtattgcaagtggaagtcggagaacattacgccccggatgcaacatgacacctcacatcttttcacaactctaggattaagagggttaagtggcataggagcttttagaggaatgtgtacaccacaccgtagttgtgcaattgttactttcatgaacaaaactttgggcactttttcaattgcagtggctcatcatctaggtcataatttgggcatgaaccatgatgaggatacatgtcgttgttcacaacctagatgcataatgcatgaaggcaacccaccaataactaaatttagcaattgtagttatggtgatttttgggaatatactgtagagaggacaaagtgtttgcttgaaacagtacacacaaaggacatctttaatgtgaagcgctgtgggaatggtgttgttgaagaaggagaagagtgtgactgtggacctttaaagcattgtgcaaaagatccctgctgtctgtcaaattgcactctgactgatggttctacttgtgcttttgggctttgttgcaaagactgcaagttcctaccatcagggaaagtgtgtagaaaggaggtcaatgaatgtgatcttccagagtggtgcaatggtacttcccataagtgcccagatgacttttatgtggaagatggaattccctgtaaggagaggggctactgctatgaaaagagctgtcatgaccgcaatgaacagtgtaggaggatttttggtgcaggcgcaaatactgcaagtgagacttgctacaaagaattgaacaccttaggtgaccgtgttggtcactgtggtatcaaaaatgctacatatataaagtgtaatatctcagatgtccagtgtggaagaattcagtgtgagaatgtgacagaaattcccaatatgagtgatcatactactgtgcattgggctcgcttcaatgacataatgtgctggagtactgattaccatttggggatgaagggacctgatattggtgaagtgaaagatggaacagagtgtgggatagatcatatatgcatccacaggcactgtgtccatataaccatcttgaatagtaattgctcacctgcattttgtaacaagaggggcatctgcaacaataaacatcactgccattgcaattatctgtgggaccctcccaactgcctgataaaaggctatggaggtagtgttgacagtggtccaccccctaagagaaagaagaaaaagaagttctgttatctgtgtatattgttgcttattgttttgtttattttattatgttgtctttatcgactttgtaaaaaaagtaaaccaataaaaaagcagcaagatgttcaaactccatctgcaaaagaagaggaaaaaattcagcgtcgacctcatgagttacctccccagagtcaaccttgggtgatgccttcccagagtcaacctcctgtgacgccttcccagagtcatcctcaggtgatgccttcccagagtcaacctcctcaaaatttattcctgttcagcttctcaatcagtgactgtgtgctaaattttaggctactgtatcttcaggccacctgaggcacatcctctctgaaacggctatggaaggttagggccactctggactggcacacatcctaaagcaccaaaagaccttcaacattttctgagagcaacagagtatttgccaataaatgatctctcatttttccaccttgactgccaatctaactaaaataattaataagtttactttccagccagtcctggaagtctgggttttacctgccaaagagaagctgatacaaacgcaggaaatgctgatttctttatggagggggagacgaggaggaggaggacatgacttttcttgcggtttcggtaccctctttttaaatcactggaggactgaggccttattaaggaagccaaaattatcggtgcagtgtggaaaggcttccgtgatcctctcgctgcacccttagaaacttcaccgtcttcaaactccatttccatggttctgttaattctcaaggagcagcaactcgactggttctcccaggagcaggaaaaacccttgtgacatgaaacatctcaggcctgaaaagaaagtgctctctcagatggactcttgcatgttaagactatgtcttcacatcatggtgcaaatcacatgtacccaatgactccggctttgacacaacaccttaccatcatcatgccatgatggcttccacaaagcattaaacctggtaaccagagattactggtggctccagcgttgttagatgttcatgaaatgtgaccacctctcaatcacctttgagggctaaagagtagcacatcaaaaggactccaaaatcccatacccaactcttaagagatttgtcctggtacttcagaaagaattttcatgagtgttcttaattggctggaaaagcaccagctgacgttttggaagaatctatccatgtgtctgcctccatatgcatctgggcatttcatcttcagtcccctcattagactgtagcattaggatgtgtggagagaggagaaatgatttagcacccagattcacactcctatgcctggaagggggacatctttgaagaagaggaattagggctgtggacactgtcttgaggatgtggacttccttagtgagctccacattacttgatggtaaccacttcaaaaggatcagaatccacgtaatgaaaaaggtccctctagaggatggagctgatgtgaagctgccaatggatgaaaagcctcagaaagcaactcaaaggactcaaagcaacggacaacacaagagttgtcttcagcccagtgacacctctgatgtcccctggaagctttgtgctaacctgggactgcctgacttcctttagcctggtcccttgctactaccttgaactgttttatctaacctctctttttctgtttaattctttgctactgccattgaccctgctgcaggatttgtgtcattttcctgcctggttgctgagactccattttgctgccacacacagagatgtaagaggcaggctttaattgccaaagcacagtttgagcagtagaaaacaacatggtgtatatctcaaattgcctgacatgaagaggagtctaacggtgaagtttcacttttcatcagcatcatctttcacatgttcattatcatccgctcttattcttgcatgtttaaacacttaaaatttttagtataatttttagtgtgttttgaagtggtgactaggctttcaaaaacttccattgaattacaaagcactatccagttcttattgttaaactaagtaaaaatgataagtaacatagtgtaaaatattcctttactgtgaacttcttacaatgctgtgaatgagaggctcctcagaactggagcatttgtataataattcatcctgttcatcttcaattttaacatcatatataatttcaattctatcaattgggcctttaaaaatcatataaaaggatataaaatttgaaaagagaaacctaattggctatttaatccaaaacaactttttttttccttcaatggaatcagaaagcttgtcaatcactcatgtgttttagagtaattacttttaaaatggtgcatttgtgcttctgaactattttgaagagtcacttctgtttacctcaagtatcaattcatcctccatacatttgaattcaagttgttttttgtcaaatttacagttgtcaattgatcttcaagctgcagggtgcctagaaatgggccgttgtctgtagccctggcatgtgcacacggacatttgccaccactgcaagcaaaagtctggagaagttcaccaacgacaagaacgattagggaaaatatgctgctgtgggttaacaactcagaaagtccctgatccacatttggctgtttactaaagcttgtgattaactttttggcagtgtgtactatgctctattgctatatatgctatctataaatgtagatgttaaggataagtaattctaaatttattattctatagttttgaagtttggttaagtttcctttcactcaattgatttattttgttgttaatcaaatttatgttaattggatcctttaaattttttttggcattttccaacaaaaatggctttattcataagaaaggaaaaaaatcaatggaatttgatatctaaagaagttagaaagggagcaaaataaaaaacataaaggagatagatgaattagtaagcaaatcagtagtcgagtttttcaaactggcaaaattaattaattgacttttagcccaaatttacattgttaattaaatcaagaaggaagaagatctaagagctcccattgataggcaagcctagagagaactagctaaatttatcatgctaggatattgaaacacagaaagtttacatacatttatgaagggtcaatttagtttggacagtgaggtatttgtcttagtggaaaaaaggagaattagtctgatcaaatcgtgaagtaatacagtgaacttgcaggtgcacaaaataagagggccacatctatatggtgcagtctggaattctgtttaagtttgtaggtacctcttggacttctgaattgatccagttgtcatccaccacagacatctcacatcagatacagacagttccaagattgacaacagagaacaacctgctggaaagacctgggcagaaatggagagccctgcgggaaccatgctacattttcatctaaagagagaatgcacatctgatgagactgaaagttctttgttgttttagattgtagaatggtattgaattggtctgtggaaaattgcattgcttttatttctttgtgtaatcaagtttaagtaataggggatatataatcataagcattttagggtgggagggactattaagtaattttaagtgggtggggttatttagaatgttagaataatattatgtattagatatcgctataagtggacatgcgtacttacttgtaaccctttaccctataattgctatccttaaagatttcaaataaactcggagggaactgcagggagaccaacttatttagagcgaattggacatggataaaaaccccagtgggagaaagttcaaaggtgattagattaataatttaatagaggatgagtgacctctgataaattactgctagaatgaacttgtcaatgatggatggtaaattttcatggaagttataaaagtgataaatatgcccctacccctccttctaactttattgctgtattctcttcactctatatttctctctatttgctaatattgcattgctgttacaataaaaattcaataaagatttagtggttaagtgcaaaaaaaagaagcaaacaaacaattgtgggcgcccaccccgagaaaatttttgaaacaatgttgtgggcggccaagattggacacgaggcaaggttcccggaaactggcgaagaggtgtgtctcacaaaaaaaacgggccacggttgaaaactagggtgggcaatggatacaagacgacttatacgg

SEQ ID NO: 438133 - DNA, 2917 bp, Homo sapiens
gtacacgcgcttcaacttcggttggtgtgtgtcgaagaaacctgactgcgccctgaggagaacagcggagaaggtccaccgagcctggcgaaaggtccgctgagcgggctgtcgtccggagccactccgggctgcggagcacccagtggagaccgcgcctggctcaggtgtgggaccccatccttcctgtcttcgcagaggagtcctcgcgtgaaataagcgggttttgaaaacaaaaaaaagaaggagtggaagagggggccaggatccaggcctccatccccacagaagtgaagctacagctgggaggtctcctcccaccccaaccgtcaccctgggtcccgactgcccacctcctcctcctccccctccccccaacaacaacaacaacaacaactccaagcacaccggccataagagtgcgtgtgtccccaacatgaccgaacgaagaagggacgagctctctgaagagatcaacaacttaagagagaaggtcatgaagcagtcggaggagaacaacaacctgcagagccaggtgcagaagctcacagaggagaacaccacccttcgagagcaagtggaacccacccctgaggatgaggatgatgacatcgagctccgcggtgctgcagcagctgctgccccaccccctccaatagaggaagagtgcccagaagacctcccagagaagttcgatggcaacccagacatgctggctcctttcatggcccagtgccagatcttcatggaaaagagcaccagggatttctcagttgatcgtgtccgtgtctgcttcgtgacaagcatgatgaccggccgtgctgcccgttgggcctcagcaaagctggagcgctcccactacctgatgcacaactacccagctttcatgatggaaatgaagcatgtctttgaagaccctcagaggcgagaggttgccaaacgcaagatcagacgcctgcgccaaggcatggggtctgtcatcgactactccaatgctttccagatgattgcccaggacctggattggaacgagcctgcgctgattgaccagtaccacgagggcctcagcgaccacattcaggaggagctctcccacctcgaggtcgccaagtcgctgtctgctctgattgggcagtgcattcacattgagagaaggctggccagggctgctgcagctcgcaagccacgctcgccaccccgggcgctggtgttgcctcacattgcaagccaccaccaggtagatccaaccgagccggtgggaggtgcccgcatgcgcctgacgcaggaagaaaaagaaagacgcagaaagctgaacctgtgcctctactgtggaacaggaggtcactacgctgacaattgtcctgccaaggcctcaaagtcttcgccggcgggaaactccccggccccgctgtagagggaccttcagcgaccgggccagaaataataaggtccccacaagatgatgcctcatctccacacttgcaagtgatgctccagattcatcttccgggcagacacaccctgttcgtccgagccatgatcgattctggtgcttctggcaacttcattgatcacgaatatgttgctcaaaatggaattcctctaagaatcaaggactggccaatacttgtggaagcaattgatgggcgccccatagcatcgggcccagttgtccacgaaactcacgacctgatagttgacctgggagatcaccgagaggtgctgtcatttgatgtgactcagtctccattcttccctgtcgtcctaggggttcgctggctgagcacacatgatcccaatatcacatggagcactcgatctatcgtctttgattctgaatactgccgctaccactgccggatgtattctccaataccaccatcgctcccaccaccagcaccacaaccgccactctattatccagtagatggatacagagtttaccaaccagtgaggtatttgtcttagtggaaaaaaggagaattagtctgatcaaatcgtgaagtaatacagtgaacttgcaggtgcacaaaataagagggccacatctatatggtgcagtctggaattctgtttaagtttgtaggtacctcttggacttctgaattgatccagttgtcatccaccacagacatctcacatcagatacagacagttccaagattgacaacagagaacaacctgctggaaagacctgggcagaaatggagagccctgcgggaaccatgctacattttcatctaaagagagaatgcacatctgatgagactgaaagttctttgttgttttagattgtagaatggtattgaattggtctgtggaaaattgcattgcttttatttctttgtgtaatcaagtttaagtaataggggatatataatcataagcattttagggtgggagggactattaagtaattttaagtgggtggggttatttagaatgttagaataatattatgtattagatatcgctataagtggacatgcgtacttacttgtaaccctttaccctataattgctatccttaaagatttcaaataaactcggagggaactgcagggagaccaacttatttagagcgaattggacatggataaaaaccccagtgggagaaagttcaaaggtgattagattaataatttaatagaggatgagtgacctctgataaattactgctagaatgaacttgtcaatgatggatggtaaattttcatggaagttataaaagtgataaataaaaacccttgcttttacccctgtcagtagccctcctcctaccactgaaccccattgcccctacccctccttctaactttattgctgtattctcttcactctatatttctctctatttgctaatattgcattgctgttacaataaaaattcaataaagatttagtggttaagtgcaaa

SEQ ID NO: 438134 - DNA, 3953 bp, Homo sapiens
  misc_feature (3888)..(3888): n is a, c, g, or t
  misc_feature (3941)..(3941): n is a, c, g, or t
atgaagatgttactcctgctgcattgccttggggtgtttctgtcctgttctggacacatccaggatgagcacccccaatatcacagccctccggatgtggtgattcctgtgaggataactggcaccaccagaggcatgacacctccaggctggctctcctatatcctgccctttggaggccagaaacacattatccacataaaggtcaagaagcttttgttttccaaacacctccctgtgttcacctacacagaccagggtgctatccttgaggaccagccatttgtccagaataactgctactatcatggttatgtggaaggggacccagaatccctggtttccctcagtacctgttttgggggttttcaaggaatattacagataaatgactttgcttatgaaatcaagcccctagcattttctaccacgtttgaacatctggtatacaagatggacagtgaggagaaacaattttcaaccatgagatccggatttatgcaaaatgaaataacatgccgaatggaatttgaagaaattgataattccactcagaagcaaagttcttatgtgggctggtggatccattttaggattgttgaaattgtagtcgtcattgataattatctgtacattcgttatgaaaggaacgactcaaagttgctggaggatctatatgttattgttaatatagtggattccattttggatgtcattggtgttaaggtgttattatttggtttggagatctggaccaataaaaacctcattgtagtagatgatgtaaggaaatctgtgcacctgtattgcaagtggaagtcggagaacattacgccccggatgcaacatgacacctcacatcttttcacaactctaggattaagagggttaagtggcataggagcttttagaggaatgtgtacaccacaccgtagttgtgcaattgttactttcatgaacaaaactttgggcactttttcaattgcagtggctcatcatctaggtcataatttgggcatgaaccatgatgaggatacatgtcgttgttcacaacctagatgcataatgcatgaaggcaacccaccaataactaaatttagcaattgtagttatggtgatttttgggaatatactgtagagaggacaaagtgtttgcttgaaacagtacacacaaaggacatctttaatgtgaagcgctgtgggaatggtgttgttgaagaaggagaagagtgtgactgtggacctttaaagcattgtgcaaaagatccctgctgtctgtcaaattgcactctgactgatggttctacttgtgcttttgggctttgttgcaaagactgcaagttcctaccatcagggaaagtgtgtagaaaggaggtcaatgaatgtgatcttccagagtggtgcaatggtacttcccataagtgcccagatgacttttatgtggaagatggaattccctgtaaggagaggggctactgctatgaaaagagctgtcatgaccgcaatgaacagtgtaggaggatttttggtgcaggcgcaaatactgcaagtgagacttgctacaaagaattgaacaccttaggtgaccgtgttggtcactgtggtatcaaaaatgctacatatataaagtgtaatatctcagatgtccagtgtggaagaattcagtgtgagaatgtgacagaaattcccaatatgagtgatcatactactgtgcattgggctcgcttcaatgacataatgtgctggagtactgattaccatttggggatgaagggacctgatattggtgaagtgaaagatggaacagagtgtgggatagatcatatatgcatccacaggcactgtgtccatataaccatcttgaatagtaattgctcacctgcattttgtaacaagaggggcatctgcaacaataaacatcactgccattgcaattatctgtgggaccctcccaactgcctgataaaaggctatggaggtagtgttgacagtggtccaccccctaagagaaagaagaaaaagaagttctgttatctgtgtatattgttgcttattgttttgtttattttattatgttgtctttatcgactttgtaaaaaaagtaaaccaataaaaaagcagcaagatgttcaaactccatctgcaaaagaagaggaaaaaattcagcgtcgacctcatgagttacctccccagagtcaaccttgggtgatgccttcccagagtcaacctcctgtgacgccttcccagagtcatcctcaggtgatgccttcccagagtcaacctcctcaaaatttattcctgttcagcttctcaatcagtgactgtgtgctaaattttaggctactgtatcttcaggccacctgaggcacatcctctctgaaacggctatggaaggttagggccactctggactggcacacatcctaaagcaccaaaagaccttcaacattttctgagagcaacagagtatttgccaataaatgatctctcatttttccaccttgactgccaatctaactaaaataattaataagtttactttccagccagtcctggaagtctgggttttacctgccaaagagaagctgatacaaacgcaggaaatgctgatttctttatggagggggagacgaggaggaggaggacatgacttttcttgcggtttcggtaccctctttttaaatcactggaggactgaggccttattaaggaagccaaaattatcggtgcagtgtggaaaggcttccgtgatcctctcgctgcacccttagaaacttcaccgtcttcaaactccatttccatggttctgttaattctcaaggagcagcaactcgactggttctcccaggagcaggaaaaacccttgtgacatgaaacatctcaggcctgaaaagaaagtgctctctcagatggactcttgcatgttaagactatgtcttcacatcatggtgcaaatcacatgtacccaatgactccggctttgacacaacaccttaccatcatcatgccatgatggcttccacaaagcattaaacctggtaaccagagattactggtggctccagcgttgttagatgttcatgaaatgtgaccacctctcaatcacctttgagggctaaagagtagcacatcaaaaggactccaaaatcccatacccaactcttaagagatttgtcctggtacttcagaaagaattttcatgagtgttcttaattggctggaaaagcaccagctgacgttttggaagaatctatccatgtgtctgcctccatatgcatctgggcatttcatcttcagtcccctcattagactgtagcattaggatgtgtggagagaggagaaatgatttagcacccagattcacactcctatgcctggaagggggacatctttgaagaagaggaattagggctgtggacactgtcttgaggatgtggacttccttagtgagctccacattacttgatggtaaccacttcaaaaggatcagaatccacgtaatgaaaaaggtccctctagaggatggagctgatgtgaagctgccaatggatgaaaagcctcagaaagcaactcaaaggactcaaagcaacggacaacacaagagttgtcttcagcccagtgacacctctgatgtcccctggaagctttgtgctaacctgggactgcctgacttcctttagcctggtcccttgctactaccttgaactgttttatctaacctctctttttctgtttaattctttgctactgccattgaccctgctgcaggatttgtgtcattttcctgcctggttgctgagactcctcttcatgtcaggcaatttgagatatacaccatgttgttttctactgctcaaactgtgctttggcaattaaagcctgcctctnacatctctgtgtgtggcagcaaaatggagtctcagcaaccagcaggaaaatancaggaccgagct

SEQ ID NO: 438135 - DNA, 2800 bp, Homo sapiens
ttttattagtatgtttcaaatgtgtattaccaatgtgggtgtaaatttttaaaaaatgattattgatagaagtttggcaggaaaattctttaagagctaacaagagaagagagtccagttttctggaaatatgtctttaagtattttagacattcctcgtcagtattaggaatttccatgggaaaagaggtttgcatgctggtaatgcaacctttgaaactttgtaaaggaaacatatatgtatatatttatgtatatgtaagtatgtgaatgtgcgcattttgcattccatatgaaaaaaatgccacgtctgtttaaattatttgatgtaggtttgggtttttgagatttgctggtgaagtcagtgacgaaaaataaaccttcccttatcttcctactctgcccctccccctaatgaaatcatattaagttgttttttttttttttggtaatatacagctttttttttaaggcatcattttcgagggtctaaaattatctggtaaaacaaatgaaattaagtgatccaaagctgctgaagtatgtttgaactctccagtgccctatagctgcaagagttgaattagtcatgcagtcatatggcagcaggttggtgattcagtccgaccttctttaggtaaccgagcatttatttaaccaactataccactgcattgggacgtctgcacttgagcttctacaatctgatataaatctgaatacaggattattctgtttgaaaactttgctatgtgtgaactgtaatacttgatatatttttggtttgaagactttgtctaagcctcattatactgaagttgaagaaaccaaatgagctccaccctcactttgcctgccctgatatggtcacttgttgagtcactggagttcctttcattttggcactgatgctgttttctcttgtctgatttgaaacagtactggtaataatatggttgttgaaaatgtgatcacctttatctaaagtgggagaagatacatacacagtatggcaaatggataaaatattgtggcatcaactacttttaaagtagaaaagctatccattttatacaatcactgatacagtctatgtcaaaaaaccaacagaccattattcctcttgaagttagtttgattttatctttgtatggttgtctacaatttgttttcctgtaaatgcagatagttaaaatctaaaggatagaatgctttcctaaaacagaacattagcctttaaggttaaatagactttacattgtatctaagttaatctttataaagcactagaatttttggtcaaaagtcaaaatagtattagaatattgaaattattgatagctttcataatctcagcttttttgaacttccacaatttttggaatatgtcataatttttttccctgtttcaaatgtgttcagaggaaatagaatgtaaaacatcacaaaaaaaattgcagtacataaaatttctggactatgttagttacttgatctggaagtttaaaatttggactaaaaggttttattgaaataaagcctcttaaaatgaaaaatcatatacttttaacatcacttttaagctaataaatataagaattcttttggaaattagaggtggaaacacactggaacctcatgataattgaccctctggatcaccagattagtttaatttaacagatatgtccaaggaagttgagctatagggagtaagaaaaagcatcatgataacgtctagtcaataacatggcacttcagcagagattcatagatgatggtatgcccatgcatcatttgctcttcaaatatctatgtgcttggagccacagtttcctaagcgcatagtttttggtcctgcctcatgtaaaatagttaatgattatcatttacttggaaagattttacctgtgaagtgaaattctttcattgggggtaagggtatgaggtgatcaggaagtttcttctggaattttatcaagtccttgtattctaaaatagccaagcaaaatgatagtaaattctttgtctttgttctttcagtcagaggtatttattaagtacctactgtgtgctcagcactaaaggtttgttgataaaatgacaattaaaaaatggcatttagccaaaggccttttcagccaggagtaagaaaagatggttagtgatatttggaaatacctggatatttgctagaggaaaaatgaaagcaaaacttcgtacacagtgccttgcccataataggtactcaataagcaattgttcctcatagagtcttttgccatgatttatggtgttttttgaaatttgtcttaattgaaaaaagaccaaatatttcaaatgagcttataggcagctgtggccagtgaaaatatggggttgtacagttagttcctagaatgttattttgcactagttgtcacttagaaagatggggttcctgtagattttttggtgctaagggatactttgtcattatgatgaagtaagtgttaagtgtcagataaatagcacacagaatagttctttctgctggtctgttttttctcttcgttgttgttgtttttaattgtaaattgttatcaatcaaactattgtagcagctacaaagtaattcaccagcatgacaaaatggtcaaaaaataagtcatcagcacttaagaaatgaaagcaacttttgaaattttctgttaaaattgtcaaatatattttatgaagaatttataaaaggggaaaatgattgtaatttattgttcatgacttttttttttaaataaagtgagtttcaacaaaaaaaaaa

SEQ ID NO: 438136 - DNA, 3254 bp, Homo sapiens
ttttattagtatgtttcaaatgtgtattaccaatgtgggtgtaaatttttaaaaaatgattattgatagaagtttggcaggaaaattctttaagagctaacaagagaagagagtccagttttctggaaatatgtctttaagtattttagacattcctcgtcagtattaggaatttccatgggaaaagaggtttgcatgctggtaatgcaacctttgaaactttgtaaaggaaacatatatgtatatatttatgtatatgtaagtatgtgaatgtgcgcattttgcattccatatgaaaaaaatgccacgtctgtttaaattatttgatgtaggtttgggtttttgagatttgctggtgaagtcagtgacgaaaaataaaccttcccttatcttcctactctgcccctccccctaatgaaatcatattaagttgttttttttttttttggtaatatacagctttttttttaaggcatcattttcgagggtctaaaattatctggtaaaacaaatgaaattaagtgatccaaagctgctgaagtatgtttgaactctccagtgccctatagctgcaagagttgaattagtcatgcagtcatatggcagcaggttggtgattcagtccgaccttctttaggtaaccgagcatttatttaaccaactataccactgcattgggacgtctgcacttgagcttctacaatctgatataaatctgaatacaggattattctgtttgaaaactttgctatgtgtgaactgtaatacttgatatatttttggtttgaagactttgtctaagcctcattatactgaagttgaagaaaccaaatgagctccaccctcactttgcctgccctgatatggtcacttgttgagtcactggagttcctttcattttggcactgatgctgttttctcttgtctgatttgaaacagtactggtaataatatggttgttgaaaatgtgatcacctttatctaaagtgggagaagatacatacacagtatggcaaatggataaaatattgtggcatcaactacttttaaagtagaaaagctatccattttatacaatcactgatacagtctatgtcaaaaaaccaacagaccattattcctcttgaagttagtttgattttatctttgtatggttgtctacaatttgttttcctgtaaatgcagatagttaaaatctaaaggatagaatgctttcctaaaacagaacattagcctttaaggttaaatagactttacattgtatctaagttaatctttataaagcactagaatttttggtcaaaagtcaaaatagtattagaatattgaaattattgatagctttcataatctcagcttttttgaacttccacaatttttggaatatgtcataatttttttccctgtttcaaatgtgttcagaggaaatagaatgtaaaacatcacaaaaaaaattgcagtacataaaatttctggactatgttagttacttgatctggaagtttaaaatttggactaaaaggttttattgaaataaagcctcttaaaatgaaaaatcatatacttttaacatcacttttaagctaataaatataagaattcttttggaaattagaggtggaaacacactggaacctcatgataattgaccctctggatcaccagattagtttaatttaacagatatgtccaaggaagttgagctatagggagtaagaaaaagcatcatgataacgtctagtcaataacatggcacttcagcagagattcatagatgatggtatgcccatgcatcatttgctcttcaaatatctatgtgcttggagccacagtttcctaagcgcatagtttttggtcctgcctcatgtaaaatagttaatgattatcatttacttggaaagattttacctgtgaagtgaaattctttcattgggggtaagggtatgaggtgatcaggaagtttcttctggaattttatcaagtccttgtattctaaaatagccaagcaaaatgatagtaaattctttgtctttgttctttcagtcagaggtatttattaagtacctactgtgtgctcagcactaaaggtttgttgataaaatgacaattaaaaaatggcatttagccaaaggccttttcagccaggagtaagaaaagatggttagtgatatttggaaatacctggatatttgctagaggaaaaatgaaagcaaaacttcgtacacagtgccttgcccataataggtactcaataagcaattgttcctcatagagtcttttgccatgatttatggtgttttttgaaatttgtcttaattgaaaaaagaccaaatatttcaaatgagcttataggcagctgtggccagtgaaaatatggggttgtacagttagttcctagaatgttattttgcactagttgtcacttagaaagatggggttcctgtagattttttggtgctaagggatactttgtcattatgatgaagtaagtgttaagtgtcagataaatagcacacagaatagttctttctgctggtctgttttttctcttcgttgttgttgtttttaattgtaaattgttatcaatcaaactattgtagcagctacaaagtaattcaccagcatgacaaaatggtcaaaaaataagtcatcagcacttaagaaatgaaagcaacttttgaaattttctgttaaaattgtcaaatatattttatgaagaatttataaaaggggaaaatgattgtaatttattgttcatgacttttttttttaaataaagtgagtttcaacaaaaaaaaaaaaaaaaaaaaaaaaaaaaaaaaaaaaaaaaaaaaaaaaaagaaaaaaaaagaaaacaaaaaaaaacaaaaaacagaaaaggatacaaaaaaaaaaagatatacaagaaaagacatagcaaagaagacagaaacacaagccatataggagaatagaacagataagaagggcgaccgagtccaatacaatgccaacctctgcgcaaaacaactccatccagtcatcgttgcatgaaatctgagtagggcaaggtagatggcgtgcaacacacgtccccaccacctcaaacgccgaaccaagcgaatacgcactccctataaggggttaaaaagacgccagttgacgtcgaactaacaaagaccaatcgatgcgtggatgaggaatacggcgaccagaaagactcatgtccgtgcgctaatcatagagttgagggcaaaagccacgcgtgggagcac

SEQ ID NO: 438137 - DNA, 2120 bp, Homo sapiens
aataatagcagtaattctgtaataaacatgtctctatgaatccattagtccatattttgtaaactctggctttgagaacctgtaatacttgatatatttttggtttgaagactttgtctaagcctcattatactgaagttgaagaaaccaaatgagctccaccctcactttgcctgccctgatatggtcacttgttgagtcactggagttcctttcattttggcactgatgctgttttctcttgtctgatttgaaacagtactggtaataatatggttgttgaaaatgtgatcacctttatctaaagtgggagaagatacatacacagtatggcaaatggataaaatattgtggcatcaactacttttaaagtagaaaagctatccattttatacaatcactgatacagtctatgtcaaaaaaccaacagaccattattcctcttgaagttagtttgattttatctttgtatggttgtctacaatttgttttcctgtaaatgcagatagttaaaatctaaaggatagaatgctttcctaaaacagaacattagcctttaaggttaaatagactttacattgtatctaagttaatctttataaagcactagaatttttggtcaaaagtcaaaatagtattagaatattgaaattattgatagctttcataatctcagcttttttgaacttccacaatttttggaatatgtcataatttttttccctgtttcaaatgtgttcagaggaaatagaatgtaaaacatcacaaaaaaaattgcagtacataaaatttctggactatgttagttacttgatctggaagtttaaaatttggactaaaaggttttattgaaataaagcctcttaaaatgaaaaatcatatacttttaacatcacttttaagctaataaatataagaattcttttggaaattagaggtggaaacacactggaacctcatgataattgaccctctggatcaccagattagtttaatttaacagatatgtccaaggaagttgagctatagggagtaagaaaaagcatcatgataacgtctagtcaataacatggcacttcagcagagattcatagatgatggtatgcccatgcatcatttgctcttcaaatatctatgtgcttggagccacagtttcctaagcgcatagtttttggtcctgcctcatgtaaaatagttaatgattatcatttacttggaaagattttacctgtgaagtgaaattctttcattgggggtaagggtatgaggtgatcaggaagtttcttctggaattttatcaagtccttgtattctaaaatagccaagcaaaatgatagtaaattctttgtctttgttctttcagtcagaggtatttattaagtacctactgtgtgctcagcactaaaggtttgttgataaaatgacaattaaaaaatggcatttagccaaaggccttttcagccaggagtaagaaaagatggttagtgatatttggaaatacctggatatttgctagaggaaaaatgaaagcaaaacttcgtacacagtgccttgcccataataggtactcaataagcaattgttcctcatagagtcttttgccatgatttatggtgttttttgaaatttgtcttaattgaaaaaagaccaaatatttcaaatgagcttataggcagctgtggccagtgaaaatatggggttgtacagttagttcctagaatgttattttgcactagttgtcacttagaaagatggggttcctgtagattttttggtgctaagggatactttgtcattatgatgaagtaagtgttaagtgtcagataaatagcacacagaatagttctttctgctggtctgttttttctcttcgttgttgttgtttttaattgtaaattgttatcaatcaaactattgtagcagctacaaagtaattcaccagcatgacaaaatggtcaaaaaataagtcatcagcacttaagaaatgaaagcaacttttgaaattttctgttaaaattgtcaaatatattttatgaagaatttataaaaggggaaaatgattgtaatttattgttcatgacttttttttttaaataaagtgagtttcaacaaaaaaaaaa

SEQ ID NO: 438138 - DNA, 2770 bp, Homo sapiens
tgcccacaactgcgcaggcccagcaagcccccacaattaaaagcccagcgccgacccttcctgtcaattaggcgctgaagcgcaggcggtcagcatcgccatggagaccaacacccttcccaccgccactcccccttcctctcagggtccctgtcccctccagtgaatcccagaagactctggagagttctgagcagggggcggcactctggcctctgattggtccaaggaaggctggggggcaggacgggaggcgaaacccctggaatattcccgacctggcagcctcatcgagctcggtgattggctcagaagggaaaaggcgggtctccgtgacgacttataaaagcccaggggcaagcggtccggataacggctagcctgaggagctgctgcgacagtccactacctttttcgagagtgactcccgttgtcccaaggcttcccagagcgaacctgtgcggctgcaggcaccggcgcgtcgagtttccggcgtccggaaggaccgagctcttctcgcggatccagtgttccgtttccagcccccaatctcagagcggagccgacagagagcagggaaccggcatggccaaagccgcggcgatcggcatcgacctgggcaccacctactcctgcgtgggggtgttccaacacggcaaggtggagatcatcgccaacgaccagggcaaccgcaccacccccagctacgtggccttcacggacaccgagcggctcatcggggatgcggccaagaaccaggtggcgctgaacccgcagaacaccgtgtttgacgcgaagcggctgatcggccgcaagttcggcgacccggtggtgcagtcggacatgaagcactggcctttccaggtgatcaacgacggagacaagcccaaggtgcaggtgagctacaagggggagaccaaggcattctaccccgaggagatctcgtccatggtgctgaccaagatgaaggagatcgccgaggcgtacctgggctacccggtgaccaacgcggtgatcaccgtgccggcctacttcaacgactcgcagcgccaggccaccaaggatgcgggtgtgatcgcggggctcaacgtgctgcggatcatcaacgagcccacggccgccgccatcgcctacggcctggacagaacgggcaagggggagcgcaacgtgctcatctttgacctgggcgggggcaccttcgacgtgtccatcctgacgatcgacgacggcatcttcgaggtgaaggccacggccggggacacccacctgggtggggaggactttgacaacaggctggtgaaccacttcgtggaggagttcaagagaaaacacaagaaggacatcagccagaacaagcgagccgtgaggcggctgcgcaccgcctgcgagagggccaagaggaccctgtcgtccagcacccaggccagcctggagatcgactccctgtttgagggcatcgacttctacacgtccatcaccagggcgaggttcgaggagctgtgctccgacctgttccgaagcaccctggagcccgtggagaaggctctgcgcgacgccaagctggacaaggcccagattcacgacctggtcctggtcgggggctccacccgcatccccaaggtgcagaagctgctgcaggacttcttcaacgggcgcgacctgaacaagagcatcaaccccgacgaggctgtggcctacggggcggcggtgcaggcggccatcctgatgggggacaagtccgagaacgtgcaggacctgctgctgctggacgtggctcccctgtcgctggggctggagacggccggaggcgtgatgactgccctgatcaagcgcaactccaccatccccaccaagcagacgcagatcttcaccacctactccgacaaccaacccggggtgctgatccaggtgtacgagggcgagagggccatgacgaaagacaacaatctgttggggcgcttcgagctgagcggcatccctccggcccccaggggcgtgccccagatcgaggtgaccttcgacatcgatgccaacggcatcctgaacgtcacggccacggacaagagcaccggcaaggccaacaagatcaccatcaccaacgacaagggccgcctgagcaaggaggagatcgagcgcatggtgcaggaggcggagaagtacaaagcggaggacgaggtgcagcgcgagagggtgtcagccaagaacgccctggagtcctacgccttcaacatgaagagcgccgtggaggatgaggggctcaagggcaagatcagcgaggccgacaagaagaaggtgctggacaagtgtcaagaggtcatctcgtggctggacgccaacaccttggccgagaaggacgagtttgagcacaagaggaaggagctggagcaggtgtgtaaccccatcatcagcggactgtaccagggtgccggtggtcccgggcctgggggcttcggggctcagggtcccaagggagggtctgggtcaggccccaccattgaggaggtagattaggggcctttccaagattgctgtttttgttttggagcttcaagactttgcatttcctagtatttctgtttgtcagttctcaatttcctgtgtttgcaatgttgaaattttttggtgaagtactgaacttgctttttttccggtttctacatgcagagatgaatttatactgccatcttacgactatttcttctttttaatacacttaactcaggccattttttaagttggttacttcaaagtaaataaactttaaaattca

SEQ ID NO: 438139 - DNA, 2716 bp, Homo sapiens
tgcccacaactgcgcaggcccagcaagcccccacaattaaaagcccagcgccgacccttcctgtcaattaggcgctgaagcgcaggcggtcagcatcgccatggagaccaacacccttcccaccgccactcccccttcctctcagggtccctgtcccctccagtgaatcccagaagactctggagagttctgagcagggggcggcactctggcctctgattggtccaaggaaggctggggggcaggacgggaggcgaaacccctggaatattcccgacctggcagcctcatcgagctcggtgattggctcagaagggaaaaggcgggtctccgtgacgacttataaaagcccaggggcaagcggtccggataacggctagcctgaggagctgctgcgacagtccactacctttttcgagagtgactcccgttgtcccaaggcttcccagagcgaacctgtgcggctgcaggcaccggcgcgtcgagtttccggcgtccggaaggaccgagctcttctcgcggatccagtgttccgtttccagcccccaatctcagagcggagccgacagagagcagggaaccggcatggccaaagccgcggcgatcggcatcgacctgggcaccacctactcctgcgtgggggtgttccaacacggcaaggtggagatcatcgccaacgaccagggcaaccgcaccacccccagctacgtggccttcacggacaccgagcggctcatcggggatgcggccaagaaccaggtggcgctgaacccgcagaacaccgtgtttgacgcgaagcggctgatcggccgcaagttcggcgacccggtggtgcagtcggacatgaagcactggcctttccaggtgatcaacgacggagacaagcccaaggtgcaggtgagctacaagggggagaccaaggcattctaccccgaggagatctcgtccatggtgctgaccaagatgaaggagatcgccgaggcgtacctgggctacccggtgaccaacgcggtgatcaccgtgccggcctacttcaacgactcgcagcgccaggccaccaaggatgcgggtgtgatcgcggggctcaacgtgctgcggatcatcaacgagcccacggccgccgccatcgcctacggcctggacagaacgggcaagggggagcgcaacgtgctcatctttgacctgggcgggggcaccttcgacgtgtccatcctgacgatcgacgacggcatcttcgaggtgaaggccacggccggggacacccacctgggtggggaggactttgacaacaggctggtgaaccacttcgtggaggagttcaagagcgcctgcgagagggccaagaggaccctgtcgtccagcacccaggccagcctggagatcgactccctgtttgagggcatcgacttctacacgtccatcaccagggcgaggttcgaggagctgtgctccgacctgttccgaagcaccctggagcccgtggagaaggctctgcgcgacgccaagctggacaaggcccagattcacgacctggtcctggtcgggggctccacccgcatccccaaggtgcagaagctgctgcaggacttcttcaacgggcgcgacctgaacaagagcatcaaccccgacgaggctgtggcctacggggcggcggtgcaggcggccatcctgatgggggacaagtccgagaacgtgcaggacctgctgctgctggacgtggctcccctgtcgctggggctggagacggccggaggcgtgatgactgccctgatcaagcgcaactccaccatccccaccaagcagacgcagatcttcaccacctactccgacaaccaacccggggtgctgatccaggtgtacgagggcgagagggccatgacgaaagacaacaatctgttggggcgcttcgagctgagcggcatccctccggcccccaggggcgtgccccagatcgaggtgaccttcgacatcgatgccaacggcatcctgaacgtcacggccacggacaagagcaccggcaaggccaacaagatcaccatcaccaacgacaagggccgcctgagcaaggaggagatcgagcgcatggtgcaggaggcggagaagtacaaagcggaggacgaggtgcagcgcgagagggtgtcagccaagaacgccctggagtcctacgccttcaacatgaagagcgccgtggaggatgaggggctcaagggcaagatcagcgaggccgacaagaagaaggtgctggacaagtgtcaagaggtcatctcgtggctggacgccaacaccttggccgagaaggacgagtttgagcacaagaggaaggagctggagcaggtgtgtaaccccatcatcagcggactgtaccagggtgccggtggtcccgggcctgggggcttcggggctcagggtcccaagggagggtctgggtcaggccccaccattgaggaggtagattaggggcctttccaagattgctgtttttgttttggagcttcaagactttgcatttcctagtatttctgtttgtcagttctcaatttcctgtgtttgcaatgttgaaattttttggtgaagtactgaacttgctttttttccggtttctacatgcagagatgaatttatactgccatcttacgactatttcttctttttaatacacttaactcaggccattttttaagttggttacttcaaagtaaataaactttaaaattca

SEQ ID NO: 438140 - DNA, 2824 bp, Homo sapiens
tgcccacaactgcgcaggcccagcaagcccccacaattaaaagcccagcgccgacccttcctgtcaattaggcgctgaagcgcaggcggtcagcatcgccatggagaccaacacccttcccaccgccactcccccttcctctcagggtccctgtcccctccagtgaatcccagaagactctggagagttctgagcagggggcggcactctggcctctgattggtccaaggaaggctggggggcaggacgggaggcgaaacccctggaatattcccgacctggcagcctcatcgagctcggtgattggctcagaagggaaaaggcgggtctccgtgacgacttataaaagcccaggggcaagcggtccggataacggctagcctgaggagctgctgcgacagtccactacctttttcgagagtgactcccgttgtcccaaggcttcccagagcgaacctgtgcggctgcaggcaccggcgcgtcgagtttccggcgtccggaaggaccgagctcttctcgcggatccagtgttccgtttccagcccccaatctcagagcggagccgacagagagcagggaaccggcatggccaaagccgcggcgatcggcatcgacctgggcaccacctactcctgcgtgggggtgttccaacacggcaaggtggagatcatcgccaacgaccagggcaaccgcaccacccccagctacgtggccttcacggacaccgagcggctcatcggggatgcggccaagaaccaggtggcgctgaacccgcagaacaccgtgtttgacgcgaagcggctgatcggccgcaagttcggcgacccggtggtgcagtcggacatgaagcactggcctttccaggtgatcaacgacggagacaagcccaaggtgcaggtgagctacaagggggagaccaaggcattctaccccgaggagatctcgtccatggtgctgaccaagatgaaggagatcgccgaggcgtacctgggctacccggtgaccaacgcggtgatcaccgtgccggcctacttcaacgactcgcagcgccaggccaccaaggatgcgggtgtgatcgcggggctcaacgtgctgcggatcatcaacgagcccacggccgccgccatcgcctacggcctggacagaacgggcaagggggagcgcaacgtgctcatctttgacctgggcgggggcaccttcgacgtgtccatcctgacgatcgacgacggcatcttcgaggtgaaggccacggccggggacacccacctgggtggggaggactttgacaacaggctggtgaaccacttcgtggaggagttcaagagaaaacacaagaaggacatcagccagaacaagcgagccgtgaggcggctgcgcaccgcctgcgagagggccaagaggaccctgtcgtccagcacccaggccagcctggagatcgactccctgtttgagggcatcgacttctacacgtccatcaccagggcgaggttcgaggagctgtgctccgacctgttccgaagcaccctggagcccgtggagaaggctctgcgcgacgccaagctggacaaggcccagattcacgacctggtcctggtcgggggctccacccgcatccccaaggtgcagaagctgctgcaggacttcttcaacgggcgcgacctgaacaagagcatcaaccccgacgaggctgtggcctacggggcggcggtgcaggcggccatcctgatgggggacaagtccgagaacgtgcaggacctgctgctgctggacgtggctcccctgtcgctggggctggagacggccggaggcgtgatgactgccctgatcaagcgcaactccaccatccccaccaagcagacgcagatcttcaccacctactccgacaaccaacccggggtgctgatccaggtgtacgagggcgagagggccatgacgaaagacaacaatctgttggggcgcttcgagctgagcggcatccctccggcccccaggggcgtgccccagatcgaggtgaccttcgacatcgatgccaacggcatcctgaacgtcacggccacggacaagagcaccggcaaggccaacaagatcaccatcaccaacgacaagggccgcctgagcaaggaggagatcgagcgcatggtgcaggaggcggagaagtacaaagcggaggacgaggtgcagcgcgagagggtgtcagccaagaacgccctggagtcctacgccttcaacatgaagagcgccgtggaggatgaggggctcaagggcaagatcagcgaggccgacaagaagaaggtgctggacaagtgtcaagaggtcatctcgtggctggacgccaacaccttggccgagaaggacgagtttgagcacaagaggaaggagctggagcaggtgtgtaaccccatcatcagcggactgtaccagggtgccggtggtcccgggcctgggggcttcggggctcagggtcccaagggagggtctgggtcaggccccaccattgaggaggtagattaggggcctttccaagattgctgtttttgttttggagcttcaagactttgcatttcctagtatttctgtttgtcagttctcaatttcctgtgtttgcaatgttgaaattttttggtgaagtactgaacttgctttttttccggtttctacatgcagagatgaatttatactgccatcttacgactatttcttctttttaatacacttaactcaggccattttttaagttggttacttcaaagtaaataaactttaaaattcaagtgatgccttttattcctttatttgggggtcagtagggtctgcataggttgtt

SEQ ID NO: 438141 - DNA, 2718 bp, Homo sapiens
tgcccacaactgcgcaggcccagcaagcccccacaattaaaagcccagcgccgacccttcctgtcaattaggcgctgaagcgcaggcggtcagcatcgccatggagaccaacacccttcccaccgccactcccccttcctctcagggtccctgtcccctccagtgaatcccagaagactctggagagttctgagcagggggcggcactctggcctctgattggtccaaggaaggctggggggcaggacgggaggcgaaacccctggaatattcccgacctggcagcctcatcgagctcggtgattggctcagaagggaaaaggcgggtctccgtgacgacttataaaagcccaggggcaagcggtccggataacggctagcctgaggagctgctgcgacagtccactacctttttcgagagtgactcccgttgtcccaaggcttcccagagcgaacctgtgcggctgcaggcaccggcgcgtcgagtttccggcgtccggaaggaccgagctcttctcgcggatccagtgttccgtttccagcccccaatctcagagcggagccgacagagagcagggaaccggcatggccaaagccgcggcgatcggcatcgacctgggcaccacctactcctgcgtgggggtgttccaacacggcaaggtggagatcatcgccaacgaccagggcaaccgcaccacccccagctacgtggccttcacggacaccgagcggctcatcggggatgcggccaagaaccaggtggcgctgaacccgcagaacaccgtgtttgacgcgaagcggctgatcggccgcaagttcggcgacccggtggtgcagtcggacatgaagcactggcctttccaggtgatcaacgacggagacaagcccaaggtgcaggtgagctacaagggggagaccaaggcattctaccccgaggagatctcgtccatggtgctgaccaagatgaaggagatcgccgaggcgtacctgggctacccggtgaccaacgcggtgatcaccgtgccggcctacttcaacgactcgcagcgccaggccaccaaggatgcgggtgtgatcgcggggctcaacgtgctgcggatcatcaacgagcccacggccgccgccatcgcctacggcctggacagaacgggcaagggggagcgcaacgtgctcatctttgacctgggcgggggcaccttcgacgtgtccatcctgacgatcgacgacggcatcttcgaggtgaaggccacggccggggacacccacctgggtggggaggactttgacaacaggctggtgaaccacttcgtggaggagttcaagagaaaacacaagaaggacatcagccagaacaagcgagccgtgaggcggctgcgcaccgcctgcgagagggccaagaggaccctgtcgtccagcacccaggccagcctggagatcgactccctgtttgagggcatcgacttctacacgtccatcaccagggcgaggttcgaggagctgtgctccgacctgttccgaagcaccctggagcccgtggagaaggctctgcgcgacgccaagctggacaaggcccagattcacgacctggtcctggtcgggggctccacccgcatccccaaggtgcagaagctgctgcaggacttcttcaacgggcgcgacctgaacaagagcatcaaccccgacgaggctgtggcctacggggcggcggtgcaggcggccatcctgatgggggacaagtccgagaacgtgcaggacctgctgctgctggacgtggctcccctgtcgctggggctggagacggccggaggcgtgatgactgccctgatcaagcgcaactccaccatccccaccaagcagacgcagatcttcaccacctactccgacaaccaacccggggtgctgatccaggtgtacgagggcgagagggccatgacgaaagacaacaatctgttggggcgcttcgagctgagcggcatccctccggcccccaggggcgtgccccagatcgaggtgaccttcgacatcgatgccaacggcatcctgaacgtcacggccacggacaagagcaccggcaaggccaacaagatcaccatcaccaacgacaagggccgcctgagcaaggaggagatcgagcgcatggtgcaggaggcggagaagtacaaagcggaggacgaggtgcagcgcgagagggtgtcagccaagaacgccctggagtcctacgccttcaacatgaagagcgccgtggaggatgaggggctcaagggcaagatcagcgaggccgacaagaagtggccgagaaggacgagtttgagcacaagaggaaggagctggagcaggtgtgtaaccccatcatcagcggactgtaccagggtgccggtggtcccgggcctgggggcttcggggctcagggtcccaagggagggtctgggtcaggccccaccattgaggaggtagattaggggcctttccaagattgctgtttttgttttggagcttcaagactttgcatttcctagtatttctgtttgtcagttctcaatttcctgtgtttgcaatgttgaaattttttggtgaagtactgaacttgctttttttccggtttctacatgcagagatgaatttatactgccatcttacgactatttcttctttttaatacacttaactcaggccattttttaagttggttacttcaaagtaaataaactttaaaattca

SEQ ID NO: 438142 - DNA, 3172 bp, Homo sapiens
tgcccacaactgcgcaggcccagcaagcccccacaattaaaagcccagcgccgacccttcctgtcaattaggcgctgaagcgcaggcggtcagcatcgccatggagaccaacacccttcccaccgccactcccccttcctctcagggtccctgtcccctccagtgaatcccagaagactctggagagttctgagcagggggcggcactctggcctctgattggtccaaggaaggctggggggcaggacgggaggcgaaacccctggaatattcccgacctggcagcctcatcgagctcggtgattggctcagaagggaaaaggcgggtctccgtgacgacttataaaagcccaggggcaagcggtccggataacggctagcctgaggagctgctgcgacagtccactacctttttcgagagtgactcccgttgtcccaaggcttcccagagcgaacctgtgcggctgcaggcaccggcgcgtcgagtttccggcgtccggaaggaccgagctcttctcgcggatccagtgttccgtttccagcccccaatctcagagcggagccgacagagagcagggaaccggcatggccaaagccgcggcgatcggcatcgacctgggcaccacctactcctgcgtgggggtgttccaacacggcaaggtggagatcatcgccaacgaccagggcaaccgcaccacccccagctacgtggccttcacggacaccgagcggctcatcggggatgcggccaagaaccaggtggcgctgaacccgcagaacaccgtgtttgacgcgaagcggctgatcggccgcaagttcggcgacccggtggtgcagtcggacatgaagcactggcctttccaggtgatcaacgacggagacaagcccaaggtgcaggtgagctacaagggggagaccaaggcattctaccccgaggagatctcgtccatggtgctgaccaagatgaaggagatcgccgaggcgtacctgggctacccggtgaccaacgcggtgatcaccgtgccggcctacttcaacgactcgcagcgccaggccaccaaggatgcgggtgtgatcgcggggctcaacgtgctgcggatcatcaacgagcccacggccgccgccatcgcctacggcctggacagaacgggcaagggggagcgcaacgtgctcatctttgacctgggcgggggcaccttcgacgtgtccatcctgacgatcgacgacggcatcttcgaggtgaaggccacggccggggacacccacctgggtggggaggactttgacaacaggctggtgaaccacttcgtggaggagttcaagagaaaacacaagaaggacatcagccagaacaagcgagccgtgaggcggctgcgcaccgcctgcgagagggccaagaggaccctgtcgtccagcacccaggccagcctggagatcgactccctgtttgagggcatcgacttctacacgtccatcaccagggcgaggttcgaggagctgtgctccgacctgttccgaagcaccctggagcccgtggagaaggctctgcgcgacgccaagctggacaaggcccagattcacgacctggtcctggtcgggggctccacccgcatccccaaggtgcagaagctgctgcaggacttcttcaacgggcgcgacctgaacaagagcatcaaccccgacgaggctgtggcctacggggcggcggtgcaggcggccatcctgatgggggacaagtccgagaacgtgcaggacctgctgctgctggacgtggctcccctgtcgctggggctggagacggccggaggcgtgatgactgccctgatcaagcgcaactccaccatccccaccaagcagacgcagatcttcaccacctactccgacaaccaacccggggtgctgatccaggtgtacgagggcgagagggccatgacgaaagacaacaatctgttggggcgcttcgagctgagcggcatccctccggcccccaggggcgtgccccagatcgaggtgaccttcgacatcgatgccaacggcatcctgaacgtcacggccacggacaagagcaccggcaaggccaacaagatcaccatcaccaacgacaagggccgcctgagcaaggaggagatcgagcgcatggtgcaggaggcggagaagtacaaagcggaggacgaggtgcagcgcgagagggtgtcagccaagaacgccctggagtcctacgccttcaacatgaagagcgccgtggaggatgaggggctcaagggcaagatcagcgaggccgacaagaagaaggtgctggacaagtgtcaagaggtcatctcgtggctggacgccaacaccttggccgagaaggacgagtttgagcacaagaggaaggagctggagcaggtgtgtaaccccatcatcagcggactgtaccagggtgccggtggtcccgggcctgggggcttcggggctcagggtcccaagggagggtctgggtcaggccccaccattgaggaggtagattaggggcctttccaagattgctgtttttgttttggagcttcaagactttgcatttcctagtatttctgtttgtcagttctcaatttcctgtgtttgcaatgttgaaattttttggtgaagtactgaacttgctttttttccggtttctacatgcagagatgaatttatactgccatcttacgactatttcttctttttaatacacttaactcaggccattttttaagttggttacttcaaagtaaataaactttaaaattcaaaaaaaaaaaaaaaaaaaaaaaaaaaaagtgtgtggtggggcggccgtgggccttgggaaaaggttttttggagaacccttgctgggtggggggcgggggccccccagttgggtttagtgtgtgaaccgtgggccaaagagggggtggcccccaaaggagaagctcccggggggcctagagaagctatgtaggtgggctgtggttgttctccccccccaaatttaataaaaaagcgccgcgggggggaaccaccggggggttttttccgtgggcacaactctccccagaagaggggggaggttcccggaggggcccaacaagccggcggtctctcccaaaggggggggtcccaagggagagctctagaaataaaattacgaggggggtggggaggaggagac

SEQ ID NO: 438143 - DNA, 890 bp, Homo sapiens
tagtcccacacctgcaccggtagccccacacctgcaccggtagtcccacacctgcaccggtagtcccacacctgcaccggtagttccacacctgcaccggtagtcccacacctgcaccggtagtcccacacctgcaccggacatcgatgccaacggcatcctgaacgtcacggccacggacaagagcaccggcaaggccaacaagatcaccatcaccaacgacaagggccgcctgagcaaggaggagatcgagcgcatggtgcaggaggcggagaagtacaaagcggaggacgaggtgcagcgcgagagggtgtcagccaagaacgccctggagtcctacgccttcaacatgaagagcgccgtggaggatgaggggctcaagggcaagatcagcgaggccgacaagaagaaggtgctggacaagtgtcaagaggtcatctcgtggctggacgccaacaccttggccgagaaggacgagtttgagcacaagaggaaggagctggagcaggtgtgtaaccccatcatcagcggactgtaccagggtgccggtggtcccgggcctgggggcttcggggctcagggtcccaagggagggtctgggtcaggccccaccattgaggaggtagattaggggcctttccaagattgctgtttttgttttggagcttcaagactttgcatttcctagtatttctgtttgtcagttctcaatttcctgtgtttgcaatgttgaaattttttggtgaagtactgaacttgctttttttccggtttctacatgcagagatgaatttatactgccatcttacgactatttcttctttttaatacacttaactcaggccattttttaagttggttacttcaaagtaaataaactttaaaattca

SEQ ID NO: 438144 - DNA, 659 bp, Homo sapiens
gctgccgcctactactactaaattcgcggccgctcgagcggagaagtacaaagcggaggacgaggtgcagcgcgagagggtgtcagccaagaacgccctggagtcctacgccttcaacatgaagagcgccgtggaggatgaggggctcaagggcaagatcagcgaggccgacaagaagaaggtgctggacaagtgtcaagaggtcatctcgtggctggacgccaacaccttggccgagaaggacgagtttgagcacaagaggaaggagctggagcaggtgtgtaaccccatcatcagcggactgtaccagggtgccggtggtcccgggcctgggggcttcggggctcagggtcccaagggagggtctgggtcaggccccaccattgaggaggtagattaggggcctttccaagattgctgtttttgttttggagcttcaagactttgcatttcctagtatttctgtttgtcagttctcaatttcctgtgtttgcaatgttgaaattttttggtgaagtactgaacttgctttttttccggtttctacatgcagagatgaatttatactgccatcttacgactatttcttctttttaatacacttaactcaggccattttttaagttggttacttcaaagtaaataaactttaaaattca

SEQ ID NO: 438145 - DNA, 2141 bp, Homo sapiens
tgcccacaactgcgcaggcccagcaagcccccacaattaaaagcccagcgccgacccttcctgtcaattaggcgctgaagcgcaggcggtcagcatcgccatggagaccaacacccttcccaccgccactcccccttcctctcagggtccctgtcccctccagtgaatcccagaagactctggagagttctgagcagggggcggcactctggcctctgattggtccaaggaaggctggggggcaggacgggaggcgaaacccctggaatattcccgacctggcagcctcatcgagctcggtgattggctcagaagggaaaaggcgggtctccgtgacgacttataaaagcccaggggcaagcggtccggataacggctagcctgaggagctgctgcgacagtccactacctttttcgagagtgactcccgttgtcccaaggcttcccagagcgaacctgtgcggctgcaggcaccggcgcgtcgagtttccggcgtccggaaggaccgagctcttctcgcggatccagtgttccgtttccagcccccaatctcagagcggagccgacagagagcagggaaccggcatggccaaagccgcggcgatcggcatcgacctgggcaccacctactcctgcgtgggggtgttccaacacggcaaggtggagatcatcgccaacgaccagggcaaccgcaccacccccagctacgtggccttcacggacaccgagcggctcatcggggatgcggccaagaaccaggtggcgctgaacccgcagaacaccgtgtttgacgcgaagcggctgatcggccgcaagttcggcgacccggtggtgcagtcggacatgaagcactggcctttccaggtgatcaacgacggagacaagcccaaggtgcaggtgagctacaagggggagaccaaggcattctaccccgaggagatctcgtccatggtgctgaccaagatgaaggagatcgccgaggcgtacctgggctacccggtgaccaacgcggtgatcaccgtgccggcctacttcaacgactcgcagcgccaggccaccaaggatgcgggtgtgatcgcggggctcaacgtgctgcggatcatcaacgagcccacggccgccgccatcgcctacggcctggacagaacgggcaagggggagcgcaacgtgctcatctttgacctgggcgggggcaccttcgacgtgtccatcctgacgatcgacgacggcatcttcgaggtgaaggccacggccggggacacccacctgggtggggaggactttgacaacaggctggtgaaccacttcgtggaggagttcaagagaaaacacaagaaggacatcagccagaacaagcgagccgtgaggcggctgcgcaccgcctgcgagagggccaagaggaccctgtcgtccagcacccaggccagcctggagatcgactccctgtttgagggcatcgacttctacacgtccatcaccagggcgaggttcgaggagctgtgctccgacctgttccgaagcaccctggagcccgtggagaaggctctgcgcgacgccaagctggacaaggcccagattcacgacctggtcctggtcgggggctccacccgcatccccaaggtgcagaagctgctgcaggacttcttcaacgggcgcgacctgaacaagagcatcaaccccgacgaggctgtggcctacggggcggcggtgcaggcggccatccagcggactgtaccagggtgccggtggtcccgggcctgggggcttcggggctcagggtcccaagggagggtctgggtcaggccccaccattgaggaggtagattaggggcctttccaagattgctgtttttgttttggagcttcaagactttgcatttcctagtatttctgtttgtcagttctcaatttcctgtgtttgcaatgttgaaattttttggtgaagtactgaacttgctttttttccggtttctacatgcagagatgaatttatactgccatcttacgactatttcttctttttaatacacttaactcaggccattttttaagttggttacttcaaagtaaataaactttaaaattcaagtgatgccttttattcctttatttgggggtcagtagggtctgcataggttgtt

SEQ ID NO: 438146 - DNA, 1751 bp, Homo sapiens
tgcccacaactgcgcaggcccagcaagcccccacaattaaaagcccagcgccgacccttcctgtcaattaggcgctgaagcgcaggcggtcagcatcgccatggagaccaacacccttcccaccgccactcccccttcctctcagggtccctgtcccctccagtgaatcccagaagactctggagagttctgagcagggggcggcactctggcctctgattggtccaaggaaggctggggggcaggacgggaggcgaaacccctggaatattcccgacctggcagcctcatcgagctcggtgattggctcagaagggaaaaggcgggtctccgtgacgacttataaaagcccaggggcaagcggtccggataacggctagcctgaggagctgctgcgacagtccactacctttttcgagagtgactcccgttgtcccaaggcttcccagagcgaacctgtgcggctgcaggcaccggcgcgtcgagtttccggcgtccggaaggaccgagctcttctcgcggatccagtgttccgtttccagcccccaatctcagagcggagccgacagagagcagggaaccggcatggccaaagccgcggcgatcggcatcgacctgggcaccacctactcctgcgtgggggtgttccaacacggcaaggtggagatcatcgccaacgaccagggcaaccgcaccacccccagctacgtggccttcacggacaccgagcggctcatcggggatgcggccaagaaccaggtggcgctgaacccgcagaacaccgtgtttgacgcgaagcggctgatcggccgcaagttcggcgacccggtggtgcagtcggacatgaagcactggcctttccaggtgatcaacgacggagacaagcccaaggtgcaggtgagctacaagggggagaccaaggcattctaccccgaggagatctcgtccatggtgctgaccaagatgaaggagatcgccgaggcgtacctgggctacccggtgaccaacgcggtgatcaccgtgccggcctacttcaacgactcgcagcgccaggccaccaaggatgcgggtgtgatcgcggggctcaacgtgctgcggatcatcaacgagcccacggccgccgccatcgcctacggcctggacagaacgggcaagggggagcgcaacgtgctcatctttgacctgggcgggggcaccttcgacgtgtccatcctgacgatcgacgacggcatcttcgaggtgaaggccacggccggggacacccacctgggtggggaggactttgacaacaggctggtgaaccacttcgtggaggagttcaagagaaaacacaagaaggacatcagccagaacaagcgagccgtgaggcggctgcgcaccgcctgcgagagggccaagaggaccctgtcgtccagcacccaggccagcctggagatcgactccctgtttgagggcatcgacttctacacgtccatcaccagggcgaggttcgaggagctgtgctccgacctgttccgaagcaccctggagcccgtggagaaggctctgcgcgacgccaagctggacaaggcccagattcacgacctggtcctggtcgggggctccacccgcatccccaaggtgcagaagctgctgcaggacttcttcaacgggcgctgcttcggaacaggtcggagcacagctcctcgaacctcgtcctgctgatgacgtgtagaagtcgacgccctcaaacagggagtcgatcgtccagg

SEQ ID NO: 438147 - DNA, 1595 bp, Homo sapiens
  misc_feature (1564)..(1564): n is a, c, g, or t
  misc_feature (1579)..(1579): n is a, c, g, or t
  misc_feature (1581)..(1581): n is a, c, g, or t
tgcccacaactgcgcaggcccagcaagcccccacaattaaaagcccagcgccgacccttcctgtcaattaggcgctgaagcgcaggcggtcagcatcgccatggagaccaacacccttcccaccgccactcccccttcctctcagggtccctgtcccctccagtgaatcccagaagactctggagagttctgagcagggggcggcactctggcctctgattggtccaaggaaggctggggggcaggacgggaggcgaaacccctggaatattcccgacctggcagcctcatcgagctcggtgattggctcagaagggaaaaggcgggtctccgtgacgacttataaaagcccaggggcaagcggtccggataacggctagcctgaggagctgctgcgacagtccactacctttttcgagagtgactcccgttgtcccaaggcttcccagagcgaacctgtgcggctgcaggcaccggcgcgtcgagtttccggcgtccggaaggaccgagctcttctcgcggatccagtgttccgtttccagcccccaatctcagagcggagccgacagagagcagggaaccggcatggccaaagccgcggcgatcggcatcgacctgggcaccacctactcctgcgtgggggtgttccaacacggcaaggtggagatcatcgccaacgaccagggcaaccgcaccacccccagctacgtggccttcacggacaccgagcggctcatcggggatgcggccaagaaccaggtggcgctgaacccgcagaacaccgtgtttgacgcgaagcggctgatcggccgcaagttcggcgacccggtggtgcagtcggacatgaagcactggcctttccaggtgatcaacgacggagacaagcccaaggtgcaggtgagctacaagggggagaccaaggcattctaccccgaggagatctcgtccatggtgctgaccaagatgaaggagatcgccgaggcgtacctgggctacccggtgaccaacgcggtgatcaccgtgccggcctacttcaacgactcgcagcgccaggccaccaaggatgcgggtgtgatcgcggggctcaacgtgctgcggatcatcaacgagcccacggccgccgccatcgcctacggcctggacagaacgggcaagggggagcgcaacgtgctcatctttgacctgggcgggggcaccttcgacgtgtccatcctgacgatcgacgacggcatcttcgaggtgaaggccacggccggggacacccacctgggtggggaggactttgacaacaggctggtgaaccacttcgtggaggagttcaagagaaaacacaagaaggacatcagccagaacaagcgagccgtgaggcggctgcgcaccgcctgcgagagggccaagaggaccctgtcgtccagcacccaggccagcctggagatcgactccctgtttgagggcatcgacttctacacgtccatcaccagggcgaggttcgaggagctgtgctccgacctgttccgaagcaccctggagcccgtggagaagacactgacccatcggggatcanctagagtcggcctgnangaagggcaaacaaa

SEQ ID NO: 438148 - DNA, 385 bp, Homo sapiens
  misc_feature (139)..(139): n is a, c, g, or t
caatttttactgtgcctttgtttttactagtgtctgctgttgcaaaaagaagaaaacattctctgcctgagttttaatttttgtccaaagttaattttaatctatacaattatttccttttgcctatcaaaaaaaaaanattgctgtttttgttttggagcttcaagactttgcatttcctagtatttctgtttgtcagttctcaatttcctgtgtttgcaatgttgaaattttttggtgaagtactgaacttgctttttttccggtttctacatgcagagatgaatttatactgccatcttacgactatttcttctttttaatacacttaactcaggccattttttaagttggttacttcaaagtaaataaactttaaaattca

SEQ ID NO: 438149 - DNA, 1324 bp, Homo sapiens
tgcccacaactgcgcaggcccagcaagcccccacaattaaaagcccagcgccgacccttcctgtcaattaggcgctgaagcgcaggcggtcagcatcgccatggagaccaacacccttcccaccgccactcccccttcctctcagggtccctgtcccctccagtgaatcccagaagactctggagagttctgagcagggggcggcactctggcctctgattggtccaaggaaggctggggggcaggacgggaggcgaaacccctggaatattcccgacctggcagcctcatcgagctcggtgattggctcagaagggaaaaggcgggtctccgtgacgacttataaaagcccaggggcaagcggtccggataacggctagcctgaggagctgctgcgacagtccactacctttttcgagagtgactcccgttgtcccaaggcttcccagagcgaacctgtgcggctgcaggcaccggcgcgtcgagtttccggcgtccggaaggaccgagctcttctcgcggatccagtgttccgtttccagcccccaatctcagagcagcggactgtaccagggtgccggtggtcccgggcctgggggcttcggggctcagggtcccaagggagggtctgggtcaggccccaccattgaggaggtagattaggggcctttccaagattgctgtttttgttttggagcttcaagactttgcatttcctagtatttctgtttgtcagttctcaatttcctgtgtttgcaatgttgaaattttttggtgaagtactgaacttgctttttttccggtttctacatgcagagatgaatttatactgccatcttacgactatttcttctttttaatacacttaactcaggccattttttaagttggttacttcaaagtaaataaactttaaaattcaaaaaaaaaaaaaaaaaaaaaaaaaaaaagtgtgtggtggggcggccgtgggccttgggaaaaggttttttggagaacccttgctgggtggggggcgggggccccccagttgggtttagtgtgtgaaccgtgggccaaagagggggtggcccccaaaggagaagctcccggggggcctagagaagctatgtaggtgggctgtggttgttctccccccccaaatttaataaaaaagcgccgcgggggggaaccaccggggggttttttccgtgggcacaactctccccagaagaggggggaggttcccggaggggcccaacaagccggcggtctctcccaaaggggggggtcccaagggagagctctagaaataaaattacgaggggggtggggaggaggagac

SEQ ID NO: 438150 - DNA, 518 bp, Homo sapiens
gctgccgcctactactactaaattcgcggccgctcgaaaggtgctggacaagtgtcaagaggtcatctcgtggctggacgccaacaccttggccgagaaggacgagtttgagcacaagaggaaggagctggagcaggtgtgtaaccccatcatcagcggactgtaccagggtgccggtggtcccgggcctgggggcttcggggctcagggtcccaagggagggtctgggtcaggccccaccattgaggaggtagattaggggcctttccaagattgctgtttttgttttggagcttcaagactttgcatttcctagtatttctgtttgtcagttctcaatttcctgtgtttgcaatgttgaaattttttggtgaagtactgaacttgctttttttccggtttctacatgcagagatgaatttatactgccatcttacgactatttcttctttttaatacacttaactcaggccattttttaagttggttacttcaaagtaaataaactttaaaattca

SEQ ID NO: 438151 - DNA, 2652 bp, Homo sapiens
tgcccacaactgcgcaggcccagcaagcccccacaattaaaagcccagcgccgacccttcctgtcaattaggcgctgaagcgcaggcggtcagcatcgccatggagaccaacacccttcccaccgccactcccccttcctctcagggtccctgtcccctccagtgaatcccagaagactctggagagttctgagcagggggcggcactctggcctctgattggtccaaggaaggctggggggcaggacgggaggcgaaacccctggaatattcccgacctggcagcctcatcgagctcggtgattggctcagaagggaaaaggcgggtctccgtgacgacttataaaagcccaggggcaagcggtccggataacggctagcctgaggagctgctgcgacagtccactacctttttcgagagtgactcccgttgtcccaaggcttcccagagcgaacctgtgcggctgcaggcaccggcgcgtcgagtttccggcgtccggaaggaccgagctcttctcgcggatccagtgttccgtttccagcccccaatctcagagcggagccgacagagagcagggaaccggcatggccaaagccgcggcgatcggcatcgacctgggcaccacctactcctgcgtgggggtgttccaacacggcaaggtggagatcatcgccaacgaccagggcaaccgcaccacccccagctacgtggccttcacggacaccgagcggctcatcggggatgcggccaagaaccaggtggcgctgaacccgcagaacaccgtgtttgacgcgaagcggctgatcggccgcaagttcggcgacccggtggtgcagtcggacatgaagcactggcctttccaggtgatcaacgacggagacaagcccaaggtgcaggtgagctacaagggggagaccaaggcattctaccccgaggagatctcgtccatggtgctgaccaagatgaaggagatcgccgaggcgtacctgggctacccggtgaccaacgcggtgatcaccgtgccggcctacttcaacgactcgcagcgccaggccaccaaggatgcgggtgtgatcgcggggctcaacgtgctgcggatcatcaacgagcccacggccgccgccatcgcctacggcctggacagaacgggcaagggggagcgcaacgtgctcatctttgacctgggcgggggcaccttcgacgtgtccatcctgacgatcgacgacggcatcttcgaggtgaaggccacggccggggacacccacctgggtggggaggactttgacaacaggctggtgaaccacttcgtggaggagttcaagagaaaacacaagaaggacatcagccagaacaagcgagccgtgaggcggctgcgcaccgcctgcgagagggccaagaggaccctgtcgtccagcacccaggccagcctggagatcgactccctgtttgagggcatcgacttctacacgtcctggtcgggggctccacccgcatccccaaggtgcagaagctgctgcaggacttcttcaacgggcgcgacctgaacaagagcatcaaccccgacgaggctgtggcctacggggcggcggtgcaggcggccatcctgatgggggacaagtccgagaacgtgcaggacctgctgctgctggacgtggctcccctgtcgctggggctggagacggccggaggcgtgatgactgccctgatcaagcgcaactccaccatccccaccaagcagacgcagatcttcaccacctactccgacaaccaacccggggtgctgatccaggtgtacgagggcgagagggccatgacgaaagacaacaatctgttggggcgcttcgagctgagcggcatccctccggcccccaggggcgtgccccagatcgaggtgaccttcgacatcgatgccaacggcatcctgaacgtcacggccacggacaagagcaccggcaaggccaacaagatcaccatcaccaacgacaagggccgcctgagcaaggaggagatcgagcgcatggtgcaggaggcggagaagtacaaagcggaggacgaggtgcagcgcgagagggtgtcagccaagaacgccctggagtcctacgccttcaacatgaagagcgccgtggaggatgaggggctcaagggcaagatcagcgaggccgacaagaagaaggtgctggacaagtgtcaagaggtcatctcgtggctggacgccaacaccttggccgagaaggacgagtttgagcacaagaggaaggagctggagcaggtgtgtaaccccatcatcagcggactgtaccagggtgccggtggtcccgggcctgggggcttcggggctcagggtcccaagggagggtctgggtcaggccccaccattgaggaggtagattaggggcctttccaagattgctgtttttgttttggagcttcaagactttgcatttcctagtatttctgtttgtcagttctcaatttcctgtgtttgcaatgttgaaattttttggtgaagtactgaacttgctttttttccggtttctacatgcagagatgaatttatactgccatcttacgactatttcttctttttaatacacttaactcaggccattttttaagttggttacttcaaagtaaataaactttaaaattca

SEQ ID NO: 438152 - DNA, 2485 bp, Homo sapiens
tgcccacaactgcgcaggcccagcaagcccccacaattaaaagcccagcgccgacccttcctgtcaattaggcgctgaagcgcaggcggtcagcatcgccatggagaccaacacccttcccaccgccactcccccttcctctcagggtccctgtcccctccagtgaatcccagaagactctggagagttctgagcagggggcggcactctggcctctgattggtccaaggaaggctggggggcaggacgggaggcgaaacccctggaatattcccgacctggcagcctcatcgagctcggtgattggctcagaagggaaaaggcgggtctccgtgacgacttataaaagcccaggggcaagcggtccggataacggctagcctgaggagctgctgcgacagtccactacctttttcgagagtgactcccgttgtcccaaggcttcccagagcgaacctgtgcggcaagaaccaggtggcgctgaacccgcagaacaccgtgtttgacgcgaagcggctgatcggccgcaagttcggcgacccggtggtgcagtcggacatgaagcactggcctttccaggtgatcaacgacggagacaagcccaaggtgcaggtgagctacaagggggagaccaaggcattctaccccgaggagatctcgtccatggtgctgaccaagatgaaggagatcgccgaggcgtacctgggctacccggtgaccaacgcggtgatcaccgtgccggcctacttcaacgactcgcagcgccaggccaccaaggatgcgggtgtgatcgcggggctcaacgtgctgcggatcatcaacgagcccacggccgccgccatcgcctacggcctggacagaacgggcaagggggagcgcaacgtgctcatctttgacctgggcgggggcaccttcgacgtgtccatcctgacgatcgacgacggcatcttcgaggtgaaggccacggccggggacacccacctgggtggggaggactttgacaacaggctggtgaaccacttcgtggaggagttcaagagaaaacacaagaaggacatcagccagaacaagcgagccgtgaggcggctgcgcaccgcctgcgagagggccaagaggaccctgtcgtccagcacccaggccagcctggagatcgactccctgtttgagggcatcgacttctacacgtccatcaccagggcgaggttcgaggagctgtgctccgacctgttccgaagcaccctggagcccgtggagaaggctctgcgcgacgccaagctggacaaggcccagattcacgacctggtcctggtcgggggctccacccgcatccccaaggtgcagaagctgctgcaggacttcttcaacgggcgcgacctgaacaagagcatcaaccccgacgaggctgtggcctacggggcggcggtgcaggcggccatcctgatgggggacaagtccgagaacgtgcaggacctgctgctgctggacgtggctcccctgtcgctggggctggagacggccggaggcgtgatgactgccctgatcaagcgcaactccaccatccccaccaagcagacgcagatcttcaccacctactccgacaaccaacccggggtgctgatccaggtgtacgagggcgagagggccatgacgaaagacaacaatctgttggggcgcttcgagctgagcggcatccctccggcccccaggggcgtgccccagatcgaggtgaccttcgacatcgatgccaacggcatcctgaacgtcacggccacggacaagagcaccggcaaggccaacaagatcaccatcaccaacgacaagggccgcctgagcaaggaggagatcgagcgcatggtgcaggaggcggagaagtacaaagcggaggacgaggtgcagcgcgagagggtgtcagccaagaacgccctggagtcctacgccttcaacatgaagagcgccgtggaggatgaggggctcaagggcaagatcagcgaggccgacaagaagaaggtgctggacaagtgtcaagaggtcatctcgtggctggacgccaacaccttggccgagaaggacgagtttgagcacaagaggaaggagctggagcaggtgtgtaaccccatcatcagcggactgtaccagggtgccggtggtcccgggcctgggggcttcggggctcagggtcccaagggagggtctgggtcaggccccaccattgaggaggtagattaggggcctttccaagattgctgtttttgttttggagcttcaagactttgcatttcctagtatttctgtttgtcagttctcaatttcctgtgtttgcaatgttgaaattttttggtgaagtactgaacttgctttttttccggtttctacatgcagagatgaatttatactgccatcttacgactatttcttctttttaatacacttaactcaggccattttttaagttggttacttcaaagtaaataaactttaaaattca

SEQ ID NO: 438153 - DNA, 3252 bp, Homo sapiens
tgcccacaactgcgcaggcccagcaagcccccacaattaaaagcccagcgccgacccttcctgtcaattaggcgctgaagcgcaggcggtcagcatcgccatggagaccaacacccttcccaccgccactcccccttcctctcagggtccctgtcccctccagtgaatcccagaagactctggagagttctgagcagggggcggcactctggcctctgattggtccaaggaaggctggggggcaggacgggaggcgaaacccctggaatattcccgacctggcagcctcatcgagctcggtgattggctcagaagggaaaaggcgggtctccgtgacgacttataaaagcccaggggcaagcggtccggataacggctagcctgaggagctgctgcgacagtccactacctttttcgagagtgactcccgttgtcccaaggcttcccagagcgaacctgtgcggctgcaggcaccggcgcgtcgagtttccggcgtccggaaggaccgagctcttctcgcggatccagtgttccgtttccagcccccaatctcagagcggagccgacagagagcagggaaccggcatggccaaagccgcggcgatcggcatcgacctgggcaccacctactcctgcgtgggggtgttccaacacggcaaggtggagatcatcgccaacgaccagggcaaccgcaccacccccagctacgtggccttcacggacaccgagcggctcatcggggatgcggccaagaaccaggtggcgctgaacccgcagaacaccgtgtttgacgcgaagcggctgatcggccgcaagttcggcgacccggtggtgcagtcggacatgaagcactggcctttccaggtgatcaacgacggagacaagcccaaggtgcaggtgagctacaagggggagaccaaggcattctaccccgaggagatctcgtccatggtgctgaccaagatgaaggagatcgccgaggcgtacctgggctacccggtgaccaacgcggtgatcaccgtgccggcctacttcaacgactcgcagcgccaggccaccaaggatgcgggtgtgatcgcggggctcaacgtgctgcggatcatcaacgagcccacggccgccgccatcgcctacggcctggacagaacgggcaagggggagcgcaacgtgctcatctttgacctgggcgggggcaccttcgacgtgtccatcctgacgatcgacgacggcatcttcgaggtgaaggccacggccggggacacccacctgggtggggaggactttgacaacaggctggtgaaccacttcgtggaggagttcaagagaaaacacaagaaggacatcagccagaacaagcgagccgtgaggcggctgcgcaccgcctgcgagagggccaagaggaccctgtcgtccagcacccaggccagcctggagatcgactccctgtttgagggcatcgacttctacacgtccatcaccagggcgaggttcgaggagctgtgctccgacctgttccgaagcaccctggagcccgtggagaaggctctgcgcgacgccaagctggacaaggcccagattcacgacctggtcctggtcgggggctccacccgcatccccaaggtgcagaagctgctgcaggacttcttcaacgggcgcgacctgaacaagagcatcaaccccgacgaggctgtggcctacggggcggcggtgcaggcggccatcctgatgggggacaagtccgagaacgtgcaggacctgctgctgctggacgtggctcccctgtcgctggggctggagacggccggaggcgtgatgactgccctgatcaagcgcaactccaccatccccaccaagcagacgcagatcttcaccacctactccgacaaccaacccggggtgctgatccaggtgtacgagggcgagagggccatgacgaaagacaacaatctgttggggcgcttcgagctgagcggcatccctccggcccccaggggcgtgccccagatcgaggtgaccttcgacatcgatgccaacggcatcctgaacgtcacggccacggacaagagcaccggcaaggccaacaagatcaccatcaccaacgacaagggccgcctgagcaaggaggagatcgagcgcatggtgcaggaggcggagaagtacaaagcggaggacgaggtgcagcgcgagagggtgtcagccaagaacgccctggagtcctacgccttcaacatgaagagcgccgtggaggatgaggggctcaagggcaagatcagcgaggccgacaagaagaaggtgctggacaagtgtcaagaggtcatctcgtggctggacgccaacaccttggccgagaaggacgagtttgagcacaagaggaaggagctggagcaggtgtgtaaccccatcatcagcggactgtaccagggtgccggtggtcccgggcctgggggcttcggggctcagggtcccaagggagggtctgggtcaggccccaccattgaggaggtagattaggggcctttccaagattgctgtttttgttttggagcttcaagactttgcatttcctagtatttctgtttgtcagttctcaatttcctgtgtttgcaatgttgaaattttttggtgaagtactgaacttgctttttttccggtttctacatgcagagatgaatttatactgccatcttacgactatttcttctttttaatacacttaactcaggccattttttaagttggttacttcaaagtaaataaactttaaaattcaaaaaaaaaaaagaaaaagagacgccaagcacaaaacacagcgaggaacagacgaaacaagcgggggggggggcagaaaaccccggagggggcgcaacggggcaccacaattgagacaagaggccccaaagaggagcacaataaggacgaagaggggcagaaaaaacaacgcagagggagaaagatccacggacctcgggagagaccaacagggggggacaagtggaccacaccagcgaataaaccccccggaggaaaaacacgggggagggaggcacacagccaatctgcggccgcgaacggctcggggaatttaatatgcagggaacgaagacagcacgacaacagacgcccccagccaagcaagagccacacgaagaccgaccagagaccaacacagcccgccagaaccggcgacacaccacaccaccgcgtgacaccccgcgcagcaagaccagcaacacaaccgcagcacagaaagaa

SEQ ID NO: 438154 - DNA, 2556 bp, Homo sapiens
  misc_feature (2374)..(2374): n is a, c, g, or t
  misc_feature (2386)..(2387): n is a, c, g, or t
  misc_feature (2520)..(2520): n is a, c, g, or t
  misc_feature (2522)..(2522): n is a, c, g, or t
  misc_feature (2531)..(2531): n is a, c, g, or t
tgcccacaactgcgcaggcccagcaagcccccacaattaaaagcccagcgccgacccttcctgtcaattaggcgctgaagcgcaggcggtcagcatcgccatggagaccaacacccttcccaccgccactcccccttcctctcagggtccctgtcccctccagtgaatcccagaagactctggagagttctgagcagggggcggcactctggcctctgattggtccaaggaaggctggggggcaggacgggaggcgaaacccctggaatattcccgacctggcagcctcatcgagctcggtgattggctcagaagggaaaaggcgggtctccgtgacgacttataaaagcccaggggcaagcggtccggataacggctagcctgaggagctgctgcgacagtccactacctttttcgagagtgactcccgttgtcccaaggcttcccagagcgaacctgtgcggctgcaggcaccggcgcgtcgagtttccggcgtccggaaggaccgagctcttctcgcggatccagtgttccgtttccagcccccaatctcagagcggagccgacagagagcagggaaccggcatggccaaagccgcggcgatcggcatcgacctgggcaccacctactcctgcgtgggggtgttccaacacggcaaggtggagatcatcgccaacgaccagggcaaccgcaccacccccagctacgtggccttcacggacaccgagcggctcatcggggatgcggccaagaaccaggtggcgctgaacccgcagaacaccgtgtttgacgcgaagcggctgatcggccgcaagttcggcgacccggtggtgcagtcggacatgaagcactggcctttccaggtgatcaacgacggagacaagcccaaggtgcaggtgagctacaagggggagaccaaggcattctaccccgaggagatctcgtccatggtgctgaccaagatgaaggagatcgccgaggcgtacctgggctacccggtgaccaacgcggtgatcaccgtgccggcctacttcaacgactcgcagcgccaggccaccaaggatgcgggtgtgatcgcggggctcaacgtgctgcggatcatcaacgagcccacggccgccgccatcgcctacggcctggacagaacgggcaagggggagcgcaacgtgctcatctttgacctgggcgggggcaccttcgacgtgtccatcctgacgatcgacgacggcatcttcgaggtgaaggccacggccggggacacccacctgggtggggaggactttgacaacaggctggtgaaccacttcgtggaggagttcaagagaaaacacaagaaggacatcagccagaacaagcgagccgtgaggcggctgcgcaccgcctgcgagagggccaagaggaccctgtcgtccagcacccaggccagcctggagatcgactccctgtttgagggcatcgacttctacacgtccatcaccagggcgaggttcgaggagctgtgctccgacctgttccgaagcaccctggagcccgtggagaaggctctgcgcgacgccaagctggacaaggcccagattcacgacctggtcctggtcgggggctccacccgcatccccaaggtgcagaagctgctgcaggacttcttcaacgggcgcgacctgaacaagagcatcaaccccgacgaggctgtggcctacggggcggcggtgcaggcggccatcctgatgggggacaagtccgagaacgtgcaggacctgctgctgctggacgtggctcccctgtcgctggggctggagacggccggaggcgtgatgactgccctgatcaagcgcaactccaccatccccaccaagcagacgcagatcttcaccacctactccgacaaccaacccggggtgctgatccaggtgtacgagggcgagagggccatgacgaaagacaacaatctgttggggcgcttcgagctgagcggcatccctccggcccccaggggcgtgccccagatcgaggtgaccttcgacatcgatgccaacggcatcctgaacgtcacggccacggacaagagcaccggcaaggccaacaagatcaccatcaccaacgacaagggccgcctgagcaaggaggagatcgagcgcatggtgcaggaggcggagaagtacaaagcggaggacgaggtgcagcgcgagagggtgtcagccaagaacgccctggagtcctacgccttcaacatgaagagcgccgtggaggatgaggggctcaagggcaagatcagcgaggccgacaagaagaaggtgctggacaagtgtcaagaggtcatctcgtggctggacgccaacaccttggccgagaaggacgagtttgagcacaagaggngggaggagaggnnttcctctcctcccacctcgtaggaagacatcagacaatattatatgatatgttagaaggtttgtgtgaatgcatttattatatgtgtttctctggctacttacagcagcataggggcaggctggagtgggtangngctagattntactaggacgtataatggggcgagg

SEQ ID NO: 438155 - DNA, 629 bp, Homo sapiens
tgatctagaggatcccatctcaggccaggacgaggtgcagcgcgagagggtgtcagccaagaacgccctggagtcctacgccttcaacatgaagagcgccgtggaggatgaggggctcaagggcaagatcagcgaggccgacaagaagaaggtgctggacaagtgtcaagaggtcatctcgtggctggacgccaacaccttggccgagaaggacgagtttgagcacaagaggaaggagctggagcaggtgtgtaaccccatcatcagcggactgtaccagggtgccggtggtcccgggcctgggggcttcggggctcagggtcccaagggagggtctgggtcaggccccaccattgaggaggtagattaggggcctttccaagattgctgtttttgttttggagcttcaagactttgcatttcctagtatttctgtttgtcagttctcaatttcctgtgtttgcaatgttgaaattttttggtgaagtactgaacttgctttttttccggtttctacatgcagagatgaatttatactgccatcttacgactatttcttctttttaatacacttaactcaggccattttttaagttggttacttcaaagtaaataaactttaaaattca

SEQ ID NO: 438156 - DNA, 1928 bp, Homo sapiens
tgcccacaactgcgcaggcccagcaagcccccacaattaaaagcccagcgccgacccttcctgtcaattaggcgctgaagcgcaggcggtcagcatcgccatggagaccaacacccttcccaccgccactcccccttcctctcagggtccctgtcccctccagtgaatcccagaagactctggagagttctgagcagggggcggcactctggcctctgattggtccaaggaaggctggggggcaggacgggaggcgaaacccctggaatattcccgacctggcagcctcatcgagctcggtgattggctcagaagggaaaaggcgggtctccgtgacgacttataaaagcccaggggcaagcggtccggataacggctagcctgaggagctgctgcgacagtccactacctttttcgagagtgactcccgttgtcccaaggcttcccagagcgaacctgtgcggctgcaggcaccggcgcgtcgagtttccggcgtccggaaggaccgagctcttctcgcggatccagtgttccgtttccagcccccaatctcagagcggagccgacagagagcagggaaccggcatggccaaagccgcggcgatcggcatcgacctgggcaccacctactcctgcgtgggggtgttccaacacggcaaggtggagatcatcgccaacgaccagggcaaccgcaccacccccagctacgtggccttcacggacaccgagcggctcatcggggatgcggccaagaaccaggtggcgctgaacccgcagaacaccgtgtttgacgcgaagcggctgatcggccgcaagttcggcgacccggtggtgcagtcggacatgaagcactggcctttccaggtgatcaacgacggagacaagcccaaggtgcaggtgagctacaagggggagaccaaggcattctaccccgaggagatctcgtccatggtgctgaccaagatgaaggagatcgccgaggcgtacctgggctacccggtgaccaacgcggtgatcaccgtgccggcctacttcaacgactcgcagcgccaggccaccaaggatgcgggtgtgatcgcggggctcaacgtgctgcggatcatcaacgagcccacggccgccgccatcgcctacggcctggacagaacgggcaagggggagcgcaacgtgctcatctttgacctgggcgggggcaccttcgacgtgtccatcctgacgatcgacgacggcatcttcgaggtgaaggccacggccggggacacccacctgggtggggaggactttgacaacaggctggtgaaccacttcgtggaggagttcaagagaaaacacaagaaggacatcagccagaacaagcgagccgtgaggcggctgcgcaccgcctgcgagagggccaagaggaccctgtcgtccagcacccaggccagcctggagatcgactccctgtttgagggcatcgacttctacacgtccatcaccagggcgaggttcgaggagctgtgctccgacctgttccgaagcaccctggagcccgtggagaaggctctgcgcgacgccaagctggacaaggcccagattcacgacctggtcctggtcgggggctccacccgcatccccaaggtgcagaagctgctgcaggacttcttcaacgggcgcgacctgaacaagagcatcaaccccgacgaggctgtggcctacggggcggcggtgcaggcggccatcctgatgggggacaagtccgagaacgtgcaggacctgctgctgctggacgtggctcccctgtcgctgggggcttggaaggacgggccggaagggccgtgaatggactttggccccttggaattcaaggcgccaaattcccaaccaaatcccccacacaaaggcaaggaacgccagaattctttcaacccaacctaaattcccggaaa

SEQ ID NO: 438157 - DNA, 4331 bp, Homo sapiens
ggaggcgaaggggcggcgggaaccgggcctggcccgtgtgtgtcctgggggcctggcccaggccgccgctgtacggtgagtcccagggaggcggatctgggccccgggaaggacaccctcctggatttgccccgtaggcccggcccgggcccctcaggagcagaacagccttggtgaggtggacaagaggggacctcgcgagcagacgcgcgccagcgacagcagccccgccccggcctctggggagccccaggagggtctaccagccacagtctctgcacgtttccaagagcagcagaaaatgaacacattgcagtcgaatccagcgggcattttctagcccctacctcccaggaccctttgtctgcctttgacatctgttacttccaaactgatactttctccatggagtctctcttttcttggcttttaaaaagattcgtctgtctgcagactcgtgaatgacgtctaccgcgtgtataatcgacaccagtatccatttgttgttcttaacatttctgttgattcaggtaacttaataaaaatgcatgcagcggatttggaaaagcccatggtagaaaagcaggatcaatccccttcattaaggactggagaagaaaaaagggacgtgtccatttccagactgcgagaggccttttctcttcgtcacacaacagagaacaagcctcacagcccaaagactccagaaccaagaaggagccctctaggacagaaaaggggtatgtcgtcttctagcacttcagatgccatctctgacaaaggcgtcctgagacctcagaaagaggcagtgagttccagtcagggacccagtgaccctacggacagagcggaggtggagaaggactcggggcatggcagcacttccgtggattctgaggggttcagcatcccagacacgggcagtcactgcagcagcgagtgtgtggccagcaccccaggggacaggggctcgcaggaacatgtggactctcaggagaaagcgcctgaaactgacgactctttttcagatgtggactgccattcaaaccaggaagataccggatgtaaatttcaggttttgcctcagccaactaatctcacatccccaaacacaaaagtgttttaagaaagaagaaattctttccaattctgacattcgtcaaaagttagtaaatactcagaacgtgtcagcttctcaggttgatgtagctgtgaaaattaataagaaagttgtgcccctgaacttttctgagttctttagctaaacgaataaagcagttacatcatgaagcacagcaaagtgaaggggaacagaattacaggaagtttagggcaaggatttgtcctggagaaaatcaagcagccgaagatgaactaagaaaagagataagctcagaccaccaggtgagaaccagaaaacgtccatggctgctttaacagagccatttcttgtcgtcaccgcgctgatactgcggaaaatccattttcaccggatttaattgtgtggaactgagaatgacagtgtcaatttctcgtgtgaagtaaaacgatgtttgcagaaatggaaatcattggtcagtttaacctgggatttataataaccaaactgaatgaggatatcttcatagtggaccagcatgccacggacgagaagtataacttcgagatgctgcagcagcacaccgtgctccaggggcagaggctcatagcacctcagactctcaacttaactgctgttaatgaagctgttctgatagaaaatctggaaatatttagaaagaatggcttcgattttgttatcgatgaaaatgctccagtcactgaaagggctaaactgatttccttgccaactagtaaaagctggaccttcggaccccaggacgtcgatgaactgatcttcatgctgagcgacagccctggggtcatgtgccggccttcccgagtcaagcagatgtttgcctccagagcctgccggaagtcggtgatgattgggactgctcttaacacaagcgagatgaagaaactgatcacccacatgggggagatggaccacccctggaactgtccccatggaaggccaaccatgagacacatcgccaacctgggtgtcatttctcagaactgaccgtagtcactgtatggaataattggttttatcgcagatttttatgttttgaaagacagagtcttcactaaccttttttgttttaaaatgaaacctgctacttaaaaaaaatacacatcacacccatttaaaagtgatcttgagaaccttttcaaaccagatggagcattgcttgcaaattttttttctctatgtttgcatgcgctcgtgtgtgtgtgtccaggcaagaacacattttataaaaataagaacacttgggctgggcatggtggctcatgcctgtgatcgcagcactttgggaggccgaggccggcagatcacctgagatcagaagttcgagaccagcctgaccaacatggagaaaccctgcctctactaaaaatacaaaattagccaggtgtgctggcgcatgcctgtaatccccgctacccaggaggctgaggcaggagaatcgcttgaacccgggagacggaggttgcagtgaaccgagattgcgccactgcgctccagcctgggtgagatagagcaagactgtgtctcaaaaaacaaaacaaaacaaaacaaaacaaaaaaaaccaaaccactttggaagttactcaggcctctgctctggctggacatagtttagtctataactttcaacccttaacaataattaaattcatctttgtttaatttcataaatttaaaagtagggtccttttcagttagtgattctcagccctgattcacattaaatttttaaacacgggggattctctgcccggctggaagaaaatgactggatgggacaggggtcactatttgaaacattcctctgtgcggccaaggtcgcaaaatgctgtcctcgcaggggaacaaaaagagtttgatttcccataatttgatgctgtgatttggtttcctcaggatgtgaactgtagaacattccagttactggccttgaatggttctgggaatataagaatccctgtctgtcttttcaaatagttttcatggaaccttgtcctgtttgaacttggctgccctgctgcccccaccccttctccagactgtgggcggctccccttcctgctttagaatccttcagatggaggaggcagtacagtagtcactgtgccatcgtgtctggcactgtgctggcgtggtctgcaggatcccacttatgaactctccagattgggagctgtggcaggataacagcccccaagacagctgtgtcctaatccccagaacctgtgaccacgctgcctcacgtggcagaagggactcggcaggtgtgattgagtgaaggatcttttttttttttttctttgagatgaagtttcgctcttgttgcccaggctggagttcaatagcatgatctcagctcactgcagcctctgcctcccaggttcaagtgattctcccacctcagcctcccgagtagctgggattacaggtgtccagaaccatactggctaatttttgtatttttagtagagacagggtttcaccatgttgaccaggctggtctcgaactcctgacctcaggtgatccgaccgcctcggcctcccaaagtgctgggattacaggtgtgagccatcatgcctggctgagttaaggatcttgcaacagagagattatcctggattgtctgggtgggcccagtccattgggtgagtccttcaaaggtggagacctttccctgctggccagagagaggctgccttgctggttttggagatggaaggaggtaccactagtcaaggattgcaagcagtctctagaacagggattccaacactccggacacagaccagtagtggtccatggcctattaggaagtggggtgcacagcaggttaggggccggcaagccagcgaagcttcatctgtatttatagccactccccgtcgctggcgttaccacccgagctccgcctcctgtcacatcagcggtgggcattagattctcatagcagcacgagccctattgtgaactgcacacacgagggatgtaggttgcacgctccttatgagaatctgatgcctgatgatctgtcactgtctcccgtcacccccagatggggctgtctagttgcaggaaaacaagctcagggctcccactgagtctctgtgatggtgagttgtagaattatttaattatatgttacaatgtaataataatagaaataaagtgcacaataaatgcaatgcacttgaa

SEQ ID NO: 438158 - DNA, 4454 bp, Homo sapiens
ggaggcgaaggggcggcgggaaccgggcctggcccgtgtgtgtcctgggggcctggcccaggccgccgctgtacggtgagtcccagggaggcggatctgggccccgggaaggacaccctcctggatttgccccgtaggcccggcccgggcccctcaggagcagaacagccttggtgaggtggacaagaggggacctcgcgagcagacgcgcgccagcgacagcagccccgccccggcctctggggagccccaggaggatttcgaccgcctctaaacgtccgtcagcatctctgttctctcatttaagtgtctgctgattccccccttagatctgccctggagactggtagtaatgcaggaacagtctgcagggattctctcttgctgcctcagttgctaggggaagagactgggccttagcaggtctaccagccacagtctctgcacgtttccaagagcagcagaaaatgaacacattgcagtcgaatccagcgggcattttctagcccctacctcccaggaccctttgtctgcctttgacatctgttacttccaaactgatactttctccatggagtctctcttttcttggcttttaaaaagattcgtctgtctgcagactcgtgaatgacgtctaccgcgtgtataatcgacaccagtatccatttgttgttcttaacatttctgttgattcaggtaacttaataaaaatgcatgcagcggatttggaaaagcccatggtagaaaagcaggatcaatccccttcattaaggactggagaagaaaaaagggacgtgtccatttccagactgcgagaggccttttctcttcgtcacacaacagagaacaagcctcacagcccaaagactccagaaccaagaaggagccctctaggacagaaaaggggtatgtcgtcttctagcacttcagatgccatctctgacaaaggcgtcctgagacctcagaaagaggcagtgagttccagtcagggacccagtgaccctacggacagagcggaggtggagaaggactcggggcatggcagcacttccgtggattctgaggggttcagcatcccagacacgggcagtcactgcagcagcgagtgtgtggccagcaccccaggggacaggggctcgcaggaacatgtggactctcaggagaaagcgcctgaaactgacgactctttttcagatgtggactgccattcaaaccaggaagataccggatgtaaatttcaggttttgcctcagccaactaatctcacatccccaaacacaaaagtgttttaagaaagaagaaattctttccaattctgacattcgtcaaaagttagtaaatactcagaacgtgtcagcttctcaggttgatgtagctgtgaaaattaataagaaagttgtgcccctgaacttttctgagttctttagctaaacgaataaagcagttacatcatgaagcacagcaaagtgaaggggaacagaattacaggaagtttagggcaaggatttgtcctggagaaaatcaagcagccgaagatgaactaagaaaagagataagctcagaccaccaggtgagaaccagaaaacgtccatggctgctttaacagagccatttcttgtcgtcaccgcgctgatactgcggaaaatccattttcaccggatttaattgtgtggaactgagaatgacagtgtcaatttctcgtgtgaagtaaaacgatgtttgcagaaatggaaatcattggtcagtttaacctgggatttataataaccaaactgaatgaggatatcttcatagtggaccagcatgccacggacgagaagtataacttcgagatgctgcagcagcacaccgtgctccaggggcagaggctcatagcacctcagactctcaacttaactgctgttaatgaagctgttctgatagaaaatctggaaatatttagaaagaatggcttcgattttgttatcgatgaaaatgtaaaagctggaccttcggaccccaggacgtcgatgaactgatcttcatgctgagcgacagccctggggtcatgtgccggccttcccgagtcaagcagatgtttgcctccagagcctgccggaagtcggtgatgattgggactgctcttaacacaagcgagatgaagaaactgatcacccacatgggggagatggaccacccctggaactgtccccatggaaggccaaccatgagacacatcgccaacctgggtgtcatttctcagaactgaccgtagtcactgtatggaataattggttttatcgcagatttttatgttttgaaagacagagtcttcactaaccttttttgttttaaaatgaaacctgctacttaaaaaaaatacacatcacacccatttaaaagtgatcttgagaaccttttcaaaccagatggagcattgcttgcaaattttttttctctatgtttgcatgcgctcgtgtgtgtgtgtccaggcaagaacacattttataaaaataagaacacttgggctgggcatggtggctcatgcctgtgatcgcagcactttgggaggccgaggccggcagatcacctgagatcagaagttcgagaccagcctgaccaacatggagaaaccctgcctctactaaaaatacaaaattagccaggtgtgctggcgcatgcctgtaatccccgctacccaggaggctgaggcaggagaatcgcttgaacccgggagacggaggttgcagtgaaccgagattgcgccactgcgctccagcctgggtgagatagagcaagactgtgtctcaaaaaacaaaacaaaacaaaacaaaacaaaaaaaaccaaaccactttggaagttactcaggcctctgctctggctggacatagtttagtctataactttcaacccttaacaataattaaattcatctttgtttaatttcataaatttaaaagtagggtccttttcagttagtgattctcagccctgattcacattaaatttttaaacacgggggattctctgcccggctggaagaaaatgactggatgggacaggggtcactatttgaaacattcctctgtgcggccaaggtcgcaaaatgctgtcctcgcaggggaacaaaaagagtttgatttcccataatttgatgctgtgatttggtttcctcaggatgtgaactgtagaacattccagttactggccttgaatggttctgggaatataagaatccctgtctgtcttttcaaatagttttcatggaaccttgtcctgtttgaacttggctgccctgctgcccccaccccttctccagactgtgggcggctccccttcctgctttagaatccttcagatggaggaggcagtacagtagtcactgtgccatcgtgtctggcactgtgctggcgtggtctgcaggatcccacttatgaactctccagattgggagctgtggcaggataacagcccccaagacagctgtgtcctaatccccagaacctgtgaccacgctgcctcacgtggcagaagggactcggcaggtgtgattgagtgaaggatcttttttttttttttctttgagatgaagtttcgctcttgttgcccaggctggagttcaatagcatgatctcagctcactgcagcctctgcctcccaggttcaagtgattctcccacctcagcctcccgagtagctgggattacaggtgtccagaaccatactggctaatttttgtatttttagtagagacagggtttcaccatgttgaccaggctggtctcgaactcctgacctcaggtgatccgaccgcctcggcctcccaaagtgctgggattacaggtgtgagccatcatgcctggctgagttaaggatcttgcaacagagagattatcctggattgtctgggtgggcccagtccattgggtgagtccttcaaaggtggagacctttccctgctggccagagagaggctgccttgctggttttggagatggaaggaggtaccactagtcaaggattgcaagcagtctctagaacagggattccaacactccggacacagaccagtagtggtccatggcctattaggaagtggggtgcacagcaggttaggggccggcaagccagcgaagcttcatctgtatttatagccactccccgtcgctggcgttaccacccgagctccgcctcctgtcacatcagcggtgggcattagattctcatagcagcacgagccctattgtgaactgcacacacgagggatgtaggttgcacgctccttatgagaatctgatgcctgatgatctgtcactgtctcccgtcacccccagatggggctgtctagttgcaggaaaacaagctcagggctcccactgagtctctgtgatggtgagttgtagaattatttaattatatgttacaatgtaataataatagaaataaagtgcacaataaatgcaatgcacttgaa

SEQ ID NO: 438159 - DNA, 4400 bp, Homo sapiens
ggaggcgaaggggcggcgggaaccgggcctggcccgtgtgtgtcctgggggcctggcccaggccgccgctgtacggtgagtcccagggaggcggatctgggccccgggaaggacaccctcctggatttgccccgtaggcccggcccgggcccctcaggagcagaacagccttggtgaggtggacaagaggggacctcgcgagcagacgcgcgccagcgacagcagccccgccccggcctctggggagccccaggaggatttcgaccgcctctaaacgtccgtcagcatctctgttctctcatttaagtgtctgctgattccccccttagatctgccctggagactggtagtaatgcaggaacagtctgcagggattctctcttgctgcctcagttgctaggggaagagactgggccttagcaggtctaccagccacagtctctgcacgtttccaagagcagcagaaaatgaacacattgcagtcgaatccagcgggcattttctagcccctacctcccaggaccctttgtctgcctttgacatctgttacttccaaactgatactttctccatggagtctctcttttcttggcttttaaaaagattcgtctgtctgcagactcgtgaatgacgtctaccgcgtgtataatcgacaccagtatccatttgttgttcttaacatttctgttgattcaggtaacttaataaaaatgcatgcagcggatttggaaaagcccatggtagaaaagcaggatcaatccccttcattaaggactggagaagaaaaaagggacgtgtccatttccagactgcgagaggccttttctcttcgtcacacaacagagaacaagcctcacagcccaaagactccagaaccaagaaggagccctctaggacagaaaaggggtatgtcgtcttctagcacttcagatgccatctctgacaaaggcgtcctgagacctcagaaagaggcagtgagttccagtcagggacccagtgaccctacggacagagcggaggtggagaaggactcggggcatggcagcacttccgtggattctgaggggttcagcatcccagacacgggcagtcactgcagcagcgagtgtgtggccagcaccccaggggacaggggctcgcaggaacatgtggactctcaggagaaagcgcctgaaactgacgactctttttcagatgtggactgccattcaaaccaggaagataccggatgtaaatttcaggttttgcctcagccaactaatctcacatccccaaacacaaaagtgttttaagaaagaagaaattctttccaattctgacattcgtcaaaagttagtaaatactcagaacgtgtcagcttctcaggttgatgtagctgtgaaaattaataagaaagttgtgcccctgaacttttctgagttctttagctaaacgaataaagcagttacatcatgaagcacagcaaagtgaaggggaacagaattacaggaagtttagggcaaggatttgtcctggagaaaatcaagcagccgaagatgaactaagaaaagagataagctcagaccaccaggtgagaaccagaaaacgtccatggctgctttaacagagccatttcttgtcgtcaccgcgctgatactgcggaaaatccattttcaccggatttaattgtgtggaactgagaatgacagtgtcaatttctcgtgtgaagtaaaacgatgtttgcagaaatggaaatcattggtcagtttaacctgggatttataataaccaaactgaatgaggatatcttcatagtggaccagcatgccacggacgagaagtataacttcgagatgctgcagcagcacaccgtgctccaggggcagaggctcatagcacctcagactctcaacttaactgctgttaatgaagctgttctgatagaaaatctggaaatatttagaaagaatggcttcgattttgttatcgatgaaaatgctccagtcactgaaagggctaaactgatttccttgccaactagtaaaagctggaccttcggaccccaggacgtcgatgaactgatcttcatgctgagcgacagccctggggtcatgtgccggccttcccgagtcaagcagatgtttgcctccagagcctgccggaagtcggtgatgattgggactgctcttaacacaagcgagatgaagaaactgatcacccacatgggggagatggaccacccctggaactgtccccatggaaggccaaccatgagacacatcgccaacctgggtgtcatttctcagaactgaccgtagtcactgtatggaataattggttttatcgcagatttttatgttttgaaagacagagtcttcactaaccttttttgttttaaaatgaaacctgctacttaaaaaaaatacacatcacacccatttaaaagtgatcttgagaaccttttcaaaccagatggagcattgcttgcaaattttttttctctatgtttgcatgcgctcgtgtgtgtgtgtccaggcaagaacacattttataaaaataagaacacttgggctgggcatggtggctcatgcctgtgatcgcagcactttgggaggccgaggccggcagatcacctgagatcagaagttcgagaccagcctgaccaacatggagaaaccctgcctctactaaaaatacaaaattagccaggtgtgctggcgcatgcctgtaatccccgctacccaggaggctgaggcaggagaatcgcttgaacccgggagacggaggttgcagtgaaccgagattgcgccactgcgctccagcctgggtgagatagagcaagactgtgtctcaaaaaacaaaacaaaacaaaacaaaacaaaaaaaaccaaaccactttggaagttactcaggcctctgctctggctggacatagtttagtctataactttcaacccttaacaataattaaattcatctttgtttaatttcataaatttaaaagtagggtccttttcagttagtgattctcagccctgattcacattaaatttttaaacacgggggattctctgcccggctggaagaaaatgactggatgggacaggggtcactatttgaaacattcctctgtgcggccaaggtcgcaaaatgctgtcctcgcaggggaacaaaaagagtttgatttcccataatttgatgctgtgatttggtttcctcaggatgtgaactgtagaacattccagttactggccttgaatggttctgggaatataagaatccctgtctgtcttttcaaatagttttcatggaaccttgtcctgtttgaacttggctgccctgctgcccccaccccttctccagactgtgggcggctccccttcctgctttagaatccttcagatggaggaggcagtacagtagtcactgtgccatcgtgtctggcactgtgctggcgtggtctgcaggatcccacttatgaactctccagattgggagctgtggcaggataacagcccccaagacagctgtgtcctaatccccagaacctgtgaccacgctgcctcacgtggcagaagggactcggcaggtgtgattgagtgaaggatcttttttttttttttctttgagatgaagtttcgctcttgttgcccaggctggagttcaatagcatgatctcagctcactgcagcctctgcctcccaggttcaagtgattctcccacctcagcctcccgagtagctgggattacaggtgtccagaaccatactggctaatttttgtatttttagtagagacagggtttcaccatgttgaccaggctggtctcgaactcctgacctcaggtgatccgaccgcctcggcctcccaaagtgctgggattacaggtgtgagccatcatgcctggctgagttaaggatcttgcaacagagagattatcctggattgtctgggtgggcccagtccattgggtgagtccttcaaaggtggagacctttccctgctggccagagagaggctgccttgctggttttggagatggaaggaggtaccactagtcaaggattgcaagcagtctctagaacagggattccaacactccggacacagaccagtagtggtccatggcctattaggaagtggggtgcacagcaggttaggggccggcaagccagcgaagcttcatctgtatttatagccactccccgtcgctggcgttaccacccgagctccgcctcctgtcacatcagcggtgggcattagattctcatagcagcacgagccctattgtgaactgcacacacgagggatgtaggttgcacgctccttatgagaatctgatgcccaccgctgatgtgacaggaggcggagctcgggctcccactgagtctctgtgatcgtgggaagtaaggaccagctat

SEQ ID NO: 438160 - DNA, 2697 bp, Homo sapiens
ggaggcgaaggggcggcgggaaccgggcctggcccgtgtgtgtcctgggggcctggcccaggccgccgctgtacggtgagtcccagggaggcggatctgggccccgggaaggacaccctcctggatttgccccgtaggcccggcccgggcccctcaggagcagaacagccttggtgaggtggacaagaggggacctcgcgagcagacgcgcgccagcgacagcagccccgccccggcctctggggagccccaggaggatttcgaccgcctctaaacgtccgtcagcatctctgttctctcatttaagtgtctgctgattccccccttagatctgccctggagactggtagtaatgcaggaacagtctgcagggattctctcttgctgcctcagttgctaggggaagagactgggccttagcaggtctaccagccacagtctctgcacgtttccaagagcagcagaaaatgaacacattgcagtcgaatccagcgggcattttctagcccctacctcccaggaccctttgtctgcctttgacatctgttacttccaaactgatactttctccatggagtctctcttttcttggcttttaaaaagattcgtctgtctgcagactcgtgaatgacgtctaccgcgtgtataatcgacaccagtatccatttgttgttcttaacatttctgttgattcaggtaacttaataaaaatgcatgcagcggatttggaaaagcccatggtagaaaagcaggatcaatccccttcattaaggactggagaagaaaaaagggacgtgtccatttccagactgcgagaggccttttctcttcgtcacacaacagagaacaagcctcacagcccaaagactccagaaccaagaaggagccctctaggacagaaaaggggtatgtcgtcttctagcacttcagatgccatctctgacaaaggcgtcctgagacctcagaaagaggcagtgagttccagtcagggacccagtgaccctacggacagagcggaggtggagaaggactcggggcatggcagcacttccgtggattctgaggggttcagcatcccagacacgggcagtcactgcagcagcgagtgtgtggccagcaccccaggggacaggggctcgcaggaacatgtggactctcaggagaaagcgcctgaaactgacgactctttttcagatgtggactgccattcaaaccaggaagataccggatgtaaatttcaggttttgcctcagccaactaatctcacatccccaaacacaaaagtgttttaagaaagaagaaattctttccaattctgacattcgtcaaaagttagtaaatactcagaacgtgtcagcttctcaggttgatgtagctgtgaaaattaataagaaagttgtgcccctgaacttttctgagttctttagctaaacgaataaagcagttacatcatgaagcacagcaaagtgaaggggaacagaattacaggaagtttagggcaaggatttgtcctggagaaaatcaagcagccgaagatgaactaagaaaagagataagctcagaccaccaggtgagaaccagaaaacgtccatggctgctttaacagagccatttcttgtcgtcaccgcgctgatactgcggaaaatccattttcaccggatttaattgtgtggaactgagaatgacagtgtcaatttctcgtgtgaagtaaaacgatgtttgcagaaatggaaatcattggtcagtttaacctgggatttataataaccaaactgaatgaggatatcttcatagtggaccagcatgccacggacgagaagtataacttcgagatgctgcagcagcacaccgtgctccaggggcagaggctcatagcacctcagactctcaacttaactgctgttaatgaagctgttctgatagaaaatctggaaatatttagaaagaatggcttcgattttgttatcgatgaaaatgctccagtcactgaaagggctaaactgatttccttgccaactagtaaaagctggaccttcggaccccaggacgtcgatgaactgatcttcatgctgagcgacagccctggggtcatgtgccggccttcccgagtcaagcagatgtttgcctccagagcctgccggaagtcggtgatgattgggactgctcttaacacaagcgagatgaagaaactgatcacccacatgggggagatggaccacccctggaactgtccccatggaaggccaaccatgagacacatcgccaacctgggtgtcatttctcagaactgaccgtagtcactgtatggaataattggttttatcgcagatttttatgttttgaaagacagagtcttcactaaccttttttgttttaaaatgaaacctgctacttaaaaaaaatacacatcacacccatttaaaagtgatcttgagaaccttttcaaaccagatggagcattgcttgcaaattttttttctctatgtttgcatgcgctcgtgtgtgtgtgtccaggcaagaacacattttataaaaataagaacacttgggctgggcatggtggctcatgcctgtgatcgcagcactttgggaggccgaggccggcagatcacctgagatcagaagttcgagaccagcctctgctcccaggtcaaagtgaatctgcccactcggctccgatagcgggatacaggtgcc

SEQ ID NO: 438161 - DNA, 262 bp, Homo sapiens
tgttggccaaggcaggtggatcacttgaggccagaatttgagaccagcctggccaacatggcgaaaccctgtatcactcttttaggcccttctgagtgtttgcaggctgagtgttcacagggtgttagcctattgagctttcttttgtggttcttacgcaggagattcctgcctttgcaggccagagcactcatgacttcagtgacctgcttctccccctctaggtctaccagccacagtctctgcacgtttccaagagcag

SEQ ID NO: 438162 - DNA, 4497 bp, Homo sapiens
ggaggcgaaggggcggcgggaaccgggcctggcccgtgtgtgtcctgggggcctggcccaggccgccgctgtacggtgagtcccagggaggcggatctgggccccgggaaggacaccctcctggatttgccccgtaggcccggcccgggcccctcaggagcagaacagccttggtgaggtggacaagaggggacctcgcgagcagacgcgcgccagcgacagcagccccgccccggcctctggggagccccaggaggatttcgaccgcctctaaacgtccgtcagcatctctgttctctcatttaagtgtctgctgattccccccttagatctgccctggagactggtagtaatgcaggaacagtctgcagggattctctcttgctgcctcagttgctaggggaagagactgggccttagcaggtctaccagccacagtctctgcacgtttccaagagcagcagaaaatgaacacattgcagtcgaatccagcgggcattttctagcccctacctcccaggaccctttgtctgcctttgacatctgttacttccaaactgatactttctccatggagtctctcttttcttggcttttaaaaagattcgtctgtctgcagactcgtgaatgacgtctaccgcgtgtataatcgacaccagtatccatttgttgttcttaacatttctgttgattcaggtaacttaataaaaatgcatgcagcggatttggaaaagcccatggtagaaaagcaggatcaatccccttcattaaggactggagaagaaaaaagggacgtgtccatttccagactgcgagaggccttttctcttcgtcacacaacagagaacaagcctcacagcccaaagactccagaaccaagaaggagccctctaggacagaaaaggggtatgtcgtcttctagcacttcagatgccatctctgacaaaggcgtcctgagacctcagaaagaggcagtgagttccagtcagggacccagtgaccctacggacagagcggaggtggagaaggactcggggcatggcagcacttccgtggattctgaggggttcagcatcccagacacgggcagtcactgcagcagcgagtgtgtggccagcaccccaggggacaggggctcgcaggaacatgtggactctcaggagaaagcgcctgaaactgacgactctttttcagatgtggactgccattcaaaccaggaagataccggatgtaaatttcaggttttgcctcagccaactaatctcacatccccaaacacaaaagtgttttaagaaagaagaaattctttccaattctgacattcgtcaaaagttagtaaatactcagaacgtgtcagcttctcaggttgatgtagctgtgaaaattaataagaaagttgtgcccctgaacttttctgagttctttagctaaacgaataaagcagttacatcatgaagcacagcaaagtgaaggggaacagaattacaggaagtttagggcaaggatttgtcctggagaaaatcaagcagccgaagatgaactaagaaaagagataagctcagaccaccaggtgagaaccagaaaacgtccatggctgctttaacagagccatttcttgtcgtcaccgcgctgatactgcggaaaatccattttcaccggatttaattgtgtggaactgagaatgacagtgtcaatttctcgtgtgaagtaaaacgatgtttgcagaaatggaaatcattggtcagtttaacctgggatttataataaccaaactgaatgaggatatcttcatagtggaccagcatgccacggacgagaagtataacttcgagatgctgcagcagcacaccgtgctccaggggcagaggctcatagcacctcagactctcaacttaactgctgttaatgaagctgttctgatagaaaatctggaaatatttagaaagaatggcttcgattttgttatcgatgaaaatgctccagtcactgaaagggctaaactgatttccttgccaactagtaaaagctggaccttcggaccccaggacgtcgatgaactgatcttcatgctgagcgacagccctggggtcatgtgccggccttcccgagtcaagcagatgtttgcctccagagcctgccggaagtcggtgatgattgggactgctcttaacacaagcgagatgaagaaactgatcacccacatgggggagatggaccacccctggaactgtccccatggaaggccaaccatgagacacatcgccaacctgggtgtcatttctcagaactgaccgtagtcactgtatggaataattggttttatcgcagatttttatgttttgaaagacagagtcttcactaaccttttttgttttaaaatgaaacctgctacttaaaaaaaatacacatcacacccatttaaaagtgatcttgagaaccttttcaaaccagatggagcattgcttgcaaattttttttctctatgtttgcatgcgctcgtgtgtgtgtgtccaggcaagaacacattttataaaaataagaacacttgggctgggcatggtggctcatgcctgtgatcgcagcactttgggaggccgaggccggcagatcacctgagatcagaagttcgagaccagcctgaccaacatggagaaaccctgcctctactaaaaatacaaaattagccaggtgtgctggcgcatgcctgtaatccccgctacccaggaggctgaggcaggagaatcgcttgaacccgggagacggaggttgcagtgaaccgagattgcgccactgcgctccagcctgggtgagatagagcaagactgtgtctcaaaaaacaaaacaaaacaaaacaaaacaaaaaaaaccaaaccactttggaagttactcaggcctctgctctggctggacatagtttagtctataactttcaacccttaacaataattaaattcatctttgtttaatttcataaatttaaaagtagggtccttttcagttagtgattctcagccctgattcacattaaatttttaaacacgggggattctctgcccggctggaagaaaatgactggatgggacaggggtcactatttgaaacattcctctgtgcggccaaggtcgcaaaatgctgtcctcgcaggggaacaaaaagagtttgatttcccataatttgatgctgtgatttggtttcctcaggatgtgaactgtagaacattccagttactggccttgaatggttctgggaatataagaatccctgtctgtcttttcaaatagttttcatggaaccttgtcctgtttgaacttggctgccctgctgcccccaccccttctccagactgtgggcggctccccttcctgctttagaatccttcagatggaggaggcagtacagtagtcactgtgccatcgtgtctggcactgtgctggcgtggtctgcaggatcccacttatgaactctccagattgggagctgtggcaggataacagcccccaagacagctgtgtcctaatccccagaacctgtgaccacgctgcctcacgtggcagaagggactcggcaggtgtgattgagtgaaggatcttttttttttttttctttgagatgaagtttcgctcttgttgcccaggctggagttcaatagcatgatctcagctcactgcagcctctgcctcccaggttcaagtgattctcccacctcagcctcccgagtagctgggattacaggtgtccagaaccatactggctaatttttgtatttttagtagagacagggtttcaccatgttgaccaggctggtctcgaactcctgacctcaggtgatccgaccgcctcggcctcccaaagtgctgggattacaggtgtgagccatcatgcctggctgagttaaggatcttgcaacagagagattatcctggattgtctgggtgggcccagtccattgggtgagtccttcaaaggtggagacctttccctgctggccagagagaggctgccttgctggttttggagatggaaggaggtaccactagtcaaggattgcaagcagtctctagaacagggattccaacactccggacacagaccagtagtggtccatggcctattaggaagtggggtgcacagcaggttaggggccggcaagccagcgaagcttcatctgtatttatagccactccccgtcgctggcgttaccacccgagctccgcctcctgtcacatcagcggtgggcattagattctcatagcagcacgagccctattgtgaactgcacacacgagggatgtaggttgcacgctccttatgagaatctgatgcctgatgatctgtcactgtctcccgtcacccccagatggggctgtctagttgcaggaaaacaagctcagggctcccactgagtctctgtgatggtgagttgtagaattatttaattatatgttacaatgtaataataatagaaataaagtgcacaataaatgcaatgcacttgaa

SEQ ID NO: 438163 - DNA, 4641 bp, Homo sapiens
atggcagttgaaaaacaactgccaactacattacataaaagttgaaatggacgtggagtgtggtggctcacacctgtaatcccagcactttgggaagctgaggcaggcagatcacgaggactgaaaagtaccaggagaacagtggccacgaggggccccaacagaggaagaaaccagtgagtgagccctcgtgggatctggttgttgaaaagcgtgcatcacctcccgcttcattctctctgtctctcccgctccaccatagccagacgtgcctgcttccacttcgccttctgccatgactgtccgtttcctgaggcctccccagccatgcttcctgtacggcctgcagaactgcccggcccgggcccctcaggagcagaacagccttggtgaggtggacaagaggggacctcgcgagcagacgcgcgccagcgacagcagccccgccccggcctctggggagccccaggaggatctgccctggagactggtagtaatgcaggaacagtctgcagggattctctcttgctgcctcagttgctaggggaagagactgggccttagcaggtctaccagccacagtctctgcacgtttccaagagcagcagaaaatgaacacattgcagtcgaatccagcgggcattttctagcccctacctcccaggaccctttgtctgcctttgacatctgttacttccaaactgatactttctccatggagtctctcttttcttggcttttaaaaagattcgtctgtctgcagactcgtgaatgacgtctaccgcgtgtataatcgacaccagtatccatttgttgttcttaacatttctgttgattcaggtaacttaataaaaatgcatgcagcggatttggaaaagcccatggtagaaaagcaggatcaatccccttcattaaggactggagaagaaaaaagggacgtgtccatttccagactgcgagaggccttttctcttcgtcacacaacagagaacaagcctcacagcccaaagactccagaaccaagaaggagccctctaggacagaaaaggggtatgtcgtcttctagcacttcagatgccatctctgacaaaggcgtcctgagacctcagaaagaggcagtgagttccagtcagggacccagtgaccctacggacagagcggaggtggagaaggactcggggcatggcagcacttccgtggattctgaggggttcagcatcccagacacgggcagtcactgcagcagcgagtgtgtggccagcaccccaggggacaggggctcgcaggaacatgtggactctcaggagaaagcgcctgaaactgacgactctttttcagatgtggactgccattcaaaccaggaagataccggatgtaaatttcaggttttgcctcagccaactaatctcacatccccaaacacaaaagtgttttaagaaagaagaaattctttccaattctgacattcgtcaaaagttagtaaatactcagaacgtgtcagcttctcaggttgatgtagctgtgaaaattaataagaaagttgtgcccctgaacttttctgagttctttagctaaacgaataaagcagttacatcatgaagcacagcaaagtgaaggggaacagaattacaggaagtttagggcaaggatttgtcctggagaaaatcaagcagccgaagatgaactaagaaaagagataagctcagaccaccaggtgagaaccagaaaacgtccatggctgctttaacagagccatttcttgtcgtcaccgcgctgatactgcggaaaatccattttcaccggatttaattgtgtggaactgagaatgacagtgtcaatttctcgtgtgaagtaaaacgatgtttgcagaaatggaaatcattggtcagtttaacctgggatttataataaccaaactgaatgaggatatcttcatagtggaccagcatgccacggacgagaagtataacttcgagatgctgcagcagcacaccgtgctccaggggcagaggctcatagcacctcagactctcaacttaactgctgttaatgaagctgttctgatagaaaatctggaaatatttagaaagaatggcttcgattttgttatcgatgaaaatgctccagtcactgaaagggctaaactgatttccttgccaactagtaaaagctggaccttcggaccccaggacgtcgatgaactgatcttcatgctgagcgacagccctggggtcatgtgccggccttcccgagtcaagcagatgtttgcctccagagcctgccggaagtcggtgatgattgggactgctcttaacacaagcgagatgaagaaactgatcacccacatgggggagatggaccacccctggaactgtccccatggaaggccaaccatgagacacatcgccaacctgggtgtcatttctcagaactgaccgtagtcactgtatggaataattggttttatcgcagatttttatgttttgaaagacagagtcttcactaaccttttttgttttaaaatgaaacctgctacttaaaaaaaatacacatcacacccatttaaaagtgatcttgagaaccttttcaaaccagatggagcattgcttgcaaattttttttctctatgtttgcatgcgctcgtgtgtgtgtgtccaggcaagaacacattttataaaaataagaacacttgggctgggcatggtggctcatgcctgtgatcgcagcactttgggaggccgaggccggcagatcacctgagatcagaagttcgagaccagcctgaccaacatggagaaaccctgcctctactaaaaatacaaaattagccaggtgtgctggcgcatgcctgtaatccccgctacccaggaggctgaggcaggagaatcgcttgaacccgggagacggaggttgcagtgaaccgagattgcgccactgcgctccagcctgggtgagatagagcaagactgtgtctcaaaaaacaaaacaaaacaaaacaaaacaaaaaaaaccaaaccactttggaagttactcaggcctctgctctggctggacatagtttagtctataactttcaacccttaacaataattaaattcatctttgtttaatttcataaatttaaaagtagggtccttttcagttagtgattctcagccctgattcacattaaatttttaaacacgggggattctctgcccggctggaagaaaatgactggatgggacaggggtcactatttgaaacattcctctgtgcggccaaggtcgcaaaatgctgtcctcgcaggggaacaaaaagagtttgatttcccataatttgatgctgtgatttggtttcctcaggatgtgaactgtagaacattccagttactggccttgaatggttctgggaatataagaatccctgtctgtcttttcaaatagttttcatggaaccttgtcctgtttgaacttggctgccctgctgcccccaccccttctccagactgtgggcggctccccttcctgctttagaatccttcagatggaggaggcagtacagtagtcactgtgccatcgtgtctggcactgtgctggcgtggtctgcaggatcccacttatgaactctccagattgggagctgtggcaggataacagcccccaagacagctgtgtcctaatccccagaacctgtgaccacgctgcctcacgtggcagaagggactcggcaggtgtgattgagtgaaggatcttttttttttttttctttgagatgaagtttcgctcttgttgcccaggctggagttcaatagcatgatctcagctcactgcagcctctgcctcccaggttcaagtgattctcccacctcagcctcccgagtagctgggattacaggtgtccagaaccatactggctaatttttgtatttttagtagagacagggtttcaccatgttgaccaggctggtctcgaactcctgacctcaggtgatccgaccgcctcggcctcccaaagtgctgggattacaggtgtgagccatcatgcctggctgagttaaggatcttgcaacagagagattatcctggattgtctgggtgggcccagtccattgggtgagtccttcaaaggtggagacctttccctgctggccagagagaggctgccttgctggttttggagatggaaggaggtaccactagtcaaggattgcaagcagtctctagaacagggattccaacactccggacacagaccagtagtggtccatggcctattaggaagtggggtgcacagcaggttaggggccggcaagccagcgaagcttcatctgtatttatagccactccccgtcgctggcgttaccacccgagctccgcctcctgtcacatcagcggtgggcattagattctcatagcagcacgagccctattgtgaactgcacacacgagggatgtaggttgcacgctccttatgagaatctgatgcctgatgatctgtcactgtctcccgtcacccccagatggggctgtctagttgcaggaaaacaagctcagggctcccactgagtctctgtgatggtgagttgtagaattatttaattatatgttacaatgtaataataatagaaataaagtgcacaataaatgcaatgcacttgaa

SEQ ID NO: 438164 - DNA, 4530 bp, Homo sapiens
ggaggcgaaggggcggcgggaaccgggcctggcccgtgtgtgtcctgggggcctggcccaggccgccgctgtacggtgagtcccagggaggcggatctgggccccgggaaggacaccctcctggatttgccccgtaggcccggcccgggcccctcaggagcagaacagccttggtgaggtggacaagaggggacctcgcgagcagacgcgcgccagcgacagcagccccgccccggcctctggggagccccaggaggatttcgaccgcctctaaacgtccgtcagcatctctgttctctcatttaagtgtctgctgattccccccttagatctgccctggagactggtagtaatgcaggaacagtctgcagggattctctcttgctgcctcagttgctaggggaagagactgggccttagcaggtctaccagccacagtctctgcacgtttccaagagcagcagaaaatgaacacattgcagtcgaatccagcgggcattttctagcccctacctcccaggaccctttgtctgcctttgacatctgttacttccaaactgatactttctccatggagtctctcttttcttggcttttaaaaagattcgtctgtctgcagactcgtgaatgacgtctaccgcgtgtataatcgacaccagtatccatttgttgttcttaacatttctgttgattcaggtaacttaataaaaatgcatgcagcggatttggaaaagcccatggtagaaaagcaggatcaatccccttcattaaggactggagaagaaaaaagggacgtgtccatttccagactgcgagaggccttttctcttcgtcacacaacagagaacaagcctcacagcccaaagactccagaaccaagaaggagccctctaggacagaaaaggggtatgtcgtcttctagcacttcagatgccatctctgacaaaggcgtcctgagacctcagaaagaggcagtgagttccagtcagggacccagtgaccctacggacagagcggaggtggagaaggactcggggcatggcagcacttccgtggattctgaggggttcagcatcccagacacgggcagtcactgcagcagcgagtgtgtggccagcaccccaggggacaggggctcgcaggaacatgtggactctcaggagaaagcgcctgaaactgacgactctttttcagatgtggactgccattcaaaccaggaagataccggatgtaaatttcaggttttgcctcagccaactaatctcacatccccaaacacaaaagtgttttaagaaagaagaaattctttccaattctgacattcgtcaaaagttagtaaatactcagaacgtgtcagcttctcaggttgatgtagctgtgaaaattaataagaaagttgtgcccctgaacttttctgagttctttagctaaacgaataaagcagttacatcatgaagcacagcaaagtgaaggggaacagaattacaggaagtttagggcaaggatttgtcctggagaaaatcaagcagccgaagatgaactaagaaaagagataagctcagaccaccaggtgagaaccagaaaacgtccatggctgctttaacagagccatttcttgtcgtcaccgcgctgatactgcggaaaatccattttcaccggatttaattgtgtggaactgagaatgacagtgtcaatttctcgtgtgaagtaaaacgatgtttgcagaaatggaaatcattggtcagtttaacctgggatttataataaccaaactgaatgaggatatcttcatagtggaccagcatgccacggacgagaagtataacttcgagatgctgcagcagcacaccgtgctccaggggcagaggctcatagcacctcagactctcaacttaactgctgttaatgaagctgttctgatagaaaatctggaaatatttagaaagaatggcttcgattttgttatcgatgaaaatgtcatggatttttctcaaaattgtattcttttagctccagtcactgaaagggctaaactgatttccttgccaactagtaaaagctggaccttcggaccccaggacgtcgatgaactgatcttcatgctgagcgacagccctggggtcatgtgccggccttcccgagtcaagcagatgtttgcctccagagcctgccggaagtcggtgatgattgggactgctcttaacacaagcgagatgaagaaactgatcacccacatgggggagatggaccacccctggaactgtccccatggaaggccaaccatgagacacatcgccaacctgggtgtcatttctcagaactgaccgtagtcactgtatggaataattggttttatcgcagatttttatgttttgaaagacagagtcttcactaaccttttttgttttaaaatgaaacctgctacttaaaaaaaatacacatcacacccatttaaaagtgatcttgagaaccttttcaaaccagatggagcattgcttgcaaattttttttctctatgtttgcatgcgctcgtgtgtgtgtgtccaggcaagaacacattttataaaaataagaacacttgggctgggcatggtggctcatgcctgtgatcgcagcactttgggaggccgaggccggcagatcacctgagatcagaagttcgagaccagcctgaccaacatggagaaaccctgcctctactaaaaatacaaaattagccaggtgtgctggcgcatgcctgtaatccccgctacccaggaggctgaggcaggagaatcgcttgaacccgggagacggaggttgcagtgaaccgagattgcgccactgcgctccagcctgggtgagatagagcaagactgtgtctcaaaaaacaaaacaaaacaaaacaaaacaaaaaaaaccaaaccactttggaagttactcaggcctctgctctggctggacatagtttagtctataactttcaacccttaacaataattaaattcatctttgtttaatttcataaatttaaaagtagggtccttttcagttagtgattctcagccctgattcacattaaatttttaaacacgggggattctctgcccggctggaagaaaatgactggatgggacaggggtcactatttgaaacattcctctgtgcggccaaggtcgcaaaatgctgtcctcgcaggggaacaaaaagagtttgatttcccataatttgatgctgtgatttggtttcctcaggatgtgaactgtagaacattccagttactggccttgaatggttctgggaatataagaatccctgtctgtcttttcaaatagttttcatggaaccttgtcctgtttgaacttggctgccctgctgcccccaccccttctccagactgtgggcggctccccttcctgctttagaatccttcagatggaggaggcagtacagtagtcactgtgccatcgtgtctggcactgtgctggcgtggtctgcaggatcccacttatgaactctccagattgggagctgtggcaggataacagcccccaagacagctgtgtcctaatccccagaacctgtgaccacgctgcctcacgtggcagaagggactcggcaggtgtgattgagtgaaggatcttttttttttttttctttgagatgaagtttcgctcttgttgcccaggctggagttcaatagcatgatctcagctcactgcagcctctgcctcccaggttcaagtgattctcccacctcagcctcccgagtagctgggattacaggtgtccagaaccatactggctaatttttgtatttttagtagagacagggtttcaccatgttgaccaggctggtctcgaactcctgacctcaggtgatccgaccgcctcggcctcccaaagtgctgggattacaggtgtgagccatcatgcctggctgagttaaggatcttgcaacagagagattatcctggattgtctgggtgggcccagtccattgggtgagtccttcaaaggtggagacctttccctgctggccagagagaggctgccttgctggttttggagatggaaggaggtaccactagtcaaggattgcaagcagtctctagaacagggattccaacactccggacacagaccagtagtggtccatggcctattaggaagtggggtgcacagcaggttaggggccggcaagccagcgaagcttcatctgtatttatagccactccccgtcgctggcgttaccacccgagctccgcctcctgtcacatcagcggtgggcattagattctcatagcagcacgagccctattgtgaactgcacacacgagggatgtaggttgcacgctccttatgagaatctgatgcctgatgatctgtcactgtctcccgtcacccccagatggggctgtctagttgcaggaaaacaagctcagggctcccactgagtctctgtgatggtgagttgtagaattatttaattatatgttacaatgtaataataatagaaataaagtgcacaataaatgcaatgcacttgaa

SEQ ID NO: 438165 - DNA, 2466 bp, Homo sapiens
ggaggcgaaggggcggcgggaaccgggcctggcccgtgtgtgtcctgggggcctggcccaggccgccgctgtacggtgagtcccagggaggcggatctgggccccgggaaggacaccctcctggatttgccccgtaggcccggcccgggcccctcaggagcagaacagccttggtgaggtggacaagaggggacctcgcgagcagacgcgcgccagcgacagcagccccgccccggcctctggggagccccaggaggatttcgaccgcctctaaacgtccgtcagcatctctgttctctcatttaagtgtctgctgattccccccttagatctgccctggagactggtagtaatgcaggaacagtctgcagggattctctcttgctgcctcagttgctaggggaagagactgggccttagcaggtctaccagccacagtctctgcacgtttccaagagcagcagaaaatgaacacattgcagtcgaatccagcgggcattttctagcccctacctcccaggaccctttgtctgcctttgacatctgttacttccaaactgatactttctccatggagtctctcttttcttggcttttaaaaagattcgtctgtctgcagactcgtgaatgacgtctaccgcgtgtataatcgacaccagtatccatttgttgttcttaacatttctgttgattcaggtaacttaataaaaatgcatgcagcggatttggaaaagcccatggtagaaaagcaggatcaatccccttcattaaggactggagaagaaaaaagggacgtgtccatttccagactgcgagaggccttttctcttcgtcacacaacagagaacaagcctcacagcccaaagactccagaaccaagaaggagccctctaggacagaaaaggggtatgtcgtcttctagcacttcagatgccatctctgacaaaggcgtcctgagacctcagaaagaggcagtgagttccagtcagggacccagtgaccctacggacagagcggaggtggagaaggactcggggcatggcagcacttccgtggattctgaggggttcagcatcccagacacgggcagtcactgcagcagcgagtgtgtggccagcaccccaggggacaggggctcgcaggaacatgtggactctcaggagaaagcgcctgaaactgacgactctttttcagatgtggactgccattcaaaccaggaagataccggatgtaaatttcaggttttgcctcagccaactaatctcacatccccaaacacaaaagtgttttaagaaagaagaaattctttccaattctgacattcgtcaaaagttagtaaatactcagaacgtgtcagcttctcaggttgatgtagctgtgaaaattaataagaaagttgtgcccctgaacttttctgagttctttagctaaacgaataaagcagttacatcatgaagcacagcaaagtgaaggggaacagaattacaggaagtttagggcaaggatttgtcctggagaaaatcaagcagccgaagatgaactaagaaaagagataagctcagaccaccaggtgagaaccagaaaacgtccatggctgctttaacagagccatttcttgtcgtcaccgcgctgatactgcggaaaatccattttcaccggatttaattgtgtggaactgagaatgacagtgtcaatttctcgtgtgaagtaaaacgatgtttgcagaaatggaaatcattggtcagtttaacctgggatttataataaccaaactgaatgaggatatcttcatagtgatccgaccgcctcggcctcccaaagtgctgggattacaggtgtgagccatcatgcctggctgagttaaggatcttgcaacagagagattatcctggattgtctgggtgggcccagtccattgggtgagtccttcaaaggtggagacctttccctgctggccagagagaggctgccttgctggttttggagatggaaggaggtaccactagtcaaggattgcaagcagtctctagaacagggattccaacactccggacacagaccagtagtggtccatggcctattaggaagtggggtgcacagcaggttaggggccggcaagccagcgaagcttcatctgtatttatagccactccccgtcgctggcgttaccacccgagctccgcctcctgtcacatcagcggtgggcattagattctcatagcagcacgagccctattgtgaactgcacacacgagggatgtaggttgcacgctccttatgagaatctgatgcctgatgatctgtcactgtctcccgtcacccccagatggggctgtctagttgcaggaaaacaagctcagggctcccactgagtctctgtgatggtgagttgtagaattatttaattatatgttacaatgtaataataatagaaataaagtgcacaataaatgcaatgcacttgaa

SEQ ID NO: 438166 - DNA, 1218 bp, Homo sapiens
cttcagcctagttttaggtaacactgaagtctaaaggtatagatttgaaacaaatggaaaatgagatccccgaacattttatctttttaaaattattattttcactttcacccattaaattacttgattttttttaatgtttcgtaacttaggaagaataaggtccaaatcaactggaatactttttttagtctcataattacctgagtacctgcaatatgcacatcactttaccactgtacacttagtagcaacacgtcttgtacttaaaaatgtctaaaggtaagacctgtgtttctagtttgaaggcctagaaagtaaatgagtgaggtttttgtgttggtgtttcagactataaacttaaatggcctcagagaatcgggttagtgcttgttcatgactcaggttctgtgaaaaggctattcaaataaaaataaagctgtaagctctatcctaccaggtatagagacaaacaccaaagttacagtagatgagtattgtcaaggggttaagactgtggacacaagcaatagttaatggctttgggaattctaggaaataggagaccaatgtgggataggtgacattaggaagatttctttggcatctgggttttaaggttgggattgaaggtagagaaaagctctcagaatagacgtgggaagcatggaggtgaaggtagaaactaagaataagtaagattggaataagcagaagaccatttctggttctgaatctgtgtgtgataatgtctgaatgagttagtccagatggaagagcacagatggagggtgtgacgttctagctttagagaattaagctatatattccttgagaccaaaggaagtgtgaaagatgtaaacacctgtctcttaggtttaaggagttatagtaccagtccatagaaaagaaagtcctagctgttttagaactgcatggttgctccacaaggtaaaatgcctttgagacgcttatttttttttagctattttcaaggaagtatttaatcctcctgactttgagaatagtgaatatgtcttgtgttcataaatttaagcaaggatgaagaatgcccaataatgtgtgtgtgttttaagtgtgcttctcaattcatctaattcttcccagtttctaactattaagggagttagaggcttacatgcaggtgattttgttagaggcttactttgcagatgatttctttatgaaatcatgtta

SEQ ID NO: 438167 - DNA, 2443 bp, Homo sapiens
tggggagacgccggccccttggcccagctgaaaacggaattctttgccggctggctccccactctgccagagcgaggcggggcagtgaggactccgcgacgcgtccgcaccctgcggccagagcggctttgagctcggctgcgtccgcgctaggcgctttttcccagaagcaatccaggcgcgcccgctggttcttgagcgccaggaaaagcccggagctaacgaccggccgctcggccactgcacggggccccaagccgcagaaggacgacgggagggtaatgaagctgagcccaggtctcctaggaaggagagagtgcgccggagcagcgtgggaaagaagggaagagtgtcgttaagtttacggccaacggtggattatccgggccgctgcgcgtctgggggctgcggaatgcgcgaggagaacaagggcatgcccagtgggggcggcagcgatgagggtctggccagcgccgcggcgcggggactagtggagaaggtgcgacagctcctggaagccggcgcggatcccaacggagtcaaccgtttcgggaggcgcgcgatccaggtcatgatgatgggcagcgcccgcgtggcggagctgctgctgctccacggcgcggagcccaactgcgcagaccctgccactctcacccgaccggtgcatgatgctgcccgggagggcttcctggacacgctggtggtgctgcaccgggccggggcgcggctggacgtgcgcgatgcctggggtcgtctgcccgtggacttggccgaggagcggggccaccgcgacgttgcagggtacctgcgcacagccacgggggactgacgccaggttccccagccgcccacaacgactttattttcttacccaatttcccacccccacccacctaattcgatgaaggctgccaacggggagcggcggaaagcctgtaagcctgcaagcctgtctgagactcacaggaaggaggagccgaccgggaataaccttccatacatttttttctttgtcttatctggccctcgacactcaccatgaagcgaaacacagagaagcggatttccagggatatttaggagtgtgtgacattccaggggtcgtttgcttttcagggttttctgagggaaagtgcatatgaaatccttgactggacctggtggctacgaatcttccgatggatgaatctcccactccagcgctgagtgggagaaggcagtgattagcacttgggtgacggcagtcgatgcgttcactccaatgtctgctgaggagttatggtgaacccacaacttaggccctagcggcagaaaggaaaacctgaagactgaggacaaagtggaggagggccgaggtgggcttcagtaagtccccggcggcgctttagtttgagcgcatggcaagtcacatgcgtaaacgacactctctggaagccctggagaccctcgcccaactccaccagatagcagaggggtaagagaggatgtgcaagcgacgacagatgctaaaatccctggatcacgacgctgcagagcacctttgcacaggatgctggcctttgctcttactacactgaggagagattcccgcgggttccgcaggcagactacacaggatgaggtggtggagtggagtgagagcaattgtaacggttaactgtaacgttttctttcacacacacacacacacacacacacacacacatgctaggatgcggaaatccccttatgacttgctactttttgattttgtgatattttgtactttttagttgttcagcaactgtcttatttaatggggagattttaagtaacataactagtggctctcagttaaaatgtgaggaagaactacagctcttaaatgtagcaatggcactgttgcaaactcagtgcaaacgcctagattgctttcttcttaacctatttatttctttgttaaatttttctgattgtttcctttatagagtgtctcagggtgcagaggtcagactaagaaatattccaaatgtcttttagaagatagatgcacttatgcagtaaattatcttgggatagttcccaaaagattgctgaaaaagtagattgagtataaaaacttgaaaatatatgatggctcgtgggatgtcctactatcactgaacaaactaaaggtgcactgctttgggatttaatttccagggttgcttgatcattatatcattggaacaactgatacttcactactttaataaagaattaacagagattgaactccaagaggtgggtaatttggtttaaaaatacatgttcatgggtttaccactaactcctgagaaatgttaaaggttcacaggggttcccttctctcaatgtttgtaataattgctcataagcaataccagcaattcataaaaactgcttacttatgccatagaaaattaaacacaaagtgtatacatgt

SEQ ID NO: 438168 - DNA, 1873 bp, Homo sapiens
tggggagacgccggccccttggcccagctgaaaacggaattctttgccggctggctccccactctgccagagcgaggcggggcagtgaggactccgcgacgcgtccgcaccctgcggccagagcggctttgagctcggctgcgtccgcgctaggcgctttttcccagaagcaatccaggcgcgcccgctggttcttgagcgccaggaaaagcccggagctaacgaccggccgctcggccactgcacggggccccaagccgcagaaggacgacgggagggtaatgaagctgagcccaggtctcctaggaaggagagagtgcgccggagcagcgtgggaaagaagggaagagtgtcgttaagtttacggccaacggtggattatccgggccgctgcgcgtctgggggctgcggaatgcgcgaggagaacaagggcatgcccagtgggggcggcagcgatgagggtctggccagcgccgcggcgcggggactagtggagaaggtgcgacagctcctggaagccggcgcggatcccaacggagtcaaccgtttcgggaggcgcgcgatccaggtcatgatgatgggcagcgcccgcgtggcggagctgctgctgctccacggcgcggagcccaactgcgcagaccctgccactctcacccgaccggtgcatgatgctgcccgggagggcttcctggacacgctggtggtgctgcaccgggccggggcgcggctggacgtgcgcgatgcctggggtcgtctgcccgtggacttggccgaggagcggggccaccgcgacgttgcagggtacctgcgcacagccacgggggactgacgccaggttccccagccgcccacaacgactttattttcttacccaatttcccacccccacccacctaattcgatgaaggctgccaacggggagcggcggaaagcctgtaagcctgcaagcctgtctgagactcacaggaaggaggagccgaccgggaataaccttccatacatttttttctttgtcttatctggccctcgacactcaccatgaagcgaaacacagagaagcggatttccagggatatttaggagtgtgtgacattccaggggtcgtttgcttttcagggttttctgagggaaagtgcatatgaaatccttgactggacctggtggctacgaatcttccgatggatgaatctcccactccagcgctgagtgggagaaggcagtgattagcacttgggtgacggcagtcgatgcgttcactccaatgtctgctgaggagttatggtgaacccacaacttaggccctagcggcagaaaggaaaacctgaagactgaggacaaagtggaggagggccgaggtgggcttcagtaagtccccggcggcgctttagtttgagcgcatggcaagtcacatgcgtaaacgacactctctggaagccctggagaccctcgcccaactccaccagatagcagaggggtaagagaggatgtgcaagcgacgacagatgctaaaatccctggatcacgacgctgcagagcacctttgcacaggatgctggcctttgctcttactacactgaggagagattcccgcgggttccgcaggcagactacacaggatgaggtggtggagtggagtgagagcaattgtaacggttaactgtaacgttttctttcacacacacacacacacacacacacacacacatgggggcaaccacatccagtacaagcttttacaaatgttattagtgtctttttttatttctaatgccttgtcctcttaaaagttattttatttgttattattatttgttcttgactgttaattgtgaatggtaatgcaataaagtgcctttgttaaatggtgaaaaaa

SEQ ID NO: 438169 - DNA, 4190 bp, Homo sapiens
ctggcccaagctctttttatatagcaaaatatttactgtttaacatttttaaatcttagctattataaaatcctgtagtatacaaatatagttagttttatattacattaaaaatattatagtctaaatttaaaatgatgaactgttaaggaaaaatcatttattataattttataagattttgcatgatttaatttacttttcccttctaatctccaactttggctcaaattatcacactacaagccagttatgagctcagacacatgacaaacaaagccttccgcacgggatttgctatgagaactaaataaattaaaaaaaaaagaaagaaaaaaacttagttgtttattttctcccctaaaccattactcccaacttctaacaaacagtagttgactacctaataaatatttgtagacctggattatggaggaggggtcagcaaggcaaataatttaaaactttaaaagccgaataaatttaactctgcccctaaatcatttaacaaaatagattcccatgttccaatggaaatcaagatttgtttttccataatgatgatcatcactttaccatcaactttcttgtctctgcacgtttagagaataaaatggcatttaatttgtactgagtataacctgaaggtggggtgggaaagtggattgcatcagcaaatgaagaaacaccagacatcagagacctgaacacctctgcactgggtgaaaactttgcaattaggtgtttctttaaatggctccacctgccttgccccggccggcatctcccatacctgcccccaccctggctctgaccactctgctctctctggcaggtcatgatgatgggcagcgcccgcgtggcggagctgctgctgctccacggcgcggagcccaactgcgcagaccctgccactctcacccgaccggtgcatgatgctgcccgggagggcttcctggacacgctggtggtgctgcaccgggccggggcgcggctggacgtgcgcgatgcctggggtcgtctgcccgtggacttggccgaggagcggggccaccgcgacgttgcagggtacctgcgcacagccacgggggactgacgccaggttccccagccgcccacaacgactttattttcttacccaatttcccacccccacccacctaattcgatgaaggctgccaacggggagcggcggaaagcctgtaagcctgcaagcctgtctgagactcacaggaaggaggagccgaccgggaataaccttccatacatttttttctttgtcttatctggccctcgacactcaccatgaagcgaaacacagagaagcggatttccagggatatttaggagtgtgtgacattccaggggtcgtttgcttttcagggttttctgagggaaagtgcatatgaaatccttgactggacctggtggctacgaatcttccgatggatgaatctcccactccagcgctgagtgggagaaggcagtgattagcacttgggtgacggcagtcgatgcgttcactccaatgtctgctgaggagttatggtgaacccacaacttaggccctagcggcagaaaggaaaacctgaagactgaggacaaagtggaggagggccgaggtgggcttcagtaagtccccggcggcgctttagtttgagcgcatggcaagtcacatgcgtaaacgacactctctggaagccctggagaccctcgcccaactccaccagatagcagaggggtaagagaggatgtgcaagcgacgacagatgctaaaatccctggatcacgacgctgcagagcacctttgcacaggatgctggcctttgctcttactacactgaggagagattcccgcgggttccgcaggcagactacacaggatgaggtggtggagtggagtgagagcaattgtaacggttaactgtaacgttttctttcacacacacacacacacacacacacacacacatgctaggatgcggaaatccccttatgacttgctactttttgattttgtgatattttgtactttttagttgttcagcaactgtcttatttaatggggagattttaagtaacataactagtggctctcagttaaaatgtgaggaagaactacagctcttaaatgtagcaatggcactgttgcaaactcagtgcaaacgcctagattgctttcttcttaacctatttatttctttgttaaatttttctgattgtttcctttatagagtgtctcagggtgcagaggtcagactaagaaatattccaaatgtcttttagaagatagatgcacttatgcagtaaattatcttgggatagttcccaaaagattgctgaaaaagtagattgagtataaaaacttgaaaatatatgatggctcgtgggatgtcctactatcactgaacaaactaaaggtgcactgctttgggatttaatttccagggttgcttgatcattatatcattggaacaactgatacttcactactttaataaagaattaacagagattgaactccaagaggtgggtaatttggtttaaaaatacatgttcatgggtttaccactaactcctgagaaatgttaaaggttcacaggggttcccttctctcaatgtttgtaataattgctcataagcaataccagcaattcataaaaactgcttacttatgccatagaaaattaaacacaaagtgtatacatgtattatgcttctaaatgctcattctaccagatacacatttaaaagagaaaaaaggaacagaaacaagtcatttgagagtggagacttataagaaggagtacatttgagttgaatacacaaatctttacttctctaccaattcctattcccaaaatgaacatattactggggaaagttagttgagaatcagagcatatgttattggggaaaggatatgtttattgacacataatctgtaccaggtatgcattaaaatatatttgttaatttaatatttaaacctgagagataggtatgtttcccagatgaggacaatgaggcaaagaaatatcaagtaacttgccaaaggttacaagatattcattccatggatgcacaaagaagtgcatctagttccacagctgattatggttgtcttgcttttcttcccattgcaccagcttgtcctccaaaatcatgaatgatacacatgaagataactttttttaaaaaaaagcagaaatacacaatgatctcccttgtaagctcctaaggtggcttttctttctctaacttctagtaaatataaacggtttgtttgaaaactattttaaaatgtcaacaatatggagaataaccccccccaacacacctataaaaacccaaatttttggaacaaagataatggaacctccattttcaaactgaagcacagggacagaaaatatatttctagttatcacttaagcactcaatcattagaggctacaagaataatatttttaaagttacagtattttacaattattagaaaacattctatataaaagaagtcagttgatactttaaaatctcccatttggtttataaaatcccttaatttgacctctatatcttaaattccaagatgtttaaatttgctagttgcattatactgggtcatgaaaaattatcccttgaaatagatatgaaacatgttacttcatttctggtttaaataacttgtggaatctttcctaatgacaacttgatattaagggaaactaaagaaaatgttattgtggatcccacagtactatattacactgtttttttttgtttgttttgttagtttttttttatttaaagcaaacctcaaacattattgggtatcaattaccacctggttgtattaaaatagtaacttatcaatgccatgtaaaaattaattccattttcgaagccacctggcagacaggtttagctgtttcatcagcagcctaatatatactgttaaatttgttaaggatttcactttgaaggatacatgcaaaacatatagttactattttcatgagtcctgcttctagctccattgtggaatacagaaaattaaatatacctgttaagttcgtatctaaacctaagacattaccaaggtttgtacaaattctactacctgacatttattccaagaagatctggaaagttaaataaatttataaatttaataacattcattt

SEQ ID NO: 438170 - DNA, 3923 bp, Homo sapiens
tggggagacgccggccccttggcccagctgaaaacggaattctttgccggctggctccccactctgccagagcgaggcggggcagtgaggactccgcgacgcgtccgcaccctgcggccagagcggctttgagctcggctgcgtccgcgctaggcgctttttcccagaagcaatccaggcgcgcccgctggttcttgagcgccaggaaaagcccggagctaacgaccggccgctcggccactgcacggggccccaagccgcagaaggacgacgggagggtaatgaagctgagcccaggtctcctaggaaggagagagtgcgccggagcagcgtgggaaagaagggaagagtgtcgttaagtttacggccaacggtggattatccgggccgctgcgcgtctgggggctgcggaatgcgcgaggagaacaagggcatgcccagtgggggcggcagcgatgagggtctggccagcgccgcggcgcggggactagtggagaaggtgcgacagctcctggaagccggcgcggatcccaacggagtcaaccgtttcgggaggcgcgcgatccaggtcatgatgatgggcagcgcccgcgtggcggagctgctgctgctccacggcgcggagcccaactgcgcagaccctgccactctcacccgaccggtgcatgatgctgcccgggagggcttcctggacacgctggtggtgctgcaccgggccggggcgcggctggacgtgcgcgatgcctggggtcgtctgcccgtggacttggccgaggagcggggccaccgcgacgttgcagggtacctgcgcacagccacgggggactgacgccaggttccccagccgcccacaacgactttattttcttacccaatttcccacccccacccacctaattcgatgaaggctgccaacggggagcggcggaaagcctgtaagcctgcaagcctgtctgagactcacaggaaggaggagccgaccgggaataaccttccatacatttttttctttgtcttatctggccctcgacactcaccatgaagcgaaacacagagaagcggatttccagggatatttaggagtgtgtgacattccaggggtcgtttgcttttcagggttttctgagggaaagtgcatatgaaatccttgactggacctggtggctacgaatcttccgatggatgaatctcccactccagcgctgagtgggagaaggcagtgattagcacttgggtgacggcagtcgatgcgttcactccaatgtctgctgaggagttatggtgaacccacaacttaggccctagcggcagaaaggaaaacctgaagactgaggacaaagtggaggagggccgaggtgggcttcagtaagtccccggcggcgctttagtttgagcgcatggcaagtcacatgcgtaaacgacactctctggaagccctggagaccctcgcccaactccaccagatagcagaggggtaagagaggatgtgcaagcgacgacagatgctaaaatccctggatcacgacgctgcagagcacctttgcacaggatgctggcctttgctcttactacactgaggagagattcccgcgggttccgcaggcagactacacaggatgaggtggtggagtggagtgagagcaattgtaacggttaactgtaacgttttctttcacacacacacacacacacacacacacacacatgctaggatgcggaaatccccttatgacttgctactttttgattttgtgatattttgtactttttagttgttcagcaactgtcttatttaatggggagattttaagtaacataactagtggctctcagttaaaatgtgaggaagaactacagctcttaaatgtagcaatggcactgttgcaaactcagtgcaaacgcctagattgctttcttcttaacctatttatttctttgttaaatttttctgattgtttcctttatagagtgtctcagggtgcagaggtcagactaagaaatattccaaatgtcttttagaagatagatgcacttatgcagtaaattatcttgggatagttcccaaaagattgctgaaaaagtagattgagtataaaaacttgaaaatatatgatggctcgtgggatgtcctactatcactgaacaaactaaaggtgcactgctttgggatttaatttccagggttgcttgatcattatatcattggaacaactgatacttcactactttaataaagaattaacagagattgaactccaagaggtgggtaatttggtttaaaaatacatgttcatgggtttaccactaactcctgagaaatgttaaaggttcacaggggttcccttctctcaatgtttgtaataattgctcataagcaataccagcaattcataaaaactgcttacttatgccatagaaaattaaacacaaagtgtatacatgtattatgcttctaaatgctcattctaccagatacacatttaaaagagaaaaaaggaacagaaacaagtcatttgagagtggagacttataagaaggagtacatttgagttgaatacacaaatctttacttctctaccaattcctattcccaaaatgaacatattactggggaaagttagttgagaatcagagcatatgttattggggaaaggatatgtttattgacacataatctgtaccaggtatgcattaaaatatatttgttaatttaatatttaaacctgagagataggtatgtttcccagatgaggacaatgaggcaaagaaatatcaagtaacttgccaaaggttacaagatattcattccatggatgcacaaagaagtgcatctagttccacagctgattatggttgtcttgcttttcttcccattgcaccagcttgtcctccaaaatcatgaatgatacacatgaagataactttttttaaaaaaaagcagaaatacacaatgatctcccttgtaagctcctaaggtggcttttctttctctaacttctagtaaatataaacggtttgtttgaaaactattttaaaatgtcaacaatatggagaataaccccccccaacacacctataaaaacccaaatttttggaacaaagataatggaacctccattttcaaactgaagcacagggacagaaaatatatttctagttatcacttaagcactcaatcattagaggctacaagaataatatttttaaagttacagtattttacaattattagaaaacattctatataaaagaagtcagttgatactttaaaatctcccatttggtttataaaatcccttaatttgacctctatatcttaaattccaagatgtttaaatttgctagttgcattatactgggtcatgaaaaattatcccttgaaatagatatgaaacatgttacttcatttctggtttaaataacttgtggaatctttcctaatgacaacttgatattaagggaaactaaagaaaatgttattgtggatcccacagtactatattacactgtttttttttgtttgttttgttagtttttttttatttaaagcaaacctcaaacattattgggtatcaattaccacctggttgtattaaaatagtaacttatcaatgccatgtaaaaattaattccattttcgaagccacctggcagacaggtttagctgtttcatcagcagcctaatatatactgttaaatttgttaaggatttcactttgaaggatacatgcaaaacatatagttactattttcatgagtcctgcttctagctccattgtggaatacagaaaattaaatatacctgttaagttcgtatctaaacctaagacattaccaaggtttgtacaaattctactacctgacatttattccaagaagatctggaaagttaaataaatttataaatttaataacattcattt

SEQ ID NO: 438171 - DNA, 4046 bp, Homo sapiens
tggggagacgccggccccttggcccagctgaaaacggaattctttgccggctggctccccactctgccagagcgaggcggggcagtgaggactccgcgacgcgtccgcaccctgcggccagagcggctttgagctcggctgcgtccgcgctaggcgctttttcccagaagcaatccaggcgcgcccgctggttcttgagcgccaggaaaagcccggagctaacgaccggccgctcggccactgcacggggccccaagccgcagaaggacgacgggagggtaatgaagctgagcccaggtctcctaggaaggagagagtgcgccggagcagcgtgggaaagaagggaagagtgtcgttaagtttacggccaacggtggattatccgggccgctgcgcgtctgggggctgcggaatgcgcgaggagaacaagggcatgcccagtgggggcggcagcgatgagggtctggccagcgccgcggcgcggggactagtggagaaggtgcgacagctcctggaagccggcgcggatcccaacggagtcaaccgtttcgggaggcgcgcgatccaggtagctggggccccagggcctcgccggcagggggcgcgcgaacgcggggcgcggcctcggcggatcggggctggaacctagatcgccgatgtagatttgtacaggagtctccgttggccggaggtcatgatgatgggcagcgcccgcgtggcggagctgctgctgctccacggcgcggagcccaactgcgcagaccctgccactctcacccgaccggtgcatgatgctgcccgggagggcttcctggacacgctggtggtgctgcaccgggccggggcgcggctggacgtgcgcgatgcctggggtcgtctgcccgtggacttggccgaggagcggggccaccgcgacgttgcagggtacctgcgcacagccacgggggactgacgccaggttccccagccgcccacaacgactttattttcttacccaatttcccacccccacccacctaattcgatgaaggctgccaacggggagcggcggaaagcctgtaagcctgcaagcctgtctgagactcacaggaaggaggagccgaccgggaataaccttccatacatttttttctttgtcttatctggccctcgacactcaccatgaagcgaaacacagagaagcggatttccagggatatttaggagtgtgtgacattccaggggtcgtttgcttttcagggttttctgagggaaagtgcatatgaaatccttgactggacctggtggctacgaatcttccgatggatgaatctcccactccagcgctgagtgggagaaggcagtgattagcacttgggtgacggcagtcgatgcgttcactccaatgtctgctgaggagttatggtgaacccacaacttaggccctagcggcagaaaggaaaacctgaagactgaggacaaagtggaggagggccgaggtgggcttcagtaagtccccggcggcgctttagtttgagcgcatggcaagtcacatgcgtaaacgacactctctggaagccctggagaccctcgcccaactccaccagatagcagaggggtaagagaggatgtgcaagcgacgacagatgctaaaatccctggatcacgacgctgcagagcacctttgcacaggatgctggcctttgctcttactacactgaggagagattcccgcgggttccgcaggcagactacacaggatgaggtggtggagtggagtgagagcaattgtaacggttaactgtaacgttttctttcacacacacacacacacacacacacacacacatgctaggatgcggaaatccccttatgacttgctactttttgattttgtgatattttgtactttttagttgttcagcaactgtcttatttaatggggagattttaagtaacataactagtggctctcagttaaaatgtgaggaagaactacagctcttaaatgtagcaatggcactgttgcaaactcagtgcaaacgcctagattgctttcttcttaacctatttatttctttgttaaatttttctgattgtttcctttatagagtgtctcagggtgcagaggtcagactaagaaatattccaaatgtcttttagaagatagatgcacttatgcagtaaattatcttgggatagttcccaaaagattgctgaaaaagtagattgagtataaaaacttgaaaatatatgatggctcgtgggatgtcctactatcactgaacaaactaaaggtgcactgctttgggatttaatttccagggttgcttgatcattatatcattggaacaactgatacttcactactttaataaagaattaacagagattgaactccaagaggtgggtaatttggtttaaaaatacatgttcatgggtttaccactaactcctgagaaatgttaaaggttcacaggggttcccttctctcaatgtttgtaataattgctcataagcaataccagcaattcataaaaactgcttacttatgccatagaaaattaaacacaaagtgtatacatgtattatgcttctaaatgctcattctaccagatacacatttaaaagagaaaaaaggaacagaaacaagtcatttgagagtggagacttataagaaggagtacatttgagttgaatacacaaatctttacttctctaccaattcctattcccaaaatgaacatattactggggaaagttagttgagaatcagagcatatgttattggggaaaggatatgtttattgacacataatctgtaccaggtatgcattaaaatatatttgttaatttaatatttaaacctgagagataggtatgtttcccagatgaggacaatgaggcaaagaaatatcaagtaacttgccaaaggttacaagatattcattccatggatgcacaaagaagtgcatctagttccacagctgattatggttgtcttgcttttcttcccattgcaccagcttgtcctccaaaatcatgaatgatacacatgaagataactttttttaaaaaaaagcagaaatacacaatgatctcccttgtaagctcctaaggtggcttttctttctctaacttctagtaaatataaacggtttgtttgaaaactattttaaaatgtcaacaatatggagaataaccccccccaacacacctataaaaacccaaatttttggaacaaagataatggaacctccattttcaaactgaagcacagggacagaaaatatatttctagttatcacttaagcactcaatcattagaggctacaagaataatatttttaaagttacagtattttacaattattagaaaacattctatataaaagaagtcagttgatactttaaaatctcccatttggtttataaaatcccttaatttgacctctatatcttaaattccaagatgtttaaatttgctagttgcattatactgggtcatgaaaaattatcccttgaaatagatatgaaacatgttacttcatttctggtttaaataacttgtggaatctttcctaatgacaacttgatattaagggaaactaaagaaaatgttattgtggatcccacagtactatattacactgtttttttttgtttgttttgttagtttttttttatttaaagcaaacctcaaacattattgggtatcaattaccacctggttgtattaaaatagtaacttatcaatgccatgtaaaaattaattccattttcgaagccacctggcagacaggtttagctgtttcatcagcagcctaatatatactgttaaatttgttaaggatttcactttgaaggatacatgcaaaacatatagttactattttcatgagtcctgcttctagctccattgtggaatacagaaaattaaatatacctgttaagttcgtatctaaacctaagacattaccaaggtttgtacaaattctactacctgacatttattccaagaagatctggaaagttaaataaatttataaatttaataacattcattt

SEQ ID NO: 438172 - DNA, 4874 bp, Homo sapiens
atttcctcccagcctcgtgcgggaaatggctttaattctgacggcagggctgtgagggactagcgggaacccgagccttttgtcaaggaactgcggtgtcggtggccagtcatccccgccgccgcggagccgctgcactgctgggggatctcccagcagctctgacgagcgcgggctgcagcatgggcagaaaacgctgacctgcagattagctgggtggattttttaagcgcaccccaccccccaaacccataaaataacaaaaccaacccgcagtggccgaccggagatagctaagatgccgcgcaggagtttccacctggatgtttgaggttgtgtagatgtggccggcacccttgagagtggagctagggggtgcagactgagcagtgaacagaaggagccttggacagggctgggccagcctcccgagttccaggagcgaattgcaaacccaccgggaaaatgagcgaagagacggtccccgaggctgcctcgccgccgcccccgcaggggcagccttactttgaccgcttctcagaggacgaccccgagtacatgcgccttcgcaaccgggcggcggacctgcggcaggacttcaacctgatggagcagaagaagcgcgtcaccatgatcctgcagagtccctctttcagggaggagctggaaggcctcatccaggagcagatgaagaaggggaacaactcctccaacatctgggccctgcgacagatcgcggacttcatggccagcacctcccacgcagtcttcccgacatcttccatgaatgtctccatgatgacgcctatcaatgacctccacacagctgactccctgaacctggccaaaggggagcggctcatgcggtgcaagatcagcagtgtctaccgactcctggacctctatggctgggcccagctgagtgacacctatgtcacgttgagagtcagcaaggagcaggaccacttcctgatcagccctaagggagtttcttgcagtgaagtcacagcgtccagcctgatcaaggtgaacattctgggagaggtggtggagaagggcagcagctgcttcccagtggacaccacaggcttctgtctgcactcggccatctatgcagcgaggcccgacgtgcgctgcatcatccacctgcacacaccggccacagcagcggtgtcggccatgaagtggggcctcctgcctgtctcccacaatgccctgctggtgggggacatggcctattatgacttcaatggggaaatggagcaggaagccgatcggatcaacctgcagaagtgccttggacccacctgcaagatcctggtgctaagaaaccatggagtggttgctctgggtgacacggtagaggaggcattttacaagatcttccacctgcaggctgcatgtgagatacaggtgtcggctctgtccagtgccgggggagtggagaacctcatcctcctggagcaggagaagcaccggccccatgaggtgggctccgtgcagtgggccgggagcacctttgggcctatgcagaagagtcggctgggggagcatgagtttgaggccctcatgaggatgctggacaacctgggctacagaacaggttacacgtatcgccacccctttgttcaagagaaaaccaaacacaaaagtgaggtggagattccagccacggtcacagccttcgtgtttgaggaggacggtgccccggtgcccgccctgcgacagcatgcccagaagcagcagaaggagaagacccgctggctcaatacgcccaacacctacctgcgggtcaatgtggccgatgaggtccagaggagcatgggcagcccccgacccaagaccacgtggatgaaggctgacgaggtggagaaatccagcagtggcatgccgattcgcatcgaaaacccaaaccaatttgtgcctctctatactgacccccaggaagtactggagatgaggaacaagattcgagaacaaaaccgacaagatgtgaagtcagcggggcctcagtcccagctcctggcgagcgtcattgccgagaagagccgaagcccgtctacagagagccagctgatgtccaagggagacgaggataccaaagacgattcagaggagacggtgcccaaccccttcagccaactcactgaccaggagttggaggagtacaagaaagaggtggagaggaagaaactagaacttgatggagagaaagaaactgccccagaagagcctggctcacctgcaaagtctgcacctgcttctccagtgcagagcccagcgaaggaggcagagacaaagagccctttagtctctccttccaagtctttagaggaaggtactaagaagacagaaacaagcaaagccgccaccacagagcccgaaacaacccagccggaaggggtggtggtcaacgggagggaggaggagcagacggcagaggaaatcctcagcaaaggcctgagccagatgaccaccagtgctgacacggatgttgatacctctaaggacaaaaccgagtcggtcaccagcggccccatgtccccagagggctcaccttccaagtctccctcaaagaagaaaaagaaattccgaaccccctccttcctgaaaaagagcaaaaagaaggagaaagtggagtcctgattcatgacacccttgggctccctcctgcctcctctctctcctccccttcccttctcccatctctgtccctgcaagcacagggctaaggagggatagagtaggaccctggaccacattcggaaggggaacttagagatcacccgaccaacccttcgttttacagttgcccaagagaaatcaggtgacttgcccaaggtcacacagctagttagcggcagagcctgcactcgaattcaggtctcctgacttccagtccagtgctccttctactacacaacactgcctagttgtgggctgcctttgtttggatgctgtccaccaatctgagcctagggcaagaaggccagaaatgggccgtgagctctcacaggctcagactaaatcagaggtcaaggcttcccctgagtaaggtccatttcttcccaggaatccaatctcctgtggatggagctatctctacatttaaaaatctcttctcttttccactttgggtccctgccctgctcgctcaaagtgactagccaaattgacccctccaacagaaagtaatctttgttcccaagggctgatggcttagcttgtactaccccaaacattaaccctgagctttcttcatggaacctcttgaatgatggatggaagagctataagaggtggtaggcataggggcaagccatgtaagctgaggattggggatggtttcatcaacataagaggccaggaacttgacccctttgaattgtgcatctcaggcacttcaaaactaaaaccaaatttagcataggaaaaagttgtttaatgctcagggcagaaatttggggaagttgaaatcctctgttggctttgggttgtataaggaggatcaaaacaacagaggaaatgctgactttctagctttgcatgacacctggagcaatgcactgtacctgcctcactcctgtcccagtggtcaggtttcccctgaccttccctcacccccagaaacacttgcttacagaccgaaactggcatcttactcttggcaccttgacttgcaccctctgaggttccaactcagtcattctttgtccagcagaggagaatcagaaatgagcccttcaggattaatcctcttgcaccagctctcagagaaatgctgggtatccctgtccttgtccctatctgtccatcctggggcctggtaatggccacagttattgttttaaatgccaacactgtcttctcatgttcttccgtggggcattgattaatgagcatttgttggctcctaaaaattagacaatccattctcttgaaagcaccgtgtcttgaaagaatatttttccttttgatctgactatcgtgaaaatatttttgaaagttcttaatcatagttttccacttttgagcacttgctatctatagacactgtgcaggcttcacatacattacattctttaaccctcacagtaatcctttgaggggggtaagatcattcccattttgtgggtgaggaaattgaccccctaaaatgataattgacttgtcccagctgacttggctagaaagatctggatcctgggatttgaatccagggtcagtctgagtccagagcccttgctcttaacagctatggtgaacagacaactttaatccccaggggtggtggttttcatccaggatttgtctctatgactgttctccattggcataatgttagcacgtgaagcaaaggtagggaacaccctgtgctcatcctcatcactgcacgtgaagttcctggtcaatgtggactgtggtgatgctactgtgtgcctctgacaaaggagaggcaagagccttctggttggggcgggaaataccatccatagttggctatttcttgagaaggaaggaaactgacctaggaccaaggtaaacctgacactgtgtctctctagtgcagattcctaactgctaccccaggctccatctctgttctacttcctgattgggtcaaattttaggagggacaacccactcatgcctcagaaaaatctgtcatatgggaaatgcctttaaaagccaatcccttgatgccttcttttaaaaagtagatttcacacttattcatttatccttacatggtatttgttaaggatccactgagcaccaggcattatgctgacgttgaaagagagccatcattatgactagaataataagtggcaaacgatgttgtgagaatggtgaacacgacctctgatgca

SEQ ID NO: 438173 - DNA, 4960 bp, Homo sapiens
atttcctcccagcctcgtgcgggaaatggctttaattctgacggcagggctgtgagggactagcgggaacccgagccttttgtcaaggaactgcggtgtcggtggccagtcatccccgccgccgcggagccgctgcactgctgggggatctcccagcagctctgacgagcgcgggctgcagcatgggcagaaaacgctgacctgcagattagctgggtggattttttaagcgcaccccaccccccaaacccataaaataacaaaaccaacccgcagtggccgaccggagatagctaagatgccgcgcaggagtttccacctggatgtttgaggttgtgtagatgtggccggcacccttgagagtggagctagggggtgcagactgagcagtgaacagaaggagccttggacagggctgggccagcctcccgagttccaggagcgaattgcaaacccaccgggaaaatgagcgaagagacggtccccgaggctgcctcgccgccgcccccgcaggggcagccttactttgaccgcttctcagaggacgaccccgagtacatgcgccttcgcaaccgggcggcggacctgcggcaggacttcaacctgatggagcagaagaagcgcgtcaccatgatcctgcagagtccctctttcagggaggagctggaaggcctcatccaggagcagatgaagaaggggaacaactcctccaacatctgggccctgcgacagatcgcggacttcatggccagcacctcccacgcagtcttcccgacatcttccatgaatgtctccatgatgacgcctatcaatgacctccacacagctgactccctgaacctggccaaaggggagcggctcatgcggtgcaagatcagcagtgtctaccgactcctggacctctatggctgggcccagctgagtgacacctatgtcacgttgagagtcagcaaggagcaggaccacttcctgatcagccctaagggagtttcttgcagtgaagtcacagcgtccagcctgatcaaggtgaacattctgggagaggtggtggagaagggcagcagctgcttcccagtggacaccacaggcttctgtctgcactcggccatctatgcagcgaggcccgacgtgcgctgcatcatccacctgcacacaccggccacagcagcggtgtcggccatgaagtggggcctcctgcctgtctcccacaatgccctgctggtgggggacatggcctattatgacttcaatggggaaatggagcaggaagccgatcggatcaacctgcagaagtgccttggacccacctgcaagatcctggtgctaagaaaccatggagtggttgctctgggtgacacggtagaggaggcattttacaagatcttccacctgcaggctgcatgtgagatacaggtgtcggctctgtccagtgccgggggagtggagaacctcatcctcctggagcaggagaagcaccggccccatgaggtgggctccgtgcagtgggccgggagcacctttgggcctatgcagaagagtcggctgggggagcatgagtttgaggccctcatgaggatgctggacaacctgggctacagaacaggttacacgtatcgccacccctttgttcaagagaaaaccaaacacaaaagtgaggtggagattccagccacggtcacagccttcgtgtttgaggaggacggtgccccggtgcccgccctgcgacagcatgcccagaagcagcagaaggagaagacccgctggctcaatacgcccaacacctacctgcgggtcaatgtggccgatgaggtccagaggagcatgggcagcccccgacccaagaccacgtggatgaaggctgacgaggtggagaaatccagcagtggcatgccgattcgcatcgaaaacccaaaccaatttgtgcctctctatactgacccccaggaagtactggagatgaggaacaagattcgagaacaaaaccgacaagatgtgaagtcagcggggcctcagtcccagctcctggcgagcgtcattgccgagaagagccgaagcccgtctacagagagccagctgatgtccaagggagacgaggataccaaagacgattcagaggagacggtgcccaaccccttcagccaactcactgaccaggagttggaggagtacaagaaagaggtggagaggaagaaactagaacttgatgagacaggacaggaacgagagccaggctctggtccggccgtgtgcgagttcttcagcgttgccctccacatctggagtaacatattggagagaaagaaactgccccagaagagcctggctcacctgcaaagtctgcacctgcttctccagtgcagagcccagcgaaggaggcagagacaaagagccctttagtctctccttccaagtctttagaggaaggtactaagaagacagaaacaagcaaagccgccaccacagagcccgaaacaacccagccggaaggggtggtggtcaacgggagggaggaggagcagacggcagaggaaatcctcagcaaaggcctgagccagatgaccaccagtgctgacacggatgttgatacctctaaggacaaaaccgagtcggtcaccagcggccccatgtccccagagggctcaccttccaagtctccctcaaagaagaaaaagaaattccgaaccccctccttcctgaaaaagagcaaaaagaaggagaaagtggagtcctgattcatgacacccttgggctccctcctgcctcctctctctcctccccttcccttctcccatctctgtccctgcaagcacagggctaaggagggatagagtaggaccctggaccacattcggaaggggaacttagagatcacccgaccaacccttcgttttacagttgcccaagagaaatcaggtgacttgcccaaggtcacacagctagttagcggcagagcctgcactcgaattcaggtctcctgacttccagtccagtgctccttctactacacaacactgcctagttgtgggctgcctttgtttggatgctgtccaccaatctgagcctagggcaagaaggccagaaatgggccgtgagctctcacaggctcagactaaatcagaggtcaaggcttcccctgagtaaggtccatttcttcccaggaatccaatctcctgtggatggagctatctctacatttaaaaatctcttctcttttccactttgggtccctgccctgctcgctcaaagtgactagccaaattgacccctccaacagaaagtaatctttgttcccaagggctgatggcttagcttgtactaccccaaacattaaccctgagctttcttcatggaacctcttgaatgatggatggaagagctataagaggtggtaggcataggggcaagccatgtaagctgaggattggggatggtttcatcaacataagaggccaggaacttgacccctttgaattgtgcatctcaggcacttcaaaactaaaaccaaatttagcataggaaaaagttgtttaatgctcagggcagaaatttggggaagttgaaatcctctgttggctttgggttgtataaggaggatcaaaacaacagaggaaatgctgactttctagctttgcatgacacctggagcaatgcactgtacctgcctcactcctgtcccagtggtcaggtttcccctgaccttccctcacccccagaaacacttgcttacagaccgaaactggcatcttactcttggcaccttgacttgcaccctctgaggttccaactcagtcattctttgtccagcagaggagaatcagaaatgagcccttcaggattaatcctcttgcaccagctctcagagaaatgctgggtatccctgtccttgtccctatctgtccatcctggggcctggtaatggccacagttattgttttaaatgccaacactgtcttctcatgttcttccgtggggcattgattaatgagcatttgttggctcctaaaaattagacaatccattctcttgaaagcaccgtgtcttgaaagaatatttttccttttgatctgactatcgtgaaaatatttttgaaagttcttaatcatagttttccacttttgagcacttgctatctatagacactgtgcaggcttcacatacattacattctttaaccctcacagtaatcctttgaggggggtaagatcattcccattttgtgggtgaggaaattgaccccctaaaatgataattgacttgtcccagctgacttggctagaaagatctggatcctgggatttgaatccagggtcagtctgagtccagagcccttgctcttaacagctatggtgaacagacaactttaatccccaggggtggtggttttcatccaggatttgtctctatgactgttctccattggcataatgttagcacgtgaagcaaaggtagggaacaccctgtgctcatcctcatcactgcacgtgaagttcctggtcaatgtggactgtggtgatgctactgtgtgcctctgacaaaggagaggcaagagccttctggttggggcgggaaataccatccatagttggctatttcttgagaaggaaggaaactgacctaggaccaaggtaaacctgacactgtgtctctctagtgcagattcctaactgctaccccaggctccatctctgttctacttcctgattgggtcaaattttaggagggacaacccactcatgcctcagaaaaatctgtcatatgggaaatgcctttaaaagccaatcccttgatgccttcttttaaaaagtagatttcacacttattcatttatccttacatggtatttgttaaggatccactgagcaccaggcattatgctgacgttgaaagagagccatcattatgactagaataataagtggcaaacgatgttgtgagaatggtgaacacgacctctgatgca

SEQ ID NO: 438174 - DNA, 3932 bp, Homo sapiens
atttcctcccagcctcgtgcgggaaatggctttaattctgacggcagggctgtgagggactagcgggaacccgagccttttgtcaaggaactgcggtgtcggtggccagtcatccccgccgccgcggagccgctgcactgctgggggatctcccagcagctctgacgagcgcgggctgcagcatgggcagaaaacgctgacctgcagattagctgggtggattttttaagcgcaccccaccccccaaacccataaaataacaaaaccaacccgcagtggccgaccggagatagctaagatgccgcgcaggagtttccacctggatgtttgaggttgtgtagatgtggccggcacccttgagagtggagctagggggtgcagactgagcagtgaacagaaggagccttggacagggctgggccagcctcccgagttccaggagcgaattgcaaacccaccgggaaaatgagcgaagagacggtccccgaggctgcctcgccgccgcccccgcaggggcagccttactttgaccgcttctcagaggacgaccccgagtacatgcgccttcgcaaccgggcggcggacctgcggcaggacttcaacctgatggagcagaagaagcgcgtcaccatgatcctgcagagtcccggctacagaacaggttacacgtatcgccacccctttgttcaagagaaaaccaaacacaaaagtgaggtggagattccagccacggtcacagccttcgtgtttgaggaggacggtgccccggtgcccgccctgcgacagcatgcccagaagcagcagaaggagaagacccgctggctcaatacgcccaacacctacctgcgggtcaatgtggccgatgaggtccagaggagcatgggcagcccccgacccaagaccacgtggatgaaggctgacgaggtggagaaatccagcagtggcatgccgattcgcatcgaaaacccaaaccaatttgtgcctctctatactgacccccaggaagtactggagatgaggaacaagattcgagaacaaaaccgacaagatgtgaagtcagcggggcctcagtcccagctcctggcgagcgtcattgccgagaagagccgaagcccgtctacagagagccagctgatgtccaagggagacgaggataccaaagacgattcagaggagacggtgcccaaccccttcagccaactcactgaccaggagttggaggagtacaagaaagaggtggagaggaagaaactagaacttgatggagagaaagaaactgccccagaagagcctggctcacctgcaaagtctgcacctgcttctccagtgcagagcccagcgaaggaggcagagacaaagagccctttagtctctccttccaagtctttagaggaaggtactaagaagacagaaacaagcaaagccgccaccacagagcccgaaacaacccagccggaaggggtggtggtcaacgggagggaggaggagcagacggcagaggaaatcctcagcaaaggcctgagccagatgaccaccagtgctgacacggatgttgatacctctaaggacaaaaccgagtcggtcaccagcggccccatgtccccagagggctcaccttccaagtctccctcaaagaagaaaaagaaattccgaaccccctccttcctgaaaaagagcaaaaagaaggagaaagtggagtcctgattcatgacacccttgggctccctcctgcctcctctctctcctccccttcccttctcccatctctgtccctgcaagcacagggctaaggagggatagagtaggaccctggaccacattcggaaggggaacttagagatcacccgaccaacccttcgttttacagttgcccaagagaaatcaggtgacttgcccaaggtcacacagctagttagcggcagagcctgcactcgaattcaggtctcctgacttccagtccagtgctccttctactacacaacactgcctagttgtgggctgcctttgtttggatgctgtccaccaatctgagcctagggcaagaaggccagaaatgggccgtgagctctcacaggctcagactaaatcagaggtcaaggcttcccctgagtaaggtccatttcttcccaggaatccaatctcctgtggatggagctatctctacatttaaaaatctcttctcttttccactttgggtccctgccctgctcgctcaaagtgactagccaaattgacccctccaacagaaagtaatctttgttcccaagggctgatggcttagcttgtactaccccaaacattaaccctgagctttcttcatggaacctcttgaatgatggatggaagagctataagaggtggtaggcataggggcaagccatgtaagctgaggattggggatggtttcatcaacataagaggccaggaacttgacccctttgaattgtgcatctcaggcacttcaaaactaaaaccaaatttagcataggaaaaagttgtttaatgctcagggcagaaatttggggaagttgaaatcctctgttggctttgggttgtataaggaggatcaaaacaacagaggaaatgctgactttctagctttgcatgacacctggagcaatgcactgtacctgcctcactcctgtcccagtggtcaggtttcccctgaccttccctcacccccagaaacacttgcttacagaccgaaactggcatcttactcttggcaccttgacttgcaccctctgaggttccaactcagtcattctttgtccagcagaggagaatcagaaatgagcccttcaggattaatcctcttgcaccagctctcagagaaatgctgggtatccctgtccttgtccctatctgtccatcctggggcctggtaatggccacagttattgttttaaatgccaacactgtcttctcatgttcttccgtggggcattgattaatgagcatttgttggctcctaaaaattagacaatccattctcttgaaagcaccgtgtcttgaaagaatatttttccttttgatctgactatcgtgaaaatatttttgaaagttcttaatcatagttttccacttttgagcacttgctatctatagacactgtgcaggcttcacatacattacattctttaaccctcacagtaatcctttgaggggggtaagatcattcccattttgtgggtgaggaaattgaccccctaaaatgataattgacttgtcccagctgacttggctagaaagatctggatcctgggatttgaatccagggtcagtctgagtccagagcccttgctcttaacagctatggtgaacagacaactttaatccccaggggtggtggttttcatccaggatttgtctctatgactgttctccattggcataatgttagcacgtgaagcaaaggtagggaacaccctgtgctcatcctcatcactgcacgtgaagttcctggtcaatgtggactgtggtgatgctactgtgtgcctctgacaaaggagaggcaagagccttctggttggggcgggaaataccatccatagttggctatttcttgagaaggaaggaaactgacctaggaccaaggtaaacctgacactgtgtctctctagtgcagattcctaactgctaccccaggctccatctctgttctacttcctgattgggtcaaattttaggagggacaacccactcatgcctcagaaaaatctgtcatatgggaaatgcctttaaaagccaatcccttgatgccttcttttaaaaagtagatttcacacttattcatttatccttacatggtatttgttaaggatccactgagcaccaggcattatgctgacgttgaaagagagccatcattatgactagaataataagtggcaaacgatgttgtgagaatggtgaacacgacctctgatgca

SEQ ID NO: 438175 - DNA, 3161 bp, Homo sapiens
atttcctcccagcctcgtgcgggaaatggctttaattctgacggcagggctgtgagggactagcgggaacccgagccttttgtcaaggaactgcggtgtcggtggccagtcatccccgccgccgcggagccgctgcactgctgggggatctcccagcagctctgacgagcgcgggctgcagcatgggcagaaaacgctgacctgcagattagctgggtggattttttaagcgcaccccaccccccaaacccataaaataacaaaaccaacccgcagtggccgaccggagatagctaagatgccgcgcaggagtttccacctggatgtttgaggttgtgtagatgtggccggcacccttgagagtggagctagggggtgcagactgagcagtgaacagaaggagccttggacagggctgggccagcctcccgagttccaggagcgaattgcaaacccaccgggaaaatgagcgaagagacggtccccgaggctgcctcgccgccgcccccgcaggggcagccttactttgaccgcttctcagaggacgaccccgagtacatgcgccttcgcaaccgggcggcggacctgcggcaggacttcaacctgatggagcagaagaagcgcgtcaccatgatcctgcagagtccctctttcagggaggagctggaaggcctcatccaggagcagatgaagaaggggaacaactcctccaacatctgggccctgcgacagatcgcggacttcatggccagcacctcccacgcagtcttcccgacatcttccatgaatgtctccatgatgacgcctatcaatgacctccacacagctgactccctgaacctggccaaaggggagcggctcatgcggtgcaagatcagcagtgtctaccgactcctggacctctatggctgggcccagctgagtgacacctatgtcacgttgagagtcagcaaggagcaggaccacttcctgatcagccctaagggagtttcttgcagtgaagtcacagcgtccagcctgatcaaggtgaacattctgggagaggtggtggagaagggcagcagctgcttcccagtggacaccacaggcttctgtctgcactcggccatctatgcagcgaggcccgacgtgcgctgcatcatccacctgcacacaccggccacagcagcggtgtcggccatgaagtggggcctcctgcctgtctcccacaatgccctgctggtgggggacatggcctattatgacttcaatggggaaatggagcaggaagccgatcggatcaacctgcagaagtgccttggacccacctgcaagatcctggtgctaagaaaccatggagtggttgctctgggtgacacggtagaggaggcattttacaagatcttccacctgcaggctgcatgtgagatacaggtgtcggctctgtccagtgccgggggagtggagaacctcatcctcctggagcaggagaagcaccggccccatgaggtgggctccgtgcagtgggccgggagcacctttgggcctatgcagaagagtcggctgggggagcatgagtttgaggccctcatgaggatgctggacaacctgggctacagaacaggttacacgtatcgccacccctttgttcaagagaaaaccaaacacaaaagtgaggtggagattccagccacggtcacagccttcgtgtttgaggaggacggtgccccggtgcccgccctgcgacagcatgcccagaagcagcagaaggagaagacccgctggctcaatacgcccaacacctacctgcgggtcaatgtggccgatgaggtccagaggagcatgggcagcccccgacccaagaccacgtggatgaaggctgacgaggtggagaaatccagcagtggcatgccgattcgcatcgaaaacccaaaccaatttgtgcctctctatactgacccccaggaagtactggagatgaggaacaagattcgagaacaaaaccgacaagatgtgaagtcagcggggcctcagtcccagctcctggcgagcgtcattgccgagaagagccgaagcccggtagagcagaggctgcccctgactggcggggaaacgtgtttgccttgccttcggggtcttgtgcctggggctgggttgcaggacccctgatcctcatacccaccttcccctgtgatcttgggtgcctttgctcttgctgcaaatggaggccaacctcacaggggtgctgtgaggaccagggaggacaatgtctgatggcccctgtgggcactgggctggagaacacgagcccagcctgcctgcaggagtgatgcggccggcttccgtacctcctgccatggaactccactctgtcctccttactaccccgtgaagtggggactcataggcttggggctggagactcccaggtgccccaggtgtgcccagccctgagagtctctgagcctctagcctggtatgacatcatccaaccagagctctggaaagatgatcatgtacccatagagaaggggtatatagacaggacccatgctcctacaggatgggaagggacaatattacccacacaaacccacattgagttagaaagtattgtaattgtttttgtgcttgagatagaacagtgttttgtctagtgcttagcaaaaggggtgaagttcagaattctggcatgtgtttgaaatcactgctgctccttgcaaggtagcaatgggcatgacattttccttagcagtaaaaattggggaaatacaggaaatgttcctctctgcagggcaaattgtgatgatgcaatgatttcaggtcaagactgcagcccacagggtgggtgcccattggcaggagaagtgtgaaagttgtatcatcacacttacctccccccaaccccaactcagccaagatggggaacactgaatatcccgcagggtccaagtatagaaatagccatgttctggcgggaggtgagagttcattacaatgagcaacactgttaaaaaaacaaacaaaaatctcccctgccatttataccaagtgctcttctcggagtccctcttcttgggtttttggtcttggattctcggttgactccatgattccctacattaggcctactgtggcctcccttttggaaggggcccaggggcaggaagacctggcgggcc

SEQ ID NO: 438176 - DNA, 2219 bp, Homo sapiens
atttcctcccagcctcgtgcgggaaatggctttaattctgacggcagggctgtgagggactagcgggaacccgagccttttgtcaaggaactgcggtgtcggtggccagtcatccccgccgccgcggagccgctgcactgctgggggatctcccagcagctctgacgagcgcgggctgcagcatgggcagaaaacgctgacctgcagattagctgggtggattttttaagcgcaccccaccccccaaacccataaaataacaaaaccaacccgcagtggccgaccggagatagctaagatgccgcgcaggagtttccacctggatgtttgaggttgtgtagatgtggccggcacccttgagagtggagctagggggtgcagactgagcagtgaacagaaggagccttggacagggctgggccagcctcccgagttccaggagcgaattgcaaacccaccgggaaaatgagcgaagagacggtccccgaggctgcctcgccgccgcccccgcaggggcagccttactttgaccgcttctcagaggacgaccccgagtacatgcgccttcgcaaccgggcggcggacctgcggcaggacttcaacctgatggagcagaagaagcgcgtcaccatgatcctgcagagtcccggctacagaacaggttacacgtatcgccacccctttgttcaagagaaaaccaaacacaaaagtgaggtggagattccagccacggtcacagccttcgtgtttgaggaggacggtgccccggtgcccgccctgcgacagcatgcccagaagcagcagaaggagaagacccgctggctcaatacgcccaacacctacctgcgggtcaatgtggccgatgaggtccagaggagcatgggcagcccccgacccaagaccacgtggatgaaggctgacgaggtggagaaatccagcagtggcatgccgattcgcatcgaaaacccaaaccaatttgtgcctctctatactgacccccaggaagtactggagatgaggaacaagattcgagaacaaaaccgacaagatgtgaagtcagcggggcctcagtcccagctcctggcgagcgtcattgccgagaagagccgaagcccggtagagcagaggctgcccctgactggcggggaaacgtgtttgccttgccttcggggtcttgtgcctggggctgggttgcaggacccctgatcctcatacccaccttcccctgtgatcttgggtgcctttgctcttgctgcaaatggaggccaacctcacaggggtgctgtgaggaccagggaggacaatgtctgatggcccctgtgggcactgggctggagaacacgagcccagcctgcctgcaggagtgatgcggccggcttccgtacctcctgccatggaactccactctgtcctccttactaccccgtgaagtggggactcataggcttggggctggagactcccaggtgccccaggtgtgcccagccctgagagtctctgagcctctagcctggtatgacatcatccaaccagagctctggaaagatgatcatgtacccatagagaaggggtatatagacaggacccatgctcctacaggatgggaagggacaatattacccacacaaacccacattgagttagaaagtattgtaattgtttttgtgcttgagatagaacagtgttttgtctagtgcttagcaaaaggggtgaagttcagaattctggcatgtgtttgaaatcactgctgctccttgcaaggtagcaatgggcatgacattttccttagcagtaaaaattggggaaatacaggaaatgttcctctctgcagggcaaattgtgatgatgcaatgatttcaggtcaagactgcagcccacagggtgggtgcccattggcaggagaagtgtgaaagttgtatcatcacacttacctccccccaaccccaactcagccaagatggggaacactgaatatcccgcagggtccaagtatagaaatagccatgttctggcgggaggtgagagttcattacaatgagcaacactgttaaaaaaacaaacaaaaatctcccctgccatttataccaagtgctcttctcggagtccctcttcttgggtttttggtcttggattctcggttgactccatgattccctacattaggcctactgtggcctcccttttggaaggggcccaggggcaggaagacctggcgggcc

SEQ ID NO: 438177 - DNA, 861 bp, Homo sapiens
  misc_feature (791)..(791): n is a, c, g, or t
  misc_feature (855)..(855): n is a, c, g, or t
  misc_feature (858)..(858): n is a, c, g, or t
atttcctcccagcctcgtgcgggaaatggctttaattctgacggcagggctgtgagggactagcgggaacccgagccttttgtcaaggaactgcggtgtcggtggccagtcatccccgccgccgcggagccgctgcactgctgggggatctcccagcagctctgacgagcgcgggctgcagcatgggcagaaaacgctgacctgcagattagctgggtggattttttaagcgcaccccaccccccaaacccataaaataacaaaaccaacccgcagtggccgaccggagatagctaagatgccgcgcaggagtttccacctggatgtttgaggttgtgtagatgtggccggcacccttgagagtggagctagggggtgcagactgagcagtgaacagaaggagccttggacagggctgggccagcctcccgagttccaggagcgaattgcaaacccaccgggaaaatgagcgaagagacggtccccgaggctgcctcgccgccgcccccgcaggggcagccttactttgaccgcttctcagaggacgaccccgagtacatgcgccttcgcaaccgggcggcggacctgcggcaggacttcaacctgatggagcagaagaagcgcgtcaccatgatcctgcagagtccctctttcagggaggagctggaaggcctcatccaggagcagatgaagaaggggaacaactcctccaacatctgggccctgcgacagatcgcggacttcatggccagcacctcccacgcagtcttcccgacatcttccatgaatgncttccattgatgaccccttttcaatggaccttcaacacaagtttgacttcccttgaaacttggnccnaaa

SEQ ID NO: 438178 - DNA, 4631 bp, Homo sapiens
tgtaaaagtagcagcagctcagccctgaccatctcctctctcacttgtgggagtctcatttagggatcgtttccacctggatgtttgaggttgtgtagatgtggccggcacccttgagagtggagctagggggtgcagactgagcagtgaacagaaggagccttggacagggctgggccagcctcccgagttccaggagcgaattgcaaacccaccgggaaaatgagcgaagagacggtccccgaggctgcctcgccgccgcccccgcaggggcagccttactttgaccgcttctcagaggacgaccccgagtacatgcgccttcgcaaccgggcggcggacctgcggcaggacttcaacctgatggagcagaagaagcgcgtcaccatgatcctgcagagtccctctttcagggaggagctggaaggcctcatccaggagcagatgaagaaggggaacaactcctccaacatctgggccctgcgacagatcgcggacttcatggccagcacctcccacgcagtcttcccgacatcttccatgaatgtctccatgatgacgcctatcaatgacctccacacagctgactccctgaacctggccaaaggggagcggctcatgcggtgcaagatcagcagtgtctaccgactcctggacctctatggctgggcccagctgagtgacacctatgtcacgttgagagtcagcaaggagcaggaccacttcctgatcagccctaagggagtttcttgcagtgaagtcacagcgtccagcctgatcaaggtgaacattctgggagaggtggtggagaagggcagcagctgcttcccagtggacaccacaggcttctgtctgcactcggccatctatgcagcgaggcccgacgtgcgctgcatcatccacctgcacacaccggccacagcagcggtgtcggccatgaagtggggcctcctgcctgtctcccacaatgccctgctggtgggggacatggcctattatgacttcaatggggaaatggagcaggaagccgatcggatcaacctgcagaagtgccttggacccacctgcaagatcctggtgctaagaaaccatggagtggttgctctgggtgacacggtagaggaggcattttacaagatcttccacctgcaggctgcatgtgagatacaggtgtcggctctgtccagtgccgggggagtggagaacctcatcctcctggagcaggagaagcaccggccccatgaggtgggctccgtgcagtgggccgggagcacctttgggcctatgcagaagagtcggctgggggagcatgagtttgaggccctcatgaggatgctggacaacctgggctacagaacaggttacacgtatcgccacccctttgttcaagagaaaaccaaacacaaaagtgaggtggagattccagccacggtcacagccttcgtgtttgaggaggacggtgccccggtgcccgccctgcgacagcatgcccagaagcagcagaaggagaagacccgctggctcaatacgcccaacacctacctgcgggtcaatgtggccgatgaggtccagaggagcatgggcagcccccgacccaagaccacgtggatgaaggctgacgaggtggagaaatccagcagtggcatgccgattcgcatcgaaaacccaaaccaatttgtgcctctctatactgacccccaggaagtactggagatgaggaacaagattcgagaacaaaaccgacaagatgtgaagtcagcggggcctcagtcccagctcctggcgagcgtcattgccgagaagagccgaagcccgtctacagagagccagctgatgtccaagggagacgaggataccaaagacgattcagaggagacggtgcccaaccccttcagccaactcactgaccaggagttggaggagtacaagaaagaggtggagaggaagaaactagaacttgatggagagaaagaaactgccccagaagagcctggctcacctgcaaagtctgcacctgcttctccagtgcagagcccagcgaaggaggcagagacaaagagccctttagtctctccttccaagtctttagaggaaggtactaagaagacagaaacaagcaaagccgccaccacagagcccgaaacaacccagccggaaggggtggtggtcaacgggagggaggaggagcagacggcagaggaaatcctcagcaaaggcctgagccagatgaccaccagtgctgacacggatgttgatacctctaaggacaaaaccgagtcggtcaccagcggccccatgtccccagagggctcaccttccaagtctccctcaaagaagaaaaagaaattccgaaccccctccttcctgaaaaagagcaaaaagaaggagaaagtggagtcctgattcatgacacccttgggctccctcctgcctcctctctctcctccccttcccttctcccatctctgtccctgcaagcacagggctaaggagggatagagtaggaccctggaccacattcggaaggggaacttagagatcacccgaccaacccttcgttttacagttgcccaagagaaatcaggtgacttgcccaaggtcacacagctagttagcggcagagcctgcactcgaattcaggtctcctgacttccagtccagtgctccttctactacacaacactgcctagttgtgggctgcctttgtttggatgctgtccaccaatctgagcctagggcaagaaggccagaaatgggccgtgagctctcacaggctcagactaaatcagaggtcaaggcttcccctgagtaaggtccatttcttcccaggaatccaatctcctgtggatggagctatctctacatttaaaaatctcttctcttttccactttgggtccctgccctgctcgctcaaagtgactagccaaattgacccctccaacagaaagtaatctttgttcccaagggctgatggcttagcttgtactaccccaaacattaaccctgagctttcttcatggaacctcttgaatgatggatggaagagctataagaggtggtaggcataggggcaagccatgtaagctgaggattggggatggtttcatcaacataagaggccaggaacttgacccctttgaattgtgcatctcaggcacttcaaaactaaaaccaaatttagcataggaaaaagttgtttaatgctcagggcagaaatttggggaagttgaaatcctctgttggctttgggttgtataaggaggatcaaaacaacagaggaaatgctgactttctagctttgcatgacacctggagcaatgcactgtacctgcctcactcctgtcccagtggtcaggtttcccctgaccttccctcacccccagaaacacttgcttacagaccgaaactggcatcttactcttggcaccttgacttgcaccctctgaggttccaactcagtcattctttgtccagcagaggagaatcagaaatgagcccttcaggattaatcctcttgcaccagctctcagagaaatgctgggtatccctgtccttgtccctatctgtccatcctggggcctggtaatggccacagttattgttttaaatgccaacactgtcttctcatgttcttccgtggggcattgattaatgagcatttgttggctcctaaaaattagacaatccattctcttgaaagcaccgtgtcttgaaagaatatttttccttttgatctgactatcgtgaaaatatttttgaaagttcttaatcatagttttccacttttgagcacttgctatctatagacactgtgcaggcttcacatacattacattctttaaccctcacagtaatcctttgaggggggtaagatcattcccattttgtgggtgaggaaattgaccccctaaaatgataattgacttgtcccagctgacttggctagaaagatctggatcctgggatttgaatccagggtcagtctgagtccagagcccttgctcttaacagctatggtgaacagacaactttaatccccaggggtggtggttttcatccaggatttgtctctatgactgttctccattggcataatgttagcacgtgaagcaaaggtagggaacaccctgtgctcatcctcatcactgcacgtgaagttcctggtcaatgtggactgtggtgatgctactgtgtgcctctgacaaaggagaggcaagagccttctggttggggcgggaaataccatccatagttggctatttcttgagaaggaaggaaactgacctaggaccaaggtaaacctgacactgtgtctctctagtgcagattcctaactgctaccccaggctccatctctgttctacttcctgattgggtcaaattttaggagggacaacccactcatgcctcagaaaaatctgtcatatgggaaatgcctttaaaagccaatcccttgatgccttcttttaaaaagtagatttcacacttattcatttatccttacatggtatttgttaaggatccactgagcaccaggcattatgctgacgttgaaagagagccatcattatgactagaataataagtggcaaacgatgttgtgagaatggtgaacacgacctctgatgca

SEQ ID NO: 438179 - DNA, 2850 bp, Homo sapiens
  misc_feature (19)..(19): n is a, c, g, or t
  misc_feature (28)..(28): n is a, c, g, or t
  misc_feature (49)..(49): n is a, c, g, or t
ggccaacccttaagccaantcattgccnggatttgaggagtccaagaanaggtgaaaggaagactagacttgatgctcctggctggttctcttcagagacaggacaggaacgagagccaggctctggtccggccgtgtgcgagttcttcagcgttgccctccacatctggagtaacatattggagagaaagaaactgccccagaagagcctggctcacctgcaaagtctgcacctgcttctccagtgcagagcccagcgaaggaggcagagacaaagagccctttagtctctccttccaagtctttagaggaaggtactaagaagacagaaacaagcaaagccgccaccacagagcccgaaacaacccagccggaaggggtggtggtcaacgggagggaggaggagcagacggcagaggaaatcctcagcaaaggcctgagccagatgaccaccagtgctgacacggatgttgatacctctaaggacaaaaccgagtcggtcaccagcggccccatgtccccagagggctcaccttccaagtctccctcaaagaagaaaaagaaattccgaaccccctccttcctgaaaaagagcaaaaagaaggagaaagtggagtcctgattcatgacacccttgggctccctcctgcctcctctctctcctccccttcccttctcccatctctgtccctgcaagcacagggctaaggagggatagagtaggaccctggaccacattcggaaggggaacttagagatcacccgaccaacccttcgttttacagttgcccaagagaaatcaggtgacttgcccaaggtcacacagctagttagcggcagagcctgcactcgaattcaggtctcctgacttccagtccagtgctccttctactacacaacactgcctagttgtgggctgcctttgtttggatgctgtccaccaatctgagcctagggcaagaaggccagaaatgggccgtgagctctcacaggctcagactaaatcagaggtcaaggcttcccctgagtaaggtccatttcttcccaggaatccaatctcctgtggatggagctatctctacatttaaaaatctcttctcttttccactttgggtccctgccctgctcgctcaaagtgactagccaaattgacccctccaacagaaagtaatctttgttcccaagggctgatggcttagcttgtactaccccaaacattaaccctgagctttcttcatggaacctcttgaatgatggatggaagagctataagaggtggtaggcataggggcaagccatgtaagctgaggattggggatggtttcatcaacataagaggccaggaacttgacccctttgaattgtgcatctcaggcacttcaaaactaaaaccaaatttagcataggaaaaagttgtttaatgctcagggcagaaatttggggaagttgaaatcctctgttggctttgggttgtataaggaggatcaaaacaacagaggaaatgctgactttctagctttgcatgacacctggagcaatgcactgtacctgcctcactcctgtcccagtggtcaggtttcccctgaccttccctcacccccagaaacacttgcttacagaccgaaactggcatcttactcttggcaccttgacttgcaccctctgaggttccaactcagtcattctttgtccagcagaggagaatcagaaatgagcccttcaggattaatcctcttgcaccagctctcagagaaatgctgggtatccctgtccttgtccctatctgtccatcctggggcctggtaatggccacagttattgttttaaatgccaacactgtcttctcatgttcttccgtggggcattgattaatgagcatttgttggctcctaaaaattagacaatccattctcttgaaagcaccgtgtcttgaaagaatatttttccttttgatctgactatcgtgaaaatatttttgaaagttcttaatcatagttttccacttttgagcacttgctatctatagacactgtgcaggcttcacatacattacattctttaaccctcacagtaatcctttgaggggggtaagatcattcccattttgtgggtgaggaaattgaccccctaaaatgataattgacttgtcccagctgacttggctagaaagatctggatcctgggatttgaatccagggtcagtctgagtccagagcccttgctcttaacagctatggtgaacagacaactttaatccccaggggtggtggttttcatccaggatttgtctctatgactgttctccattggcataatgttagcacgtgaagcaaaggtagggaacaccctgtgctcatcctcatcactgcacgtgaagttcctggtcaatgtggactgtggtgatgctactgtgtgcctctgacaaaggagaggcaagagccttctggttggggcgggaaataccatccatagttggctatttcttgagaaggaaggaaactgacctaggaccaaggtaaacctgacactgtgtctctctagtgcagattcctaactgctaccccaggctccatctctgttctacttcctgattgggtcaaattttaggagggacaacccactcatgcctcagaaaaatctgtcatatgggaaatgcctttaaaagccaatcccttgatgccttcttttaaaaagtagatttcacacttattcatttatccttacatggtatttgttaaggatccactgagcaccaggcattatgctgacgttgaaagagagccatcattatgactagaataataagtggcaaacgatgttgtgagaatggtgaacacgacctctgatgca

SEQ ID NO: 438180 - DNA, 4208 bp, Homo sapiens
atttcctcccagcctcgtgcgggaaatggctttaattctgacggcagggctgtgagggactagcgggaacccgagccttttgtcaaggaactgcggtgtcggtggccagtcatccccgccgccgcggagccgctgcactgctgggggatctcccagcagctctgacgagcgcgggctgcagcatgggcagaaaacgctgacctgcagattagctgggtggattttttaagcgcaccccaccccccaaacccataaaataacaaaaccaacccgcagtggccgaccggagatagctaagatgccgcgcaggagtttccacctggatgtttgaggttgtgtagatgtggccggcacccttgagagtggagctagggggtgcagactgagcagtgaacagaaggagccttggacagggctgggccagcctcccgagttccaggagcgaattgcaaacccaccgggaaaatgagcgaagagacggtccccgaggctgcctcgccgccgcccccgcaggggcagccttactttgaccgcttctcagaggacgaccccgagtacatgcgccttcgcaaccgggcggcggacctgcggcaggacttcaacctgatggagcagaagaagcgcgtcaccatgatcctgcagagtcccatcctggtgctaagaaaccatggagtggttgctctgggtgacacggtagaggaggcattttacaagatcttccacctgcaggctgcatgtgagatacaggtgtcggctctgtccagtgccgggggagtggagaacctcatcctcctggagcaggagaagcaccggccccatgaggtgggctccgtgcagtgggccgggagcacctttgggcctatgcagaagagtcggctgggggagcatgagtttgaggccctcatgaggatgctggacaacctgggctacagaacaggttacacgtatcgccacccctttgttcaagagaaaaccaaacacaaaagtgaggtggagattccagccacggtcacagccttcgtgtttgaggaggacggtgccccggtgcccgccctgcgacagcatgcccagaagcagcagaaggagaagacccgctggctcaatacgcccaacacctacctgcgggtcaatgtggccgatgaggtccagaggagcatgggcagcccccgacccaagaccacgtggatgaaggctgacgaggtggagaaatccagcagtggcatgccgattcgcatcgaaaacccaaaccaatttgtgcctctctatactgacccccaggaagtactggagatgaggaacaagattcgagaacaaaaccgacaagatgtgaagtcagcggggcctcagtcccagctcctggcgagcgtcattgccgagaagagccgaagcccgtctacagagagccagctgatgtccaagggagacgaggataccaaagacgattcagaggagacggtgcccaaccccttcagccaactcactgaccaggagttggaggagtacaagaaagaggtggagaggaagaaactagaacttgatggagagaaagaaactgccccagaagagcctggctcacctgcaaagtctgcacctgcttctccagtgcagagcccagcgaaggaggcagagacaaagagccctttagtctctccttccaagtctttagaggaaggtactaagaagacagaaacaagcaaagccgccaccacagagcccgaaacaacccagccggaaggggtggtggtcaacgggagggaggaggagcagacggcagaggaaatcctcagcaaaggcctgagccagatgaccaccagtgctgacacggatgttgatacctctaaggacaaaaccgagtcggtcaccagcggccccatgtccccagagggctcaccttccaagtctccctcaaagaagaaaaagaaattccgaaccccctccttcctgaaaaagagcaaaaagaaggagaaagtggagtcctgattcatgacacccttgggctccctcctgcctcctctctctcctccccttcccttctcccatctctgtccctgcaagcacagggctaaggagggatagagtaggaccctggaccacattcggaaggggaacttagagatcacccgaccaacccttcgttttacagttgcccaagagaaatcaggtgacttgcccaaggtcacacagctagttagcggcagagcctgcactcgaattcaggtctcctgacttccagtccagtgctccttctactacacaacactgcctagttgtgggctgcctttgtttggatgctgtccaccaatctgagcctagggcaagaaggccagaaatgggccgtgagctctcacaggctcagactaaatcagaggtcaaggcttcccctgagtaaggtccatttcttcccaggaatccaatctcctgtggatggagctatctctacatttaaaaatctcttctcttttccactttgggtccctgccctgctcgctcaaagtgactagccaaattgacccctccaacagaaagtaatctttgttcccaagggctgatggcttagcttgtactaccccaaacattaaccctgagctttcttcatggaacctcttgaatgatggatggaagagctataagaggtggtaggcataggggcaagccatgtaagctgaggattggggatggtttcatcaacataagaggccaggaacttgacccctttgaattgtgcatctcaggcacttcaaaactaaaaccaaatttagcataggaaaaagttgtttaatgctcagggcagaaatttggggaagttgaaatcctctgttggctttgggttgtataaggaggatcaaaacaacagaggaaatgctgactttctagctttgcatgacacctggagcaatgcactgtacctgcctcactcctgtcccagtggtcaggtttcccctgaccttccctcacccccagaaacacttgcttacagaccgaaactggcatcttactcttggcaccttgacttgcaccctctgaggttccaactcagtcattctttgtccagcagaggagaatcagaaatgagcccttcaggattaatcctcttgcaccagctctcagagaaatgctgggtatccctgtccttgtccctatctgtccatcctggggcctggtaatggccacagttattgttttaaatgccaacactgtcttctcatgttcttccgtggggcattgattaatgagcatttgttggctcctaaaaattagacaatccattctcttgaaagcaccgtgtcttgaaagaatatttttccttttgatctgactatcgtgaaaatatttttgaaagttcttaatcatagttttccacttttgagcacttgctatctatagacactgtgcaggcttcacatacattacattctttaaccctcacagtaatcctttgaggggggtaagatcattcccattttgtgggtgaggaaattgaccccctaaaatgataattgacttgtcccagctgacttggctagaaagatctggatcctgggatttgaatccagggtcagtctgagtccagagcccttgctcttaacagctatggtgaacagacaactttaatccccaggggtggtggttttcatccaggatttgtctctatgactgttctccattggcataatgttagcacgtgaagcaaaggtagggaacaccctgtgctcatcctcatcactgcacgtgaagttcctggtcaatgtggactgtggtgatgctactgtgtgcctctgacaaaggagaggcaagagccttctggttggggcgggaaataccatccatagttggctatttcttgagaaggaaggaaactgacctaggaccaaggtaaacctgacactgtgtctctctagtgcagattcctaactgctaccccaggctccatctctgttctacttcctgattgggtcaaattttaggagggacaacccactcatgcctcagaaaaatctgtcatatgggaaatgcctttaaaagccaatcccttgatgccttcttttaaaaagtagatttcacacttattcatttatccttacatggtatttgttaaggatccactgagcaccaggcattatgctgacgttgaaagagagccatcattatgactagaataataagtggcaaacgatgttgtgagaatggtgaacacgacctctgatgca

SEQ ID NO: 438181 - DNA, 3956 bp, Homo sapiens
atttcctcccagcctcgtgcgggaaatggctttaattctgacggcagggctgtgagggactagcgggaacccgagccttttgtcaaggaactgcggtgtcggtggccagtcatccccgccgccgcggagccgctgcactgctgggggatctcccagcagctctgacgagcgcgggctgcagcatgggcagaaaacgctgacctgcagattagctgggtggattttttaagcgcaccccaccccccaaacccataaaataacaaaaccaacccgcagtggccgaccggagatagctaagatgccgcgcaggagtttccacctggatgtttgaggttgtgtagatgtggccggcacccttgagagtggagctagggggtgcagactgagcagtgaacagaaggagccttggacagggctgggccagcctcccgagttccaggagcgaattgcaaacccaccgggaaaatgagcgaagagacggtccccgaggctgcctcgccgccgcccccgcaggggcagccttactttgaccgcttctcagaggacgaccccgagtacatgcgccttcgcaaccgggcggcggacctgcggcaggacttcaacctgatggagcagaagaagcgcgtcaccatgatcctgcagagtccctctttcagggaggagctggaaggcctcatccaggagcagatgaagaaggggaacaactcctccaacatctgggccctgcgacagatcgcggacttcatggccagcacctcccacgcagtcttcccgacatcttccatgaatgtctccatgatgacgcctatcaatgacctccacacagctgactccctgaacctggccaaaggggagcggctcatgcggtgcaagatcagcagtgtctaccgactcctggacctctatggctgggcccagctgagtgacacctatgtcacgttgagagtcagcaaggagcaggaccacttcctgatcagccctaagggagtttcttgcagtgaagtcacagcgtccagcctgccccaggaagtactggagatgaggaacaagattcgagaacaaaaccgacaagatgtgaagtcagcggggcctcagtcccagctcctggcgagcgtcattgccgagaagagccgaagcccgtctacagagagccagctgatgtccaagggagacgaggataccaaagacgattcagaggagacggtgcccaaccccttcagccaactcactgaccaggagttggaggagtacaagaaagaggtggagaggaagaaactagaacttgatggagagaaagaaactgccccagaagagcctggctcacctgcaaagtctgcacctgcttctccagtgcagagcccagcgaaggaggcagagacaaagagccctttagtctctccttccaagtctttagaggaaggtactaagaagacagaaacaagcaaagccgccaccacagagcccgaaacaacccagccggaaggggtggtggtcaacgggagggaggaggagcagacggcagaggaaatcctcagcaaaggcctgagccagatgaccaccagtgctgacacggatgttgatacctctaaggacaaaaccgagtcggtcaccagcggccccatgtccccagagggctcaccttccaagtctccctcaaagaagaaaaagaaattccgaaccccctccttcctgaaaaagagcaaaaagaaggagaaagtggagtcctgattcatgacacccttgggctccctcctgcctcctctctctcctccccttcccttctcccatctctgtccctgcaagcacagggctaaggagggatagagtaggaccctggaccacattcggaaggggaacttagagatcacccgaccaacccttcgttttacagttgcccaagagaaatcaggtgacttgcccaaggtcacacagctagttagcggcagagcctgcactcgaattcaggtctcctgacttccagtccagtgctccttctactacacaacactgcctagttgtgggctgcctttgtttggatgctgtccaccaatctgagcctagggcaagaaggccagaaatgggccgtgagctctcacaggctcagactaaatcagaggtcaaggcttcccctgagtaaggtccatttcttcccaggaatccaatctcctgtggatggagctatctctacatttaaaaatctcttctcttttccactttgggtccctgccctgctcgctcaaagtgactagccaaattgacccctccaacagaaagtaatctttgttcccaagggctgatggcttagcttgtactaccccaaacattaaccctgagctttcttcatggaacctcttgaatgatggatggaagagctataagaggtggtaggcataggggcaagccatgtaagctgaggattggggatggtttcatcaacataagaggccaggaacttgacccctttgaattgtgcatctcaggcacttcaaaactaaaaccaaatttagcataggaaaaagttgtttaatgctcagggcagaaatttggggaagttgaaatcctctgttggctttgggttgtataaggaggatcaaaacaacagaggaaatgctgactttctagctttgcatgacacctggagcaatgcactgtacctgcctcactcctgtcccagtggtcaggtttcccctgaccttccctcacccccagaaacacttgcttacagaccgaaactggcatcttactcttggcaccttgacttgcaccctctgaggttccaactcagtcattctttgtccagcagaggagaatcagaaatgagcccttcaggattaatcctcttgcaccagctctcagagaaatgctgggtatccctgtccttgtccctatctgtccatcctggggcctggtaatggccacagttattgttttaaatgccaacactgtcttctcatgttcttccgtggggcattgattaatgagcatttgttggctcctaaaaattagacaatccattctcttgaaagcaccgtgtcttgaaagaatatttttccttttgatctgactatcgtgaaaatatttttgaaagttcttaatcatagttttccacttttgagcacttgctatctatagacactgtgcaggcttcacatacattacattctttaaccctcacagtaatcctttgaggggggtaagatcattcccattttgtgggtgaggaaattgaccccctaaaatgataattgacttgtcccagctgacttggctagaaagatctggatcctgggatttgaatccagggtcagtctgagtccagagcccttgctcttaacagctatggtgaacagacaactttaatccccaggggtggtggttttcatccaggatttgtctctatgactgttctccattggcataatgttagcacgtgaagcaaaggtagggaacaccctgtgctcatcctcatcactgcacgtgaagttcctggtcaatgtggactgtggtgatgctactgtgtgcctctgacaaaggagaggcaagagccttctggttggggcgggaaataccatccatagttggctatttcttgagaaggaaggaaactgacctaggaccaaggtaaacctgacactgtgtctctctagtgcagattcctaactgctaccccaggctccatctctgttctacttcctgattgggtcaaattttaggagggacaacccactcatgcctcagaaaaatctgtcatatgggaaatgcctttaaaagccaatcccttgatgccttcttttaaaaagtagatttcacacttattcatttatccttacatggtatttgttaaggatccactgagcaccaggcattatgctgacgttgaaagagagccatcattatgactagaataataagtggcaaacgatgttgtgagaatggtgaacacgacctctgatgca

SEQ ID NO: 438182 - DNA, 2243 bp, Homo sapiens
atttcctcccagcctcgtgcgggaaatggctttaattctgacggcagggctgtgagggactagcgggaacccgagccttttgtcaaggaactgcggtgtcggtggccagtcatccccgccgccgcggagccgctgcactgctgggggatctcccagcagctctgacgagcgcgggctgcagcatgggcagaaaacgctgacctgcagattagctgggtggattttttaagcgcaccccaccccccaaacccataaaataacaaaaccaacccgcagtggccgaccggagatagctaagatgccgcgcaggagtttccacctggatgtttgaggttgtgtagatgtggccggcacccttgagagtggagctagggggtgcagactgagcagtgaacagaaggagccttggacagggctgggccagcctcccgagttccaggagcgaattgcaaacccaccgggaaaatgagcgaagagacggtccccgaggctgcctcgccgccgcccccgcaggggcagccttactttgaccgcttctcagaggacgaccccgagtacatgcgccttcgcaaccgggcggcggacctgcggcaggacttcaacctgatggagcagaagaagcgcgtcaccatgatcctgcagagtccctctttcagggaggagctggaaggcctcatccaggagcagatgaagaaggggaacaactcctccaacatctgggccctgcgacagatcgcggacttcatggccagcacctcccacgcagtcttcccgacatcttccatgaatgtctccatgatgacgcctatcaatgacctccacacagctgactccctgaacctggccaaaggggagcggctcatgcggtgcaagatcagcagtgtctaccgactcctggacctctatggctgggcccagctgagtgacacctatgtcacgttgagagtcagcaaggagcaggaccacttcctgatcagccctaagggagtttcttgcagtgaagtcacagcgtccagcctgccccaggaagtactggagatgaggaacaagattcgagaacaaaaccgacaagatgtgaagtcagcggggcctcagtcccagctcctggcgagcgtcattgccgagaagagccgaagcccggtagagcagaggctgcccctgactggcggggaaacgtgtttgccttgccttcggggtcttgtgcctggggctgggttgcaggacccctgatcctcatacccaccttcccctgtgatcttgggtgcctttgctcttgctgcaaatggaggccaacctcacaggggtgctgtgaggaccagggaggacaatgtctgatggcccctgtgggcactgggctggagaacacgagcccagcctgcctgcaggagtgatgcggccggcttccgtacctcctgccatggaactccactctgtcctccttactaccccgtgaagtggggactcataggcttggggctggagactcccaggtgccccaggtgtgcccagccctgagagtctctgagcctctagcctggtatgacatcatccaaccagagctctggaaagatgatcatgtacccatagagaaggggtatatagacaggacccatgctcctacaggatgggaagggacaatattacccacacaaacccacattgagttagaaagtattgtaattgtttttgtgcttgagatagaacagtgttttgtctagtgcttagcaaaaggggtgaagttcagaattctggcatgtgtttgaaatcactgctgctccttgcaaggtagcaatgggcatgacattttccttagcagtaaaaattggggaaatacaggaaatgttcctctctgcagggcaaattgtgatgatgcaatgatttcaggtcaagactgcagcccacagggtgggtgcccattggcaggagaagtgtgaaagttgtatcatcacacttacctccccccaaccccaactcagccaagatggggaacactgaatatcccgcagggtccaagtatagaaatagccatgttctggcgggaggtgagagttcattacaatgagcaacactgttaaaaaaacaaacaaaaatctcccctgccatttataccaagtgctcttctcggagtccctcttcttgggtttttggtcttggattctcggttgactccatgattccctacattaggcctactgtggcctcccttttggaaggggcccaggggcaggaagacctggcgggcc

SEQ ID NO: 438183 - DNA, 4731 bp, Homo sapiens
gaatgtctgcacagccgctttccacacagacatcataacaaaaaatttccaccaaaccccctccccccgcttctggccacagcacttaaacacatctcccccaaacccataaaataacaaaaccaacccgcagtggccgaccggagatagctaagatgccgcgcaggagtttccacctggatgtttgaggttgtgtagatgtggccggcacccttgagagtggagctagggggtgcagactgagcagtgaacagaaggagccttggacagggctgggccagcctcccgagttccaggagcgaattgcaaacccaccgggaaaatgagcgaagagacggtccccgaggctgcctcgccgccgcccccgcaggggcagccttactttgaccgcttctcagaggacgaccccgagtacatgcgccttcgcaaccgggcggcggacctgcggcaggacttcaacctgatggagcagaagaagcgcgtcaccatgatcctgcagagtccctctttcagggaggagctggaaggcctcatccaggagcagatgaagaaggggaacaactcctccaacatctgggccctgcgacagatcgcggacttcatggccagcacctcccacgcagtcttcccgacatcttccatgaatgtctccatgatgacgcctatcaatgacctccacacagctgactccctgaacctggccaaaggggagcggctcatgcggtgcaagatcagcagtgtctaccgactcctggacctctatggctgggcccagctgagtgacacctatgtcacgttgagagtcagcaaggagcaggaccacttcctgatcagccctaagggagtttcttgcagtgaagtcacagcgtccagcctgatcaaggtgaacattctgggagaggtggtggagaagggcagcagctgcttcccagtggacaccacaggcttctgtctgcactcggccatctatgcagcgaggcccgacgtgcgctgcatcatccacctgcacacaccggccacagcagcggtgtcggccatgaagtggggcctcctgcctgtctcccacaatgccctgctggtgggggacatggcctattatgacttcaatggggaaatggagcaggaagccgatcggatcaacctgcagaagtgccttggacccacctgcaagatcctggtgctaagaaaccatggagtggttgctctgggtgacacggtagaggaggcattttacaagatcttccacctgcaggctgcatgtgagatacaggtgtcggctctgtccagtgccgggggagtggagaacctcatcctcctggagcaggagaagcaccggccccatgaggtgggctccgtgcagtgggccgggagcacctttgggcctatgcagaagagtcggctgggggagcatgagtttgaggccctcatgaggatgctggacaacctgggctacagaacaggttacacgtatcgccacccctttgttcaagagaaaaccaaacacaaaagtgaggtggagattccagccacggtcacagccttcgtgtttgaggaggacggtgccccggtgcccgccctgcgacagcatgcccagaagcagcagaaggagaagacccgctggctcaatacgcccaacacctacctgcgggtcaatgtggccgatgaggtccagaggagcatgggcagcccccgacccaagaccacgtggatgaaggctgacgaggtggagaaatccagcagtggcatgccgattcgcatcgaaaacccaaaccaatttgtgcctctctatactgacccccaggaagtactggagatgaggaacaagattcgagaacaaaaccgacaagatgtgaagtcagcggggcctcagtcccagctcctggcgagcgtcattgccgagaagagccgaagcccgtctacagagagccagctgatgtccaagggagacgaggataccaaagacgattcagaggagacggtgcccaaccccttcagccaactcactgaccaggagttggaggagtacaagaaagaggtggagaggaagaaactagaacttgatggagagaaagaaactgccccagaagagcctggctcacctgcaaagtctgcacctgcttctccagtgcagagcccagcgaaggaggcagagacaaagagccctttagtctctccttccaagtctttagaggaaggtactaagaagacagaaacaagcaaagccgccaccacagagcccgaaacaacccagccggaaggggtggtggtcaacgggagggaggaggagcagacggcagaggaaatcctcagcaaaggcctgagccagatgaccaccagtgctgacacggatgttgatacctctaaggacaaaaccgagtcggtcaccagcggccccatgtccccagagggctcaccttccaagtctccctcaaagaagaaaaagaaattccgaaccccctccttcctgaaaaagagcaaaaagaaggagaaagtggagtcctgattcatgacacccttgggctccctcctgcctcctctctctcctccccttcccttctcccatctctgtccctgcaagcacagggctaaggagggatagagtaggaccctggaccacattcggaaggggaacttagagatcacccgaccaacccttcgttttacagttgcccaagagaaatcaggtgacttgcccaaggtcacacagctagttagcggcagagcctgcactcgaattcaggtctcctgacttccagtccagtgctccttctactacacaacactgcctagttgtgggctgcctttgtttggatgctgtccaccaatctgagcctagggcaagaaggccagaaatgggccgtgagctctcacaggctcagactaaatcagaggtcaaggcttcccctgagtaaggtccatttcttcccaggaatccaatctcctgtggatggagctatctctacatttaaaaatctcttctcttttccactttgggtccctgccctgctcgctcaaagtgactagccaaattgacccctccaacagaaagtaatctttgttcccaagggctgatggcttagcttgtactaccccaaacattaaccctgagctttcttcatggaacctcttgaatgatggatggaagagctataagaggtggtaggcataggggcaagccatgtaagctgaggattggggatggtttcatcaacataagaggccaggaacttgacccctttgaattgtgcatctcaggcacttcaaaactaaaaccaaatttagcataggaaaaagttgtttaatgctcagggcagaaatttggggaagttgaaatcctctgttggctttgggttgtataaggaggatcaaaacaacagaggaaatgctgactttctagctttgcatgacacctggagcaatgcactgtacctgcctcactcctgtcccagtggtcaggtttcccctgaccttccctcacccccagaaacacttgcttacagaccgaaactggcatcttactcttggcaccttgacttgcaccctctgaggttccaactcagtcattctttgtccagcagaggagaatcagaaatgagcccttcaggattaatcctcttgcaccagctctcagagaaatgctgggtatccctgtccttgtccctatctgtccatcctggggcctggtaatggccacagttattgttttaaatgccaacactgtcttctcatgttcttccgtggggcattgattaatgagcatttgttggctcctaaaaattagacaatccattctcttgaaagcaccgtgtcttgaaagaatatttttccttttgatctgactatcgtgaaaatatttttgaaagttcttaatcatagttttccacttttgagcacttgctatctatagacactgtgcaggcttcacatacattacattctttaaccctcacagtaatcctttgaggggggtaagatcattcccattttgtgggtgaggaaattgaccccctaaaatgataattgacttgtcccagctgacttggctagaaagatctggatcctgggatttgaatccagggtcagtctgagtccagagcccttgctcttaacagctatggtgaacagacaactttaatccccaggggtggtggttttcatccaggatttgtctctatgactgttctccattggcataatgttagcacgtgaagcaaaggtagggaacaccctgtgctcatcctcatcactgcacgtgaagttcctggtcaatgtggactgtggtgatgctactgtgtgcctctgacaaaggagaggcaagagccttctggttggggcgggaaataccatccatagttggctatttcttgagaaggaaggaaactgacctaggaccaaggtaaacctgacactgtgtctctctagtgcagattcctaactgctaccccaggctccatctctgttctacttcctgattgggtcaaattttaggagggacaacccactcatgcctcagaaaaatctgtcatatgggaaatgcctttaaaagccaatcccttgatgccttcttttaaaaagtagatttcacacttattcatttatccttacatggtatttgttaaggatccactgagcaccaggcattatgctgacgttgaaagagagccatcattatgactagaataataagtggcaaacgatgttgtgagaatggtgaacacgacctctgatgca

SEQ ID NO: 438184 - DNA, 4704 bp, Homo sapiens
agcggtgcgaggcgggcttggcggggctgggcgcgtcccccggggcctcgcgatcgctggctgcgcggcgctcagccgcagtggccggccgagcaggtgcggcgtcggcagccgcctacattgagatcggggcaaccggcactttccacctggatgtttgaggttgtgtagatgtggccggcacccttgagagtggagctagggggtgcagactgagcagtgaacagaaggagccttggacagggctgggccagcctcccgagttccaggagcgaattgcaaacccaccgggaaaatgagcgaagagacggtccccgaggctgcctcgccgccgcccccgcaggggcagccttactttgaccgcttctcagaggacgaccccgagtacatgcgccttcgcaaccgggcggcggacctgcggcaggacttcaacctgatggagcagaagaagcgcgtcaccatgatcctgcagagtccctctttcagggaggagctggaaggcctcatccaggagcagatgaagaaggggaacaactcctccaacatctgggccctgcgacagatcgcggacttcatggccagcacctcccacgcagtcttcccgacatcttccatgaatgtctccatgatgacgcctatcaatgacctccacacagctgactccctgaacctggccaaaggggagcggctcatgcggtgcaagatcagcagtgtctaccgactcctggacctctatggctgggcccagctgagtgacacctatgtcacgttgagagtcagcaaggagcaggaccacttcctgatcagccctaagggagtttcttgcagtgaagtcacagcgtccagcctgatcaaggtgaacattctgggagaggtggtggagaagggcagcagctgcttcccagtggacaccacaggcttctgtctgcactcggccatctatgcagcgaggcccgacgtgcgctgcatcatccacctgcacacaccggccacagcagcggtgtcggccatgaagtggggcctcctgcctgtctcccacaatgccctgctggtgggggacatggcctattatgacttcaatggggaaatggagcaggaagccgatcggatcaacctgcagaagtgccttggacccacctgcaagatcctggtgctaagaaaccatggagtggttgctctgggtgacacggtagaggaggcattttacaagatcttccacctgcaggctgcatgtgagatacaggtgtcggctctgtccagtgccgggggagtggagaacctcatcctcctggagcaggagaagcaccggccccatgaggtgggctccgtgcagtgggccgggagcacctttgggcctatgcagaagagtcggctgggggagcatgagtttgaggccctcatgaggatgctggacaacctgggctacagaacaggttacacgtatcgccacccctttgttcaagagaaaaccaaacacaaaagtgaggtggagattccagccacggtcacagccttcgtgtttgaggaggacggtgccccggtgcccgccctgcgacagcatgcccagaagcagcagaaggagaagacccgctggctcaatacgcccaacacctacctgcgggtcaatgtggccgatgaggtccagaggagcatgggcagcccccgacccaagaccacgtggatgaaggctgacgaggtggagaaatccagcagtggcatgccgattcgcatcgaaaacccaaaccaatttgtgcctctctatactgacccccaggaagtactggagatgaggaacaagattcgagaacaaaaccgacaagatgtgaagtcagcggggcctcagtcccagctcctggcgagcgtcattgccgagaagagccgaagcccgtctacagagagccagctgatgtccaagggagacgaggataccaaagacgattcagaggagacggtgcccaaccccttcagccaactcactgaccaggagttggaggagtacaagaaagaggtggagaggaagaaactagaacttgatggagagaaagaaactgccccagaagagcctggctcacctgcaaagtctgcacctgcttctccagtgcagagcccagcgaaggaggcagagacaaagagccctttagtctctccttccaagtctttagaggaaggtactaagaagacagaaacaagcaaagccgccaccacagagcccgaaacaacccagccggaaggggtggtggtcaacgggagggaggaggagcagacggcagaggaaatcctcagcaaaggcctgagccagatgaccaccagtgctgacacggatgttgatacctctaaggacaaaaccgagtcggtcaccagcggccccatgtccccagagggctcaccttccaagtctccctcaaagaagaaaaagaaattccgaaccccctccttcctgaaaaagagcaaaaagaaggagaaagtggagtcctgattcatgacacccttgggctccctcctgcctcctctctctcctccccttcccttctcccatctctgtccctgcaagcacagggctaaggagggatagagtaggaccctggaccacattcggaaggggaacttagagatcacccgaccaacccttcgttttacagttgcccaagagaaatcaggtgacttgcccaaggtcacacagctagttagcggcagagcctgcactcgaattcaggtctcctgacttccagtccagtgctccttctactacacaacactgcctagttgtgggctgcctttgtttggatgctgtccaccaatctgagcctagggcaagaaggccagaaatgggccgtgagctctcacaggctcagactaaatcagaggtcaaggcttcccctgagtaaggtccatttcttcccaggaatccaatctcctgtggatggagctatctctacatttaaaaatctcttctcttttccactttgggtccctgccctgctcgctcaaagtgactagccaaattgacccctccaacagaaagtaatctttgttcccaagggctgatggcttagcttgtactaccccaaacattaaccctgagctttcttcatggaacctcttgaatgatggatggaagagctataagaggtggtaggcataggggcaagccatgtaagctgaggattggggatggtttcatcaacataagaggccaggaacttgacccctttgaattgtgcatctcaggcacttcaaaactaaaaccaaatttagcataggaaaaagttgtttaatgctcagggcagaaatttggggaagttgaaatcctctgttggctttgggttgtataaggaggatcaaaacaacagaggaaatgctgactttctagctttgcatgacacctggagcaatgcactgtacctgcctcactcctgtcccagtggtcaggtttcccctgaccttccctcacccccagaaacacttgcttacagaccgaaactggcatcttactcttggcaccttgacttgcaccctctgaggttccaactcagtcattctttgtccagcagaggagaatcagaaatgagcccttcaggattaatcctcttgcaccagctctcagagaaatgctgggtatccctgtccttgtccctatctgtccatcctggggcctggtaatggccacagttattgttttaaatgccaacactgtcttctcatgttcttccgtggggcattgattaatgagcatttgttggctcctaaaaattagacaatccattctcttgaaagcaccgtgtcttgaaagaatatttttccttttgatctgactatcgtgaaaatatttttgaaagttcttaatcatagttttccacttttgagcacttgctatctatagacactgtgcaggcttcacatacattacattctttaaccctcacagtaatcctttgaggggggtaagatcattcccattttgtgggtgaggaaattgaccccctaaaatgataattgacttgtcccagctgacttggctagaaagatctggatcctgggatttgaatccagggtcagtctgagtccagagcccttgctcttaacagctatggtgaacagacaactttaatccccaggggtggtggttttcatccaggatttgtctctatgactgttctccattggcataatgttagcacgtgaagcaaaggtagggaacaccctgtgctcatcctcatcactgcacgtgaagttcctggtcaatgtggactgtggtgatgctactgtgtgcctctgacaaaggagaggcaagagccttctggttggggcgggaaataccatccatagttggctatttcttgagaaggaaggaaactgacctaggaccaaggtaaacctgacactgtgtctctctagtgcagattcctaactgctaccccaggctccatctctgttctacttcctgattgggtcaaattttaggagggacaacccactcatgcctcagaaaaatctgtcatatgggaaatgcctttaaaagccaatcccttgatgccttcttttaaaaagtagatttcacacttattcatttatccttacatggtatttgttaaggatccactgagcaccaggcattatgctgacgttgaaagagagccatcattatgactagaataataagtggcaaacgatgttgtgagaatggtgaacacgacctctgatgca

SEQ ID NO: 438185 - DNA, 836 bp, Homo sapiens
aagaaggggaacaactcctccaacatctgggccctgcgacagatcgcggacttcatggccagcacctcccacgcagtcttcccgacatcttccatgagtatgtggtgtctggggagctgccaggagcagaggtggaggggagggtggggtggggaagagagggaggagcagcaagaagcatctggttgccaggctatggagtaagcagcccattgtgttatcaggccttggggagctcagcagcagccagagaggtacctggctctgcttctgatgttgctgcaaattaaacgtccacagaaaaattaccccaatgccaggaataagagggtggaggtgacttcagtggacgggaagagaccactgaagcctgtgtttccatgccccactagacaggccaacctgactccacagatgagggctgagaggagccagccagggctatgcaggaagccaccctcctgggctgttatgctctgcccataacgtttaaaacacaagcatcaaaaaataactccccctcaataagattattacaggattatggctgaaaactgtgaaaataaccaagaaagggaagcagaaatcattctactgtgttcttaaagccctcatattactattcttaatattttggtgaacatatatccttccagtcctttttttcttaacatatatagattatgcaaacacaaatgtaatcacataaaatatggttctataatataatttttggtggatacatgctatttaataaatttcccattgttggacttttaggttatttccaactttttctgttaggaacaatgcaataaacatccttgtaaataaac

SEQ ID NO: 438186 - DNA, 4629 bp, Homo sapiens
gagatggagtctcgctctgttgcccaggctggagtgcagtggcgcgttctcagctcactgcaagctccgtctcccgggttcacgccattctcctgcctcagcctcccgatagctgggattacaggcccccaccaccacgcccagctaatttttttattttttgtagagatggggtttcaccatgttggccaggctggtcttgaactcctgacctcaggtgatccgcccacctcagcctcccaaagtgctgggattacaggcgtgagccactgcaccagaccctatctgtccaaatcttttgtcccactttaaattgttttttcttcttaacattgaattttaagaattcattgtatcttttaatattctgaatgctagttatttgtcagatacatgttttgcaaaccatttatctgtatttggtttctttttgttatcttagcagtgtatcctgaagaatagttttaaattttgatgtaatccaaaatatttcggttgtttgtgttctttgttatcctgtctatttttgttgttgttgttttatagatatgggggtctcactacgttgcccaggctggtcttgatctcctgaactcaagtgatcctcccacctcagcctcccatccttgtctacctaattaggctttgtgtaactcagtgttgcaaagctttgacatctgtttgagttaatgtttatatatgttgttacttaagggtttcacattaaatttaaacatacttatattttataaccaaacaagtcatgttggggcatactcattaggattgagtgctttcttacaccaaaatacatgtatacaaagatttaaaacactttcggccgggcgcggtaatcccagcactttgggaggccgaggcgggtggatcacaaggctaggagatcaagaccatctggctaacacggtgaaaccctgtcgctactaaaaaaatacaaaaaattagccagacgtggtggcaggcgcctgtagtcccagctactcgggaggctgagacaggagaatggcatgaacccgggaggcagagcttgcagtgagccgagatcaccccactgcactccagcctgggcgacagagtgaaggctatgtctcaagaaaaaaaaaaaaaaacttttataataacaactgtaaatagttcaattgacagtcatttgtaagatgtttaagtaaactgtgaaacagtaagtaaatggatgaaaacacactgattaaaactgctgcttttatccaacaagatggatgaatttcccaggaaagaatacttgagttcaggcctgttcaagtcccaacctgtttgtggtttgaggttgctctctgcctcatagagcaaagtggaaaatttatcttctgggaggacagagttttcttctctgaaaaagtttcctacatagttggctttggcatttgcaaggaatgaaaggtcagggattgaggcctcatgagtctggatttctagctgaggttgagagaaaaggtagtgattgtaaccagaaaatccagagtgggtgtatttacctccagaactcatcacttaaaaaaaaattttttttgaactgacatgcttgaggctttttctttttttttttttgagatggggtcttgctctatcccccaggctggagtgcagttgtgcagtcatagctcactgtagccttatcctcctggcctaagcagtcctcctgcctcaacctccctagtagctgagaccacaggcgcatgccacctgtgagtttctagagatgaggtctccctatgttccccagcctgggtcttgaactcctgggctcaagtgatcctcctgcctcagccttccaaagtgttggattacaggcgtgagccactgtgcctggccagagctcatcactgttaactcagcctgggtttttcacagcagtcatggaaatagattcattaataatagtaacaaatatatagtctccctctcaaagaaaccttgagtggcagtggcataccagatacacagtaggaaatactgtagaattatgttgttaagttcataaccaaacatcatacatgatgataaaagacaagataatggtcacatttatgcagtattaactgagagggcaaatttgtgcctgagaagctattgggaatgttctctctctttgcattactaggaattacatgggaaacacatgtagacagtcttcaggctattaagatttgtccacttaatctttacttatacatgaataaaaaatgggaaaacatgataaatataataaactaatacactcaaccctgccccttgattatataatagaacaaaatcagcatgcccggcatgagcctgccagattgccaattccatcctccaccttcagaggatgccgccatccagaattttgccttactcattttactttcttcatagttcgacaccttaaatgtatattactaatagtagctttgcatttttggctgatttaaaaattgatataaatgaaataatgctgtagagatgctttttggtattaagtggatatactgttattcttaaagatgtttgaaatgaatatacctttctaaatatctttttaaaataatacattaaatgatactgctttagaattcatgaactgcatctcatgagaatatgtagagatgacgtgggcaggtaaagtaaaacttcaggttgaatatcctatgataatttaaaaatgacaaaatagtgtggtgaataatagagcttgagcactttaaggcaccatagggaccccttcaatgtaatgatgacagtgctgaggtgcagagaagttaggtaatcagcccaagccactactctaaggacagaccctatctacttttcctaatttgtcagaagactgcctatgatactactaataaaaagtcctatgaaattggtattgtcattattttacaaataaaataatcttcaatttttgtttcctctatgcatgggttacttagtattttgtaatttgaatttcaagcataattaaaaagaaatcaggtatctaggctgggcatgatggctcaagcctgtaatctcaacattttgggaggctgaggcaagaggatcacttgaggccaggagtttgaggtatcttttgttgatctctacactgattgtattctctcttttattctatgaaagttaaagattttttctgatactacatattgtcagttttttaaatactcagtttgtgctaaaagaaaacattcggcaactgatatctgctgttctgtatgtatctgtcagtccagatttgtccattatggtgtatgaatctaatagaacctcaccaatgttatacctgccttcttgaaatcattactgagatagctaatattaaaatatcctggtttgtctgtatatttaattctttactctcattatactaaatttttttaatgtaatttgaattgatggtaaaaattgtatacaggccgggtgcagtggctcactcctataatcccagcattttggaagtcctatgcaggaggattgccagaggccaggaatttgagatcagcctgggcaacatagtgaaactctcatctttataaaaagtaatattaaaatttttaaaagtgtataaactgtaaagtatattttactggtgttttcttccttattcctacttgtcagatgcaaatacacatttttgtgtgtttgtgtttagtaattataagtatacatattttcttctatttcatatatttctatgacattatatcttagatgtgtaatttatgaactactactggattattttaatccattagaaattactattcacgcattctgtattcaattcatgtgatagctaatatatttggttttaaatgcatcttattttgtggttttcttctaggctgttttttgtgctttcttttaaaaatatataggttttaataatcttaattttcttttagtttgaaatgtatatactcattttattcattagtctaagataagaattgtaacacttctctaacctattatagaattgttaatacctttacccttctcttgaacacatcaaaggatgtcattgagtgttggtattggagtatagcatatctattattctgctcaattagaagatattgttcatgttgtatagagataataagtaattgtattgatctgcagatgcatccatctcttggattctcattccttctaccactgcagaactttcacctgtaatcactttcctttggccttaaggataacttttagggttacttttctactaaatttccaatttttgaccagatataatcttatattgtgctcttcctgaaaaatactattgttgtggatagaaatctgggttggtagttatttcttcagcaatttgaccatgtcattccactgtgtccctggcctcctgtatactggatgtgaatggatacaattatatattgtgtttatagttttcctgtgctataggaacagtattcgaatctgatgcaaaggacaacacaccctagagattgtaacagtgagatgaaccaagtgattggatggggttttgagttgctggaataatggagttacagtgtacaatgcataagcaacataataaattatatatctggtgaacaaaatgga

SEQ ID NO: 438187 - DNA, 3262 bp, Homo sapiens
  misc_feature (443)..(443): n is a, c, g, or t
tccgtctcaaaaaaaaaaaaaaaaaaaaaaaaacagaaaaaaggccgggcacggtggctcactcctgtaattccagaactttgggaggccaaggcgggcggatcaggagttcgagactgcctgggcaacatagcgaaaccccgtctctactaaaaatacaaaaaattagccaggcgtggtggcgggctcctgtaatcccagctactcaggaggcttaggcaggagaatcacttgaacccaggagtttgaggtatcttttgttgatctctacactgattgtattctctcttttattctatgacagttaaagattttttctgatactacattattgtcagttttttaaatactcagtttgtgctaaaagaaaacattcggcaactgatatctgctgttctgtatgtatctgtcagtccagatttgtccattatggtgtatgaatntaatagaacctcagccttccaaagtgttggattacaggcgtgagccactgtgcctggccagagctcatcactgttaactcagcctgggtttttcacagcagtcatggaaatagattcattaataatagtaacaaatatatagtctccctctcaaagaaaccttgagtggcagtggcataccagatacacagtaggaaatactgtagaattatgttgttaagttcataaccaaacatcatacatgatgataaaagacaagataatggtcacatttatgcagtattaactgagagggcaaatttgtgcctgagaagctattgggaatgttctctctctttgcattactaggaattacatgggaaacacatgtagacagtcttcaggctattaagatttgtccacttaatctttacttatacatgaataaaaaatgggaaaacatgataaatataataaactaatacactcaaccctgccccttgattatataatagaacaaaatcagcatgcccggcatgagcctgccagattgccaattccatcctccaccttcagaggatgccgccatccagaattttgccttactcattttactttcttcatagttcgacaccttaaatgtatattactaatagtagctttgcatttttggctgatttaaaaattgatataaatgaaataatgctgtagagatgctttttggtattaagtggatatactgttattcttaaagatgtttgaaatgaatatacctttctaaatatctttttaaaataatacattaaatgatactgctttagaattcatgaactgcatctcatgagaatatgtagagatgacgtgggcaggtaaagtaaaacttcaggttgaatatcctatgataatttaaaaatgacaaaatagtgtggtgaataatagagcttgagcactttaaggcaccatagggaccccttcaatgtaatgatgacagtgctgaggtgcagagaagttaggtaatcagcccaagccactactctaaggacagaccctatctacttttcctaatttgtcagaagactgcctatgatactactaataaaaagtcctatgaaattggtattgtcattattttacaaataaaataatcttcaatttttgtttcctctatgcatgggttacttagtattttgtaatttgaatttcaagcataattaaaaagaaatcaggtatctaggctgggcatgatggctcaagcctgtaatctcaacattttgggaggctgaggcaagaggatcacttgaggccaggagtttgaggtatcttttgttgatctctacactgattgtattctctcttttattctatgaaagttaaagattttttctgatactacatattgtcagttttttaaatactcagtttgtgctaaaagaaaacattcggcaactgatatctgctgttctgtatgtatctgtcagtccagatttgtccattatggtgtatgaatctaatagaacctcaccaatgttatacctgccttcttgaaatcattactgagatagctaatattaaaatatcctggtttgtctgtatatttaattctttactctcattatactaaatttttttaatgtaatttgaattgatggtaaaaattgtatacaggccgggtgcagtggctcactcctataatcccagcattttggaagtcctatgcaggaggattgccagaggccaggaatttgagatcagcctgggcaacatagtgaaactctcatctttataaaaagtaatattaaaatttttaaaagtgtataaactgtaaagtatattttactggtgttttcttccttattcctacttgtcagatgcaaatacacatttttgtgtgtttgtgtttagtaattataagtatacatattttcttctatttcatatatttctatgacattatatcttagatgtgtaatttatgaactactactggattattttaatccattagaaattactattcacgcattctgtattcaattcatgtgatagctaatatatttggttttaaatgcatcttattttgtggttttcttctaggctgttttttgtgctttcttttaaaaatatataggttttaataatcttaattttcttttagtttgaaatgtatatactcattttattcattagtctaagataagaattgtaacacttctctaacctattatagaattgttaatacctttacccttctcttgaacacatcaaaggatgtcattgagtgttggtattggagtatagcatatctattattctgctcaattagaagatattgttcatgttgtatagagataataagtaattgtattgatctgcagatgcatccatctcttggattctcattccttctaccactgcagaactttcacctgtaatcactttcctttggccttaaggataacttttagggttacttttctactaaatttccaatttttgaccagatataatcttatattgtgctcttcctgaaaaatactattgttgtggatagaaatctgggttggtagttatttcttcagcaatttgaccatgtcattccactgtgtccctggcctcctgtatactggatgtgaatggatacaattatatattgtgtttatagttttcctgtgctataggaacagtattcgaatctgatgcaaaggacaacacaccctagagattgtaacagtgagatgaaccaagtgattggatggggttttgagttgctggaataatggagttacagtgtacaatgcataagcaacataataaattatatatctggtgaacaaaatgga

SEQ ID NO: 438188 - DNA, 3103 bp, Homo sapiens
cccttcaatgtaatgatgacagtgctgaggtgcagagaagttaggtaatcagcccaagccactactctaaggacagaccctatctacttttcctaatttgtcagaagactgcctatgatactactaataaaaagtcctatgaaattggtattgtcattattttacaaataaaataatcttcaatttttgtttcctctatgcatgggttacttagtattttgtaatttgaatttcaagcataattaaaaagaaatcaggtatctaggctgggcatgatggctcaagcctgtgatctcagccttccaaagtgttggattacaggcgtgagccactgtgcctggccagagctcatcactgttaactcagcctgggtttttcacagcagtcatggaaatagattcattaataatagtaacaaatatatagtctccctctcaaagaaaccttgagtggcagtggcataccagatacacagtaggaaatactgtagaattatgttgttaagttcataaccaaacatcatacatgatgataaaagacaagataatggtcacatttatgcagtattaactgagagggcaaatttgtgcctgagaagctattgggaatgttctctctctttgcattactaggaattacatgggaaacacatgtagacagtcttcaggctattaagatttgtccacttaatctttacttatacatgaataaaaaatgggaaaacatgataaatataataaactaatacactcaaccctgccccttgattatataatagaacaaaatcagcatgcccggcatgagcctgccagattgccaattccatcctccaccttcagaggatgccgccatccagaattttgccttactcattttactttcttcatagttcgacaccttaaatgtatattactaatagtagctttgcatttttggctgatttaaaaattgatataaatgaaataatgctgtagagatgctttttggtattaagtggatatactgttattcttaaagatgtttgaaatgaatatacctttctaaatatctttttaaaataatacattaaatgatactgctttagaattcatgaactgcatctcatgagaatatgtagagatgacgtgggcaggtaaagtaaaacttcaggttgaatatcctatgataatttaaaaatgacaaaatagtgtggtgaataatagagcttgagcactttaaggcaccatagggaccccttcaatgtaatgatgacagtgctgaggtgcagagaagttaggtaatcagcccaagccactactctaaggacagaccctatctacttttcctaatttgtcagaagactgcctatgatactactaataaaaagtcctatgaaattggtattgtcattattttacaaataaaataatcttcaatttttgtttcctctatgcatgggttacttagtattttgtaatttgaatttcaagcataattaaaaagaaatcaggtatctaggctgggcatgatggctcaagcctgtaatctcaacattttgggaggctgaggcaagaggatcacttgaggccaggagtttgaggtatcttttgttgatctctacactgattgtattctctcttttattctatgaaagttaaagattttttctgatactacatattgtcagttttttaaatactcagtttgtgctaaaagaaaacattcggcaactgatatctgctgttctgtatgtatctgtcagtccagatttgtccattatggtgtatgaatctaatagaacctcaccaatgttatacctgccttcttgaaatcattactgagatagctaatattaaaatatcctggtttgtctgtatatttaattctttactctcattatactaaatttttttaatgtaatttgaattgatggtaaaaattgtatacaggccgggtgcagtggctcactcctataatcccagcattttggaagtcctatgcaggaggattgccagaggccaggaatttgagatcagcctgggcaacatagtgaaactctcatctttataaaaagtaatattaaaatttttaaaagtgtataaactgtaaagtatattttactggtgttttcttccttattcctacttgtcagatgcaaatacacatttttgtgtgtttgtgtttagtaattataagtatacatattttcttctatttcatatatttctatgacattatatcttagatgtgtaatttatgaactactactggattattttaatccattagaaattactattcacgcattctgtattcaattcatgtgatagctaatatatttggttttaaatgcatcttattttgtggttttcttctaggctgttttttgtgctttcttttaaaaatatataggttttaataatcttaattttcttttagtttgaaatgtatatactcattttattcattagtctaagataagaattgtaacacttctctaacctattatagaattgttaatacctttacccttctcttgaacacatcaaaggatgtcattgagtgttggtattggagtatagcatatctattattctgctcaattagaagatattgttcatgttgtatagagataataagtaattgtattgatctgcagatgcatccatctcttggattctcattccttctaccactgcagaactttcacctgtaatcactttcctttggccttaaggataacttttagggttacttttctactaaatttccaatttttgaccagatataatcttatattgtgctcttcctgaaaaatactattgttgtggatagaaatctgggttggtagttatttcttcagcaatttgaccatgtcattccactgtgtccctggcctcctgtatactggatgtgaatggatacaattatatattgtgtttatagttttcctgtgctataggaacagtattcgaatctgatgcaaaggacaacacaccctagagattgtaacagtgagatgaaccaagtgattggatggggttttgagttgctggaataatggagttacagtgtacaatgcataagcaacataataaattatatatctggtgaacaaaatgga

SEQ ID NO: 438189 - DNA, 5149 bp, Homo sapiens
  misc_feature (4640)..(4640): n is a, c, g, or t
gagatggagtctcgctctgttgcccaggctggagtgcagtggcgcgttctcagctcactgcaagctccgtctcccgggttcacgccattctcctgcctcagcctcccgatagctgggattacaggcccccaccaccacgcccagctaatttttttattttttgtagagatggggtttcaccatgttggccaggctggtcttgaactcctgacctcaggtgatccgcccacctcagcctcccaaagtgctgggattacaggcgtgagccactgcaccagaccctatctgtccaaatcttttgtcccactttaaattgttttttcttcttaacattgaattttaagaattcattgtatcttttaatattctgaatgctagttatttgtcagatacatgttttgcaaaccatttatctgtatttggtttctttttgttatcttagcagtgtatcctgaagaatagttttaaattttgatgtaatccaaaatatttcggttgtttgtgttctttgttatcctgtctatttttgttgttgttgttttatagatatgggggtctcactacgttgcccaggctggtcttgatctcctgaactcaagtgatcctcccacctcagcctcccatccttgtctacctaattaggctttgtgtaactcagtgttgcaaagctttgacatctgtttgagttaatgtttatatatgttgttacttaagggtttcacattaaatttaaacatacttatattttataaccaaacaagtcatgttggggcatactcattaggattgagtgctttcttacaccaaaatacatgtatacaaagatttaaaacactttcggccgggcgcggtaatcccagcactttgggaggccgaggcgggtggatcacaaggctaggagatcaagaccatctggctaacacggtgaaaccctgtcgctactaaaaaaatacaaaaaattagccagacgtggtggcaggcgcctgtagtcccagctactcgggaggctgagacaggagaatggcatgaacccgggaggcagagcttgcagtgagccgagatcaccccactgcactccagcctgggcgacagagtgaaggctatgtctcaagaaaaaaaaaaaaaaacttttataataacaactgtaaatagttcaattgacagtcatttgtaagatgtttaagtaaactgtgaaacagtaagtaaatggatgaaaacacactgattaaaactgctgcttttatccaacaagatggatgaatttcccaggaaagaatacttgagttcaggcctgttcaagtcccaacctgtttgtggtttgaggttgctctctgcctcatagagcaaagtggaaaatttatcttctgggaggacagagttttcttctctgaaaaagtttcctacatagttggctttggcatttgcaaggaatgaaaggtcagggattgaggcctcatgagtctggatttctagctgaggttgagagaaaaggtagtgattgtaaccagaaaatccagagtgggtgtatttacctccagaactcatcacttaaaaaaaaattttttttgaactgacatgcttgaggctttttctttttttttttttgagatggggtcttgctctatcccccaggctggagtgcagttgtgcagtcatagctcactgtagccttatcctcctggcctaagcagtcctcctgcctcaacctccctagtagctgagaccacaggcgcatgccacctgtgagtttctagagatgaggtctccctatgttccccagcctgggtcttgaactcctgggctcaagtgatcctcctgcctcagccttccaaagtgttggattacaggcgtgagccactgtgcctggccagagctcatcactgttaactcagcctgggtttttcacagcagtcatggaaatagattcattaataatagtaacaaatatatagtctccctctcaaagaaaccttgagtggcagtggcataccagatacacagtaggaaatactgtagaattatgttgttaagttcataaccaaacatcatacatgatgataaaagacaagataatggtcacatttatgcagtattaactgagagggcaaatttgtgcctgagaagctattgggaatgttctctctctttgcattactaggaattacatgggaaacacatgtagacagtcttcaggctattaagatttgtccacttaatctttacttatacatgaataaaaaatgggaaaacatgataaatataataaactaatacactcaaccctgccccttgattatataatagaacaaaatcagcatgcccggcatgagcctgccagattgccaattccatcctccaccttcagaggatgccgccatccagaattttgccttactcattttactttcttcatagttcgacaccttaaatgtatattactaatagtagctttgcatttttggctgatttaaaaattgatataaatgaaataatgctgtagagatgctttttggtattaagtggatatactgttattcttaaagatgtttgaaatgaatatacctttctaaatatctttttaaaataatacattaaatgatactgctttagaattcatgaactgcatctcatgagaatatgtagagatgacgtgggcaggtaaagtaaaacttcaggttgaatatcctatgataatttaaaaatgacaaaatagtgtggtgaataatagagcttgagcactttaaggcaccatagggaccccttcaatgtaatgatgacagtgctgaggtgcagagaagttaggtaatcagcccaagccactactctaaggacagaccctatctacttttcctaatttgtcagaagactgcctatgatactactaataaaaagtcctatgaaattggtattgtcattattttacaaataaaataatcttcaatttttgtttcctctatgcatgggttacttagtattttgtaatttgaatttcaagcataattaaaaagaaatcaggtatctaggctgggcatgatggctcaagcctgtaatctcaacattttgggaggctgaggcaagaggatcacttgaggccaggagtttgaggtatcttttgttgatctctacactgattgtattctctcttttattctatgaaagttaaagattttttctgatactacatattgtcagttttttaaatactcagtttgtgctaaaagaaaacattcggcaactgatatctgctgttctgtatgtatctgtcagtccagatttgtccattatggtgtatgaatctaatagaacctcaccaatgttatacctgccttcttgaaatcattactgagatagctaatattaaaatatcctggtttgtctgtatatttaattctttactctcattatactaaatttttttaatgtaatttgaattgatggtaaaaattgtatacaggccgggtgcagtggctcactcctataatcccagcattttggaagtcctatgcaggaggattgccagaggccaggaatttgagatcagcctgggcaacatagtgaaactctcatctttataaaaagtaatattaaaatttttaaaagtgtataaactgtaaagtatattttactggtgttttcttccttattcctacttgtcagatgcaaatacacatttttgtgtgtttgtgtttagtaattataagtatacatattttcttctatttcatatatttctatgacattatatcttagatgtgtaatttatgaactactactggattattttaatccattagaaattactattcacgcattctgtattcaattcatgtgatagctaatatatttggttttaaatgcatcttattttgtggttttcttctaggctgttttttgtgctttcttttaaaaatatataggttttaataatcttaattttcttttagtttgaaatgtatatactcattttattcattagtctaagataagaattgtaacacttctctaacctattatagaattgttaatacctttacccttctcttgaacacatcaaaggatgtcattgagtgttggtattggagtatagcatatctattattctgctcaattagaagatattgttcatgttgtatagagataataagtaattgtattgatctgcagatgcatccatctcttggattctcattccttctaccactgcagaactttcacctgtaatcactttcctttggccttaaggataacttttagggttacttttctactaaatttccaatttttgaccagatataatcttatattgtgctcttcctgaaaaatactattgttgtggatagaaatctgggttggtagttatttcttcagcaatttgaccatgtcattccactgtgtccctggcctcctgtatactggatgtgaatggatacaattatatattgtgtttatagttttcctgtgctataggaacagtattcgaatctgatgcaaaggacaacacaccctagagattgtaacagtgagatgaaccaagtgattggatggggttttgagttgctggaataatggagttacagtgtacaatgcataagcaacataataaattatatatctggtgaacaaaatggaaaaaaaaaaancaaaaaaaaaaaaaaaaacaaaaaaaaaaaaaaaaaaaaaaaaaaaaaaaaaaaaaggggggggggccccaaaaaaaatttccccggggggggccccaatttcccccccccttttttttgtaaaaaagggggcccccaaaaggggggggcaataaaaaaagggcgcgggggccggaaaacaaccggcggtggggcggaggaaccacgcgtcgaggcggatgttggaaaggccccccctctctgtgggggggcgatctcggcgcgccaacccaccaccaaaattttacgggccgggggaaaaaaacatgccgtggtatgctgcgaccccagaatctcgctgcgggagaatcggtccggtattctacaaataagtaggcgacaatattaaccgagcactacacaaccacagtactagaaacacactgcgataacacccttactcataacataatctaacaaaaaacactcccaccaaccacaacatacactgacactactacaccgcatat

SEQ ID NO: 438190 - DNA, 4715 bp, Homo sapiens
gagatggagtctcgctctgttgcccaggctggagtgcagtggcgcgttctcagctcactgcaagctccgtctcccgggttcacgccattctcctgcctcagcctcccgatagctgggattacaggcccccaccaccacgcccagctaatttttttattttttgtagagatggggtttcaccatgttggccaggctggtcttgaactcctgacctcaggtgatccgcccacctcagcctcccaaagtgctgggattacaggcgtgagccactgcaccagaccctatctgtccaaatcttttgtcccactttaaattgttttttcttcttaacattgaattttaagaattcattgtatcttttaatattctgaatgctagttatttgtcagatacatgttttgcaaaccatttatctgtatttggtttctttttgttatcttagcagtgtatcctgaagaatagttttaaattttgatgtaatccaaaatatttcggttgtttgtgttctttgttatcctgtctatttttgttgttgttgttttatagatatgggggtctcactacgttgcccaggctggtcttgatctcctgaactcaagtgatcctcccacctcagcctcccatccttgtctacctaattaggctttgtgtaactcagtgttgcaaagctttgacatctgtttgagttaatgtttatatatgttgttacttaagggtttcacattaaatttaaacatacttatattttataaccaaacaagtcatgttggggcatactcattaggattgagtgctttcttacaccaaaatacatgtatacaaagatttaaaacactttcggccgggcgcggtaatcccagcactttgggaggccgaggcgggtggatcacaaggctaggagatcaagaccatctggctaacacggtgaaaccctgtcgctactaaaaaaatacaaaaaattagccagacgtggtggcaggcgcctgtagtcccagctactcgggaggctgagacaggagaatggcatgaacccgggaggcagagcttgcagtgagccgagatcaccccactgcactccagcctgggcgacagagtgaaggctatgtctcaagaaaaaaaaaaaaaaacttttataataacaactgtaaatagttcaattgacagtcatttgtaagatgtttaagtaaactgtgaaacagtaagtaaatggatgaaaacacactgattaaaactgctgcttttatccaacaagatggatgaatttcccaggaaagaatacttgagttcaggcctgttcaagtcccaacctgtttgtggtttgaggttgctctctgcctcatagagcaaagtggaaaatttatcttctgggaggacagagttttcttctctgaaaaagtttcctacatagttggctttggcatttgcaaggaatgaaaggtcagggattgaggcctcatgagtctggatttctagctgaggttgagagaaaaggtagtgattgtaaccagaaaatccagagtgggtgtatttacctccagaactcatcacttaaaaaaaaattttttttgaactgacatgcttgaggctttttctttttttttttttgagatggggtcttgctctatcccccaggctggagtgcagttgtgcagtcatagctcactgtagccttatcctcctggcctaagcagtcctcctgcctcaacctccctagtagctgagaccacaggcgcatgccacctgtgagtttctagagatgaggtctccctatgttccccagcctgggtcttgaactcctgggctcaagtgatcctcctgcctcagccttccaaagtgttggattacaggcgtgagccactgtgcctggccagagctcatcactgttaactcagcctgggtttttcacagcagtcatggaaatagattcattaataatagtaacaaatatatagtctccctctcaaagaaaccttgagtggcagtggcataccagatacacagtaggaaatactgtagaattatgttgttaagttcataaccaaacatcatacatgatgataaaagacaagataatggtcacatttatgcagtattaactgagagggcaaatttgtgcctgagaagctattgggaatgttctctctctttgcattactaggaattacatgggaaacacatgtagacagtcttcaggctattaagatttgtccacttaatctttacttatacatgaataaaaaatgggaaaacatgataaatataataaactaatacactcaaccctgccccttgattatataatagaacaaaatcagcatgcccggcatgagcctgccagattgccaattccatcctccaccttcagaggatgccgccatccagaattttgccttactcattttactttcttcatagttcgacaccttaaatgtatattactaatagtagctttgcatttttggctgatttaaaaattgatataaatgaaataatgctgtagagatgctttttggtattaagtggatatactgttattcttaaagatgtttgaaatgaatatacctttctaaatatctttttaaaataatacattaaatgatactgctttagaattcatgaactgcatctcatgagaatatgtagagatgacgtgggcaggtaaagtaaaacttcaggttgaatatcctatgataatttaaaaatgacaaaatagtgtggtgaataatagagcttgagcactttaaggcaccatagggaccccttcaatgtaatgatgacagtgctgaggtgcagagaagttaggtaatcagcccaagccactactctaaggacagaccctatctacttttcctaatttgtcagaagactgcctatgatactactaataaaaagtcctatgaaattggtattgtcattattttacaaataaaataatcttcaatttttgtttcctctatgcatgggttacttagtattttgtaatttgaatttcaagcataattaaaaagaaatcaggtatctaggctgggcatgatggctcaagcctgtaatctcaacattttgggaggctgaggcaagaggatcacttgaggccaggagtttgaggtatcttttgttgatctctacactgattgtattctctcttttattctatgaaagttaaagattttttctgatactacatattgtcagttttttaaatactcagtttgtgctaaaagaaaacattcggcaactgatatctgctgttctgtatgtatctgtcagtccagatttgtccattatggtgtatgaatctaatagaacctcaccaatgttatacctgccttcttgaaatcattactgagatagctaatattaaaatatcctggtttgtctgtatatttaattctttactctcattatactaaatttttttaatgtaatttgaattgatggtaaaaattgtatacaggccgggtgcagtggctcactcctataatcccagcattttggaagtcctatgcaggaggattgccagaggccaggaatttgagatcagcctgggcaacatagtgaaactctcatctttataaaaagtaatattaaaatttttaaaagtgtataaactgtaaagtatattttactggtgttttcttccttattcctacttgtcagatgcaaatacacatttttgtgtgtttgtgtttagtaattataagtatacatattttcttctatttcatatatttctatgacattatatcttagatgtgtaatttatgaactactactggattattttaatccattagaaattactattcacgcattctgtattcaattcatgtgatagctaatatatttggttttaaatgcatcttattttgtggttttcttctaggctgttttttgtgctttcttttaaaaatatataggttttaataatcttaattttcttttagtttgaaatgtatatactcattttattcattagtctaagataagaattgtaacacttctctaacctattatagaattgttaatacctttacccttctcttgaacacatcaaaggatgtcattgagtgttggtattggagtatagcatatctattattctgctcaattagaagatattgttcatgttgtatagagataataagtaattgtattgatctgcagatgcatccatctcttggattctcattccttctaccactgcagaactttcacctgtaatcactttcctttggccttaaggataacttttagggttacttttctactaaatttccaatttttgaccagatataatcttatattgtgctcttcctgaaaaatactattgttgtggatagaaatctgggttggtagttatttcttcagcaatttgaccatgtcattccactgtgtccctggcctcctgtatactggatgtgaatggatacaattatatattgtgtttatagttttcctgtgctataggaacagtattcgaatctgatgcaaaggacaacacaccctagagattgtaacagtgagatgaaccaagtgattggatggggttttgagttgctggaataatggagttacagtgtacaatgcataagcaacataataaattatatatctggtgaacaaaatggaatataaaatttactttaaatttttaatattatataaaaaaatcttgagggggggccctgtaccaaattctccctataggaggttga

SEQ ID NO: 438191 - DNA, 1748 bp, Homo sapiens
cccttcacggtacctcaagaagaagtgagctctctttcttctaattctttgttgtttgaattgcacaaacgtttaaatatatctatatctataattccttattaggcttaaaattattaagtgaaaatacttcgttacaggccgtgtgtggtggctaacactcctgtaatctcaacattttgggaggctgaggcaagaggatcacttgaggccaggagtttgaggtatcttttgttgatctctacactgattgtattctctcttttattctatgaaagttaaagattttttctgatactacatattgtcagttttttaaatactcagtttgtgctaaaagaaaacattcggcaactgatatctgctgttctgtatgtatctgtcagtccagatttgtccattatggtgtatgaatctaatagaacctcaccaatgttatacctgccttcttgaaatcattactgagatagctaatattaaaatatcctggtttgtctgtatatttaattctttactctcattatactaaatttttttaatgtaatttgaattgatggtaaaaattgtatacaggccgggtgcagtggctcactcctataatcccagcattttggaagtcctatgcaggaggattgccagaggccaggaatttgagatcagcctgggcaacatagtgaaactctcatctttataaaaagtaatattaaaatttttaaaagtgtataaactgtaaagtatattttactggtgttttcttccttattcctacttgtcagatgcaaatacacatttttgtgtgtttgtgtttagtaattataagtatacatattttcttctatttcatatatttctatgacattatatcttagatgtgtaatttatgaactactactggattattttaatccattagaaattactattcacgcattctgtattcaattcatgtgatagctaatatatttggttttaaatgcatcttattttgtggttttcttctaggctgttttttgtgctttcttttaaaaatatataggttttaataatcttaattttcttttagtttgaaatgtatatactcattttattcattagtctaagataagaattgtaacacttctctaacctattatagaattgttaatacctttacccttctcttgaacacatcaaaggatgtcattgagtgttggtattggagtatagcatatctattattctgctcaattagaagatattgttcatgttgtatagagataataagtaattgtattgatctgcagatgcatccatctcttggattctcattccttctaccactgcagaactttcacctgtaatcactttcctttggccttaaggataacttttagggttacttttctactaaatttccaatttttgaccagatataatcttatattgtgctcttcctgaaaaatactattgttgtggatagaaatctgggttggtagttatttcttcagcaatttgaccatgtcattccactgtgtccctggcctcctgtatactggatgtgaatggatacaattatatattgtgtttatagttttcctgtgctataggaacagtattcgaatctgatgcaaaggacaacacaccctagagattgtaacagtgagatgaaccaagtgattggatggggttttgagttgctggaataatggagttacagtgtacaatgcataagcaacataataaattatatatctggtgaacaaaatgga

SEQ ID NO: 438192 - DNA, 4250 bp, Homo sapiens
gtcgaccggagtctcactctgttgcccaggccggggtgcagtagctcaatcttggatcgctgcagcctccacctcctgggttcaggcaattctcctgcctcggcctcctcagcggctgggactacaggggcacaccaccatgcccggctaatttttgtgtttttggtggagatggggtttcaccatgttggccaggctgatctcaagctcctgacctcaatgatcctcccacctcagcctcccatccttgtctacctaattaggctttgtgtaactcagtgttgcaaagctttgacatctgtttgagttaatgtttatatatgttgttacttaagggtttcacattaaatttaaacatacttatattttataaccaaacaagtcatgttggggcatactcattaggattgagtgctttcttacaccaaaatacatgtatacaaagatttaaaacactttcggccgggcgcggtaatcccagcactttgggaggccgaggcgggtggatcacaaggctaggagatcaagaccatctggctaacacggtgaaaccctgtcgctactaaaaaaatacaaaaaattagccagacgtggtggcaggcgcctgtagtcccagctactcgggaggctgagacaggagaatggcatgaacccgggaggcagagcttgcagtgagccgagatcaccccactgcactccagcctgggcgacagagtgaaggctatgtctcaagaaaaaaaaaaaaaaacttttataataacaactgtaaatagttcaattgacagtcatttgtaagatgtttaagtaaactgtgaaacagtaagtaaatggatgaaaacacactgattaaaactgctgcttttatccaacaagatggatgaatttcccaggaaagaatacttgagttcaggcctgttcaagtcccaacctgtttgtggtttgaggttgctctctgcctcatagagcaaagtggaaaatttatcttctgggaggacagagttttcttctctgaaaaagtttcctacatagttggctttggcatttgcaaggaatgaaaggtcagggattgaggcctcatgagtctggatttctagctgaggttgagagaaaaggtagtgattgtaaccagaaaatccagagtgggtgtatttacctccagaactcatcacttaaaaaaaaattttttttgaactgacatgcttgaggctttttctttttttttttttgagatggggtcttgctctatcccccaggctggagtgcagttgtgcagtcatagctcactgtagccttatcctcctggcctaagcagtcctcctgcctcaacctccctagtagctgagaccacaggcgcatgccacctgtgagtttctagagatgaggtctccctatgttccccagcctgggtcttgaactcctgggctcaagtgatcctcctgcctcagccttccaaagtgttggattacaggcgtgagccactgtgcctggccagagctcatcactgttaactcagcctgggtttttcacagcagtcatggaaatagattcattaataatagtaacaaatatatagtctccctctcaaagaaaccttgagtggcagtggcataccagatacacagtaggaaatactgtagaattatgttgttaagttcataaccaaacatcatacatgatgataaaagacaagataatggtcacatttatgcagtattaactgagagggcaaatttgtgcctgagaagctattgggaatgttctctctctttgcattactaggaattacatgggaaacacatgtagacagtcttcaggctattaagatttgtccacttaatctttacttatacatgaataaaaaatgggaaaacatgataaatataataaactaatacactcaaccctgccccttgattatataatagaacaaaatcagcatgcccggcatgagcctgccagattgccaattccatcctccaccttcagaggatgccgccatccagaattttgccttactcattttactttcttcatagttcgacaccttaaatgtatattactaatagtagctttgcatttttggctgatttaaaaattgatataaatgaaataatgctgtagagatgctttttggtattaagtggatatactgttattcttaaagatgtttgaaatgaatatacctttctaaatatctttttaaaataatacattaaatgatactgctttagaattcatgaactgcatctcatgagaatatgtagagatgacgtgggcaggtaaagtaaaacttcaggttgaatatcctatgataatttaaaaatgacaaaatagtgtggtgaataatagagcttgagcactttaaggcaccatagggaccccttcaatgtaatgatgacagtgctgaggtgcagagaagttaggtaatcagcccaagccactactctaaggacagaccctatctacttttcctaatttgtcagaagactgcctatgatactactaataaaaagtcctatgaaattggtattgtcattattttacaaataaaataatcttcaatttttgtttcctctatgcatgggttacttagtattttgtaatttgaatttcaagcataattaaaaagaaatcaggtatctaggctgggcatgatggctcaagcctgtaatctcaacattttgggaggctgaggcaagaggatcacttgaggccaggagtttgaggtatcttttgttgatctctacactgattgtattctctcttttattctatgaaagttaaagattttttctgatactacatattgtcagttttttaaatactcagtttgtgctaaaagaaaacattcggcaactgatatctgctgttctgtatgtatctgtcagtccagatttgtccattatggtgtatgaatctaatagaacctcaccaatgttatacctgccttcttgaaatcattactgagatagctaatattaaaatatcctggtttgtctgtatatttaattctttactctcattatactaaatttttttaatgtaatttgaattgatggtaaaaattgtatacaggccgggtgcagtggctcactcctataatcccagcattttggaagtcctatgcaggaggattgccagaggccaggaatttgagatcagcctgggcaacatagtgaaactctcatctttataaaaagtaatattaaaatttttaaaagtgtataaactgtaaagtatattttactggtgttttcttccttattcctacttgtcagatgcaaatacacatttttgtgtgtttgtgtttagtaattataagtatacatattttcttctatttcatatatttctatgacattatatcttagatgtgtaatttatgaactactactggattattttaatccattagaaattactattcacgcattctgtattcaattcatgtgatagctaatatatttggttttaaatgcatcttattttgtggttttcttctaggctgttttttgtgctttcttttaaaaatatataggttttaataatcttaattttcttttagtttgaaatgtatatactcattttattcattagtctaagataagaattgtaacacttctctaacctattatagaattgttaatacctttacccttctcttgaacacatcaaaggatgtcattgagtgttggtattggagtatagcatatctattattctgctcaattagaagatattgttcatgttgtatagagataataagtaattgtattgatctgcagatgcatccatctcttggattctcattccttctaccactgcagaactttcacctgtaatcactttcctttggccttaaggataacttttagggttacttttctactaaatttccaatttttgaccagatataatcttatattgtgctcttcctgaaaaatactattgttgtggatagaaatctgggttggtagttatttcttcagcaatttgaccatgtcattccactgtgtccctggcctcctgtatactggatgtgaatggatacaattatatattgtgtttatagttttcctgtgctataggaacagtattcgaatctgatgcaaaggacaacacaccctagagattgtaacagtgagatgaaccaagtgattggatggggttttgagttgctggaataatggagttacagtgtacaatgcataagcaacataataaattatatatctggtgaacaaaatgga

SEQ ID NO: 438193 - DNA, 1940 bp, Homo sapiens
agcaccggaagccgctcccctgtgaggctgcggaccgggagcagcggccgcaggtccgggcgccatggctgcggagcggacccggccgctgcaaggctctggcggtccgagcgtgcctagtagctgtgaacccggcgcgaggtcccgggccccggggcgctcgctcaggtaaatttttccataaccttatggagagaaaggactttgagacatggcttgataacatttctgttacatttctttctctgacggacttgcagaaaaatgaaactctggatcacctgattagtctgagtggggcagtccagctcaggcatctctccaataacctagagactctcctcaagcgggacttcctcaaactccttcccctggagctcagtttttatttgttaaaatggctcgatcctcagactttactcacatgctgcctcgtctctaaacagtggaataaggtgataagtgcctgtacagaggtgtggcagactgcatgtaaaaatttgggctggcagatagatgattctgttcaggacgctttgcactggaagaaggtttatttgaaggctattttgagaatgaagcaactggaggaccatgaagcctttgaaacctcgtcattaattggacacagtgccagagtgtatgcactttactacaaagatggacttctctgtacagggtcagatgacttgtctgcaaagctgtgggatgtgagcacagggcagtgcgtttatggcatccagacccacacttgtgcagcggtgaagtttgatgaacagaagcttgtgacaggctcctttgacaacactgtggcttgctgggaatggagttccggagccaggacccagcactttcgggggcacacgggggcggtatttagcgtggactacaatgatgaactggatatcttggtgagcggctctgcagacttcactgtgaaagtatgggctttatctgctgggacatgcctgaacacactcaccgggcacacggaatgggtcaccaaggtagttttgcagaagtgcaaagtcaagtctctcttgcacagtcctggagactacatcctcttaagtgcagacaaatatgagattaagatttggccaattgggagagaaatcaactgtaagtgcttaaagacattgtctgtctctgaggatagaagtatctgcctgcagccaagacttcattttgatggcaaatacattgtctgtagttcagcacttggtctctaccagtgggactttgccagttatgatattctcagggtcatcaagactcctgagatagcaaacttggccttgcttggctttggagatatctttgccctgctgtttgacaaccgctacctgtacatcatggacttgcggacagagagcctgattagtcgctggcctctgccagagtacaggaaatcaaagagaggctcaagcttcctggcaggcgaagcatcctggctgaatggactggatgggcacaatgacacgggcttggtctttgccaccagcatgcctgaccacagtattcacctggtgttgtggaaggagcacggctgacaccatgagccaccaccgctgactgactttgggtgccggggctgcgggttttgggtgcaacctctgcggcagccgactgcatgaaccaaagttctcacctaatggtatcatcacgcagtgcacaatcatttatctatgttttgccaggggccagggctcggggtgggggagggcttgttttattgacatacaacgcagcatgctaatggggtacaccattgacttcatttgtacttagttatgttggtcagtgttagaggatgcattttgggttcatctttcttgagtggagtattggttttaagtaaagaaagttaaatgatccattaatctgctaattggttgcctatgaaatcacattgtctgttattaaagctttttaccata

SEQ ID NO: 438194 - DNA, 1882 bp, Homo sapiens
agcaccggaagccgctcccctgtgaggctgcggaccgggagcagcggccgcaggtccgggcgccatggctgcggagcggacccggccgctgcaaggctctggcggtccgagcgtgcctagtagctgtgaacccggcgcgaggtcccgggccccggggcgctcgctcaggtaaatttttccataaccttatggagagaaaggactttgagacatggcttgataacatttctgttacatttctttctctgacggacttgcagaaaaatgaaactctggatcacctgattagtctgagtggggcagtccagctcaggcatctctccaataacctagagactctcctcaagcgggacttcctcaaactccttcccctggagctcagtttttatttgttaaaatggctcgatcctcagactttactcacatgctgcctcgtctctaaacagtggaataaggtgataagtgcctgtacagaggtgtggcagactgcatgtaaaaatttgggctggcagatagatgattctgttcaggacgctttgcactggaagaaggtttatttgaaggctattttgagaatgaagcaactggaggaccatgaagcctttgaaacctcgtcattaattggacacagtgccagagtgtatgcactttactacaaagatggacttctctgtacagggtcagatgacttgtctgcaaagctgtgggatgtgagcacagggcagtgcgtttatggcatccagacccacacttgtgcagcggtgaagtttgatgaacagaagcttgtgacaggctcctttgacaacactgtggcttgctgggaatggagttccggagccaggacccagcactttcgggggcacacgggggcggtatttagcgtggactacaatgatgaactggatatcttggtgagcggctctgcagacttcactgtgaaagtatgggctttatctgctgggacatgcctgaacacactcaccgggcacacggaatgggtcaccaaggtagttttgcagaagtgcaaagtcaagtctctcttgcacagtcctggagactacatcctcttaagtgcagacaaatatgagattaagatttggccaattgggagagaaatcaactgtaagtgcttaaagacattgtctgtctctgaggatagaagtatctgcctgcagccaagacttcattttgatggcaaatacattgtctgtagttcagcacttggtctctaccagtgggactttgccagttatgatattctcagggtcatcaagactcctgagatagcaaacttggccttgcttggctttggagatatctttgccctgctgtttgacaaccgctacctgtacatcatggacttgcggacagagagcctgattagtcgctggcctctgccagagtacaggaaatcaaagagaggctcaagcttcctggcaggcgaagcatcctggctgaatggactggatgggcacaatgacacgggcttggtctttgccaccagcatgcctgaccacagtattcacctggtgttgtggaaggagcacggctgacaccatgagccaccaccgctgactgactttgggtgccggggctgcgggttttgggtgcaacctctgcggcagccgactgcatgaaccaaagttctcacctaatggtatcatcacgcagtgcacaatcatttatctatgttttgccaggggccagggctcggggtgggggagggcttgttttattgacatacaacgcagcatgctaatggggtacaccattgacttcatttgtacttagttatgttggtcagtgttagaggatgcattttgggttcatctttcttgagtggagtattggttttaagtaaagaaagttaaatgatccatta

SEQ ID NO: 438195 - DNA, 2799 bp, Homo sapiens
  misc_feature (1093)..(1093): n is a, c, g, or t
ccttaaaggaagaatcagtgtcttcatctctgggtccctaatgttcctttagaactggtatacatttgaaaacaaatatttgagtacacactatacagcttacactgtttttggcgctggggatacagctgtgaagaaattcagacacttttgagttaatggcttaatctaacctttgagatccttgtttttgttttgttttttctctctttacattgggttttcttgagtctgggtgctgttttgcagcttccattctttatattttgtcttactgttagtgtgtatcagagtaggaccatgtacgttttgttttcctgcataaattagataaagtattgtgtagtgtcaggcaggcagtcctaagaaggaatgccattatctccaacatttgttttgcctctcactgtagctaccacaaataaaagagattgtattattcctaggactttccaccttagaataataagctataatagtaagaattttgaaatagttttatcagaaaattgctagttgaatagcatcattcttacggtgtctctggttgggaaattatataattggggaaaataaacattattgaactctattataaaagacccactgacagagacatgttttaactttgtgtaattatatgcactagtatttagcgtggactacaatgatgaactggatatcttggtgagcggctctgcagacttcactgtgaaagtatgggctttatctgctgggacatgcctgaacacactcaccgggcacacggaatgggtcaccaaggtagttttgcagaagtgcaaagtcaagtctctcttgcacagtcctggagactacatcctcttaagtgcagacaaatatgagattaagatttggccaattgggagagaaatcaactgtaagtgcttaaagacattgtctgtctctgaggatagaagtatctgcctgcagccaagacttcattttgatggcaaatacattgtctgtagttcagcacttggtctctaccagtgggactttgccagttatgatattctcaggaacacagaagacactgctagaacttgaaggcaaaaatcattaaacaactganaacacaaaatgagcaggttggtggtggtgccagcctggtttttaatctcttcaaatccacacaaagaacagcaactaggccaggcgcggtggctcacgcctgtaatcccagcactttgggaggccgaggcgggcggatcacgaggtcagaagatcaagaccatcctggctgacacggtgaaactccgtctctactaaaaatacaaaaagttagccgggcatggtggtatgcgcctgtagtcccagctactcgggaggttgaggcagaagaatcgcttgaacccaggaggcggagtttgggaggttgctgtgagctgagatcatgccactgcactccagcctgggcgtctctgtctcaaacaaacaaacaaacaaacaaaaaacccagcaactgaatagcaaaaccaagggcccagacagtactttcaacaaagctaggtacaaggtaacttcatgagccccagaatacagtagttgaggcgaaatacctattgccacaagaacatttttgtaggaggaaaatgaaggaaggaaaagagatagtatatgagaggcctgagaacaggagaatccaaaataggcaacaggtgatcaatggagagttgggctgccaatcctaaaatgtcagctgaagctgggagaggctctccaacagtggatgagaacaaggacctaaggcaagaacgcctgaaagggctggagcactgtagcccttataaacagttgaggctgatcggctctcttttaggacaaggccccacaccagggaaaactcctggggctaaaactcctgggagcaggacagggacaagagaggaaagtaagagatggcccagactcaagaaaggataaagacagaggcaggaaatgccagaaagcaacttgcaatatgtttgaatccatacataagagaagagggactgctctgagaaggttgaaaagcttgcctgaacatacactcattccaaaaagtcaggaaaacaaattttacataaaaataatataaaagtatcaagatcaaattctatacacagttattaagaaaaaaatgcgaagaaggagcagattaacatccttacagacaatgaaaacacaccagggagacaccataaaacagaccaagactaacttaaaaacaaatacatcagcctgggcatggtggttcacacctgtaatcccagcactttgggaggccaaggcaggctgatcacttgagcccaagagttcaagaccagcctgggcaatatgatgcaaccccatctctacaaaaaaaaaaaaaaaattagctgggcatggtggcatgtgcctatagtcccagctactcaggaagctgaggtggaaagatcacttgagcctggaaggtccaggctgcagtgagccatgtttgagcactgactccgggctggacaacagagtgagaccccatctcaaaaataataataataacagataaacagataatgatttaagagataaaagacagtgaaaaagaaagatatgtttaaataaaaaggaaatgaagagataaacaagatttgagggaaattgacaaatattgaaagcagcaaagatcaaacatacaggtaataggagttcctaaagaagaaaatcaagtaagggaggaacagaacaaatgccaaaagatataattcaagaaaacatttcagaaatttaaaaatgttgaaactacaattgaaagtataccaa

SEQ ID NO: 438196 - DNA, 431 bp, Homo sapiens
tagtagaggttaatttggtaatggagttatggcttagctattctagcatatgttaagctcatttttgtattttaatttaaagaataaaatcattataggagcagcattaaaaggatctttccgtaacatggtttacatttgcaggtagttttgcagaagtgcaaagtcaagtctctcttgcacagtcctggagactacatcctcttaagtgcagacaaatatgagattaaggtgagtttttttctccattaatttgcttcattaaagaaaaactggaaaacataagaaaatgaaagtggtatggcaaagggtgaacattctaggaagaggagggggagtgtcttagtccaagccattttaaacccaccggaagaagagatgatttgctagctctatgtcctgtgtagtttcttaacttggatttgtaaatg

SEQ ID NO: 438197 - DNA, 7011 bp, Homo sapiens
agcaccggaagccgctcccctgtgaggctgcggaccgggagcagcggccgcaggtccgggtctgtatgcgaggcggggccggtcggggaggggactcttaggcgcccgcggctctgctgacccgccgcgccttggctgtttttctttccctgcaggcgccatggctgcggagcggacccggccgctgcaaggctctggcggtccgagcgtgcctagtagctgtgaacccggcgcgaggtcccgggccccggggcgctcgctcaggtaaatttttccataaccttatggagagaaaggactttgagacatggcttgataacatttctgttacatttctttctctgacggacttgcagaaaaatgaaactctggatcacctgattagtctgagtggggcagtccagctcaggcatctctccaataacctagagactctcctcaagcgggacttcctcaaactccttcccctggagctcagtttttatttgttaaaatggctcgatcctcagactttactcacatgctgcctcgtctctaaacagtggaataaggtgataagtgcctgtacagaggtgtggcagactgcatgtaaaaatttgggctggcagatagatgattctgttcaggacgctttgcactggaagaaggtttatttgaaggctattttgagaatgaagcaactggaggaccatgaagcctttgaaacctcgtcattaattggacacagtgccagagtgtatgcactttactacaaagatggacttctctgtacagggtcagatgacttgtctgcaaagctgtgggatgtgagcacagggcagtgcgtttatggcatccagacccacacttgtgcagcggtgaagtttgatgaacagaagcttgtgacaggctcctttgacaacactgtggcttgctgggaatggagttccggagccaggacccagcactttcgggggcacacgggggcggtatttagcgtggactacaatgatgaactggatatcttggtgagcggctctgcagacttcactgtgaaagtatgggctttatctgctgggacatgcctgaacacactcaccgggcacacggaatgggtcaccaaggtagttttgcagaagtgcaaagtcaagtctctcttgcacagtcctggagactacatcctcttaagtgcagacaaatatgagattaagatttggccaattgggagagaaatcaactgtaagtgcttaaagacattgtctgtctctgaggatagaagtatctgcctgcagccaagacttcattttgatggcaaatacattgtctgtagttcagcacttggtctctaccagtgggactttgccagttatgatattctcagggtcatcaagactcctgagatagcaaacttggccttgcttggctttggagatatctttgccctgctgtttgacaaccgctacctgtacatcatggacttgcggacagagagcctgattagtcgctggcctctgccagagtacaggaaatcaaagagaggctcaagcttcctggcaggcgaagcatcctggctgaatggactggatgggcacaatgacacgggcttggtctttgccaccagcatgcctgaccacagtattcacctggtgttgtggaaggagcacggctgacaccatgagccaccaccgctgactgactttgggtgccggggctgcgggttttgggtgcaacctctgcggcagccgactgcatgaaccaaagttctcacctaatggtatcatcacgcagtgcacaatcatttatctatgttttgccaggggccagggctcggggtgggggagggcttgttttattgacatacaacgcagcatgctaatggggtacaccattgacttcatttgtacttagttatgttggtcagtgttagaggatgcattttgggttcatctttcttgagtggagtattggttttaagtaaagaaagttaaatgatccattaatctgctaattggttgcctatgaaatcacattgtctgttattaaagctttttaccatagcctttttttcttttgaagttgaagcaaaggtgctatgatgttgttacagcaactttcctcacacggggtttagctcttataagagccagtgttaaaacttccaccaaataccagtttataaacttccaccaaataccagtgctaaggaaagtctgtcttccagttcaaatccaattctgtaaattgaatgttagcaactcattctaaaccttatatcttggcagagtcaaggttggccatgtttaagatgtgagcgagttctgtagtttttgttgccatgtcggggaagctagtccccggcagcctggatgactgcacagcggtgccctggtatagcagaaaagagcagtgagctggaaggttagagaccgggcctcttaccctggaactctgcaccctctctgggtcccagcttccttgtctgtacagccaggtatgaagctcagtgatttctaagattctttctggtccttcacctactgaaatgtgtaaaagttgatcatgtatttttgtctgatccctgattcatggtttctttcaggtcggataatatttaaatgaaatgactgttacagagttttctataagaacatcaattatatgaaaaggatgaataaaagggaaatgtagaaaatatagctgattccacttagacagtttaagtaattggttgaagaaatgctgatagaagccatggtttaaatagggacacagtatgctatactagaaggatacctgaacccaacctaacttcctcctttgcctctaacttaatctgcagcctcaggcaagttaactttctcttctaagaccatcattttcttcatcttttaagtgagggaattgtcctagatgagggctcacaaacccaaatgcctaagggagccgtgcaggtaacataaatgagtaaaacattctggggaggattgtgctgtcccctggaaagttgatctaatagggcagttattcagctctgttttgtcattaggagaagcaagcccagggttggcaggtcttcacattgtttcaggaggagctagaaatccagatttttatttgaaatcctggatttttaaaacgttacaactgattaaagaaaatttgaaataaggtgagccaaacaaaacatgtccctgggttgccagattgtgtcctcctccctctctaaagttaggtaattttgtgattcagcagtggaaatgttagtggtcacaatcagggagagagtagagggagcaagcagtagaaaaatctcagccgctcttcagctgtctccccttgtattacaagggtggtggggagggatgtatttcattcacagaccaataggaaggtagtttgaagatgaacataagaattggaacctcagtgacagcttatgtctgggaacatgagttattccttcttgctgactccagtataaagcatatccattttacaggtgagaaaaagggttgctggcagagctgagaatgatgtgaactctagagtggggacctatctcttgcagaatctgcattagcatagagccagactctggacctctgagtgctgtgaagttgatagaaattaatggtgaatttcaaggacagatatcattaatatccatgttgaaactctgtggggtttaagcaaaagaacaatatcttcccccatcccacaaaatctgggtttaatctatctcacattgagttctgtgcatcagctctgcttagtactctagaaatagaaccggaatcacaactgaatctattttgcagaagccccaggagactttgggcactgatgatggtaaatgactttttactctattattatttctttttttttgagacagagtttcgctcttactgcgcaggctggagtgcaatggcacgatcttggctcactgcaacctccgcctcctgggttcaagtgattctcctgcctcagcctcctaagtagctgggattacaagcatctgccatgacacccaactaatttttatatttttagtagagacagggttccaccatgttggccaggctggtcttgaactcctgacctcaggtcatccacctgccttggcctcccaaagtgctgggattacaggcgtgagccaccacgcctggccgagtttttactttttatcgagcctgaacagataactattactgatctaatgaccatccccaccctacctcactttcagatctatccaatagcttcaaagggcaagtaattataatcatttgtgggaaaagttttattaaaaagtgacaaacttgaagctgtatatagtatgttctatttcagtttttagtggtgaatacagaagtcatcaaggtggtacttggtgccgctggaattttttttttttcctaggcagtcttgctctgtcatacaggctggagtacagtggcatcatcatgcagctggattttgacagcagaacttcaggcagtaattggagtcctaatgtcagttcttccttatggaggcctttatttggcctgagattttattcaactactttatagatgctgggtttattcatactatcgccagtttttataaaaatggaaaactagctcatcctttttgcaaaagaaagcaaagtggggagtcagaatgagaagtggataggggataactaaaactattctttactctcctttcattgcctttgagagctagctcttgcacacactgactttggcttccttagcgcataggtaagggaattgcctttccctcttttgtgaatattctcatttctgaaaaattctaagtcatgagaagataagccctatcctttcttacaaggattggatttcttgggtgacactgtggtgtggtggaagccagcggcttctttcaggttcataaaggccatcataacaacttcaggcttcatggtgtggacagggatccaggagagctgagtggatgtgtgaagtttctgatagattctgtcatcattccaaaggaatgtagtttcctccagctcaatcatttgaagtaatacacattgccaaatctgactgtaacctgacattttagacctattggagaaataggaagaaagcccctccagtggaaggactggacttggaagaagttctgcaggaaggtgcatgcaattggatagctgttcatgagtgaaacgtggggaacattgctatgaaattgtaaggtttgcacttcatttttcgtagtttaaaaattgctctgttctggctgttgaaaacacttggtgtgaggtttgaatgaggattatataatcattctagtattcataggaaaatgattactgctctctatttgtaaaacaaaagaaataactttcggaaacagtattttagacatgaggaaattgtttgtattaggcattttgatctaacagaatcagctaaggatagtggatcctggctttacacatttctttgaccaaacccagctggcaacttgaagttgttactgtgtggcttccagattgcctagaggtgaatcctaccaacatcactgttttttttgttttgttttgttttttttgtatgtttttgagacagagtcttgctctatccccaggctggagtgcagtggcgtgatctcggcttactgcaacctcagcctcctgggttcaagcgattctcctgcctcagcctcctgagtagctgagactacaggcgcgtgccaccacgcccagctatttttgtatttttagtagagacgaggtttcactatgttggccaggatggtcttgatttcttgacctcgtgttctgcccgcctctacctcccaaagtgccgggattacaggcgtgagctgctgtgcccggccccagcatcacttttatagctttctgtgcctcttcctctgggccttggtgtatgaagccacttgcctttctctgttgggaagcgagcagaatcagattgctactcatgatgcagtccgggcagggcatactgtcacctttgcctgtggacacagttgtcaggataggggagaagccctttaggtccgtcttcttgacacagccctcctacctggttacgctggtgctttcgcttggtttagacaaccaagacacttgagaattatgctgtcctcagaatgtctgatgaaaagaacagattcacttttttgacacaatgcccattagccatctttggcagtgtttctgatcaaaggttccccatgcctgctctaggaaagtaaacttttttcagaataaatcctcaaatggattactgagtagtctttgcaccattcccatcagcctaatcagactgaatggtcacgctcagtgcaaaaagctgttttgctgttaggatgtttcagtgtttcttgtctttcctggaacagttcagttgtttaaatttagtaattcaatcctgaccagtgtaaacccacttaattattgcagcctaaagaattcagctacttctactcttcataaatgtgcccaagtaaatatgtgtttttaatattcaaccctggaaaattagtaattcagatgataaaagctcatgttttggtgtctttgtactcagattgtgaacaggcatatttcactgatttagacttagtatacttgatgagaatgctcaggttgaagagatagttctgtcagcaatccaacatctatagcaatgtggaaaaagtaatcaactcatatttcacgaatttgatgtatgttgtgatttagagggcatgagataaagtttatatttgaactgtgtggggtagggggaagaagaggttgcttaagcaaatagtggggtgattgtggaacaagatgtctctaagatgagaagttattttcttgcatcatagaagcactctttttacccgtgagtgattgtgttaactataaatcatttatatctgtacattaaagcagattccctcaattaggcaaatttggttagccaagcccaagttattgtttgtacttgaaagtaataaagctgcatttccttaaaaata

SEQ ID NO: 438198 - DNA, 9147 bp, Homo sapiens
agcaccggaagccgctcccctgtgaggctgcggaccgggagcagcggccgcaggtccgggcgccatggctgcggagcggacccggccgctgcaaggctctggcggtccgagcgtgcctagtagctgtgaacccggcgcgaggtcccgggccccggggcgctcgctcaggtaaatttttccataaccttatggagagaaaggactttgagacatggcttgataacatttctgttacatttctttctctgacggacttgcagaaaaatgaaactctggatcacctgattagtctgagtggggcagtccagctcaggcatctctccaataacctagagactctcctcaagcgggacttcctcaaactccttcccctggagctcagtttttatttgttaaaatggctcgatcctcagactttactcacatgctgcctcgtctctaaacagtggaataaggtgataagtgcctgtacagaggtgtggcagactgcatgtaaaaatttgggctggcagatagatgattctgttcaggacgctttgcactggaagaaggtttatttgaaggctattttgagaatgaagcaactggaggaccatgaagcctttgaaacctcgtcattaattggacacagtgccagagtgtatgcactttactacaaagatggacttctctgtacagggtcagatgacttgtctgcaaagctgtgggatgtgagcacagggcagtgcgtttatggcatccagacccacacttgtgcagcggtgaagtttgatgaacagaagcttgtgacaggctcctttgacaacactgtggcttgctgggaatggagttccggagccaggacccagcactttcgggggcacacgggggcggtatttagcgtggactacaatgatgaactggatatcttggtgagcggctctgcagacttcactgtgaaagtatgggctttatctgctgggacatgcctgaacacactcaccgggcacacggaatgggtcaccaaggtagttttgcagaagtgcaaagtcaagtctctcttgcacagtcctggagactacatcctcttaagtgcagacaaatatgagattaagatttggccaattgggagagaaatcaactgtaagtgcttaaagacattgtctgtctctgaggatagaagtatctgcctgcagccaagacttcattttgatggcaaatacattgtctgtagttcagcacttggtctctaccagtgggactttgccagttatgatattctcagggtcatcaagactcctgagatagcaaacttggccttgcttggctttggagatatctttgccctgctgtttgacaaccgctacctgtacatcatggacttgcggacagagagcctgattagtcgctggcctctgccagagtacaggaaatcaaagagaggctcaagcttcctggcaggcgaagcatcctggctgaatggactggatgggcacaatgacacgggcttggtctttgccaccagcatgcctgaccacagtattcacctggtgttgtggaaggagcacggctgacaccatgagccaccaccgctgactgactttgggtgccggggctgcgggttttgggtgcaacctctgcggcagccgactgcatgaaccaaagttctcacctaatggtatcatcacgcagtgcacaatcatttatctatgttttgccaggggccagggctcggggtgggggagggcttgttttattgacatacaacgcagcatgctaatggggtacaccattgacttcatttgtacttagttatgttggtcagtgttagaggatgcattttgggttcatctttcttgagtggagtattggttttaagtaaagaaagttaaatgatccattaatctgctaattggttgcctatgaaatcacattgtctgttattaaagctttttaccatagcctttttttcttttgaagttgaagcaaaggtgctatgatgttgttacagcaactttcctcacacggggtttagctcttataagagccagtgttaaaacttccaccaaataccagtttataaacttccaccaaataccagtgctaaggaaagtctgtcttccagttcaaatccaattctgtaaattgaatgttagcaactcattctaaaccttatatcttggcagagtcaaggttggccatgtttaagatgtgagcgagttctgtagtttttgttgccatgtcggggaagctagtccccggcagcctggatgactgcacagcggtgccctggtatagcagaaaagagcagtgagctggaaggttagagaccgggcctcttaccctggaactctgcaccctctctgggtcccagcttccttgtctgtacagccaggtatgaagctcagtgatttctaagattctttctggtccttcacctactgaaatgtgtaaaagttgatcatgtatttttgtctgatccctgattcatggtttctttcaggtcggataatatttaaatgaaatgactgttacagagttttctataagaacatcaattatatgaaaaggatgaataaaagggaaatgtagaaaatatagctgattccacttagacagtttaagtaattggttgaagaaatgctgatagaagccatggtttaaatagggacacagtatgctatactagaaggatacctgaacccaacctaacttcctcctttgcctctaacttaatctgcagcctcaggcaagttaactttctcttctaagaccatcattttcttcatcttttaagtgagggaattgtcctagatgagggctcacaaacccaaatgcctaagggagccgtgcaggtaacataaatgagtaaaacattctggggaggattgtgctgtcccctggaaagttgatctaatagggcagttattcagctctgttttgtcattaggagaagcaagcccagggttggcaggtcttcacattgtttcaggaggagctagaaatccagatttttatttgaaatcctggatttttaaaacgttacaactgattaaagaaaatttgaaataaggtgagccaaacaaaacatgtccctgggttgccagattgtgtcctcctccctctctaaagttaggtaattttgtgattcagcagtggaaatgttagtggtcacaatcagggagagagtagagggagcaagcagtagaaaaatctcagccgctcttcagctgtctccccttgtattacaagggtggtggggagggatgtatttcattcacagaccaataggaaggtagtttgaagatgaacataagaattggaacctcagtgacagcttatgtctgggaacatgagttattccttcttgctgactccagtataaagcatatccattttacaggtgagaaaaagggttgctggcagagctgagaatgatgtgaactctagagtggggacctatctcttgcagaatctgcattagcatagagccagactctggacctctgagtgctgtgaagttgatagaaattaatggtgaatttcaaggacagatatcattaatatccatgttgaaactctgtggggtttaagcaaaagaacaatatcttcccccatcccacaaaatctgggtttaatctatctcacattgagttctgtgcatcagctctgcttagtactctagaaatagaaccggaatcacaactgaatctattttgcagaagccccaggagactttgggcactgatgatggtaaatgactttttactctattattatttctttttttttgagacagagtttcgctcttactgcgcaggctggagtgcaatggcacgatcttggctcactgcaacctccgcctcctgggttcaagtgattctcctgcctcagcctcctaagtagctgggattacaagcatctgccatgacacccaactaatttttatatttttagtagagacagggttccaccatgttggccaggctggtcttgaactcctgacctcaggtcatccacctgccttggcctcccaaagtgctgggattacaggcgtgagccaccacgcctggccgagtttttactttttatcgagcctgaacagataactattactgatctaatgaccatccccaccctacctcactttcagatctatccaatagcttcaaagggcaagtaattataatcatttgtgggaaaagttttattaaaaagtgacaaacttgaagctgtatatagtatgttctatttcagtttttagtggtgaatacagaagtcatcaaggtggtacttggtgccgctggaattttttttttttcctaggcagtcttgctctgtcatacaggctggagtacagtggcatcatcatgcagctggattttgacagcagaacttcaggcagtaattggagtcctaatgtcagttcttccttatggaggcctttatttggcctgagattttattcaactactttatagatgctgggtttattcatactatcgccagtttttataaaaatggaaaactagctcatcctttttgcaaaagaaagcaaagtggggagtcagaatgagaagtggataggggataactaaaactattctttactctcctttcattgcctttgagagctagctcttgcacacactgactttggcttccttagcgcataggtaagggaattgcctttccctcttttgtgaatattctcatttctgaaaaattctaagtcatgagaagataagccctatcctttcttacaaggattggatttcttgggtgacactgtggtgtggtggaagccagcggcttctttcaggttcataaaggccatcataacaacttcaggcttcatggtgtggacagggatccaggagagctgagtggatgtgtgaagtttctgatagattctgtcatcattccaaaggaatgtagtttcctccagctcaatcatttgaagtaatacacattgccaaatctgactgtaacctgacattttagacctattggagaaataggaagaaagcccctccagtggaaggactggacttggaagaagttctgcaggaaggtgcatgcaattggatagctgttcatgagtgaaacgtggggaacattgctatgaaattgtaaggtttgcacttcatttttcgtagtttaaaaattgctctgttctggctgttgaaaacacttggtgtgaggtttgaatgaggattatataatcattctagtattcataggaaaatgattactgctctctatttgtaaaacaaaagaaataactttcggaaacagtattttagacatgaggaaattgtttgtattaggcattttgatctaacagaatcagctaaggatagtggatcctggctttacacatttctttgaccaaacccagctggcaacttgaagttgttactgtgtggcttccagattgcctagaggtgaatcctaccaacatcactgttttttttgttttgttttgttttttttgtatgtttttgagacagagtcttgctctatccccaggctggagtgcagtggcgtgatctcggcttactgcaacctcagcctcctgggttcaagcgattctcctgcctcagcctcctgagtagctgagactacaggcgcgtgccaccacgcccagctatttttgtatttttagtagagacgaggtttcactatgttggccaggatggtcttgatttcttgacctcgtgttctgcccgcctctacctcccaaagtgccgggattacaggcgtgagctgctgtgcccggccccagcatcacttttatagctttctgtgcctcttcctctgggccttggtgtatgaagccacttgcctttctctgttgggaagcgagcagaatcagattgctactcatgatgcagtccgggcagggcatactgtcacctttgcctgtggacacagttgtcaggataggggagaagccctttaggtccgtcttcttgacacagccctcctacctggttacgctggtgctttcgcttggtttagacaaccaagacacttgagaattatgctgtcctcagaatgtctgatgaaaagaacagattcacttttttgacacaatgcccattagccatctttggcagtgtttctgatcaaaggttccccatgcctgctctaggaaagtaaacttttttcagaataaatcctcaaatggattactgagtagtctttgcaccattcccatcagcctaatcagactgaatggtcacgctcagtgcaaaaagctgttttgctgttaggatgtttcagtgtttcttgtctttcctggaacagttcagttgtttaaatttagtaattcaatcctgaccagtgtaaacccacttaattattgcagcctaaagaattcagctacttctactcttcataaatgtgcccaagtaaatatgtgtttttaatattcaaccctggaaaattagtaattcagatgataaaagctcatgttttggtgtctttgtactcagattgtgaacaggcatatttcactgatttagacttagtatacttgatgagaatgctcaggttgaagagatagttctgtcagcaatccaacatctatagcaatgtggaaaaagtaatcaactcatatttcacgaatttgatgtatgttgtgatttagagggcatgagataaagtttatatttgaactgtgtggggtagggggaagaagaggttgcttaagcaaatagtggggtgattgtggaacaagatgtctctaagatgagaagttattttcttgcatcatagaagcactctttttacccgtgagtgattgtgttaactataaatcatttatatctgtacattaaagcagattccctcaattaggcaaatttggttagccaagcccaagttattgtttgtacttgaaagtaataaagctgcatttccttaaaaatatattctgtagttaagactttgtcttgctttccccccaaccacttcagacattttatccaaccaatgcagggacttttcaaaagtcagtgtgtttttgaaaatagaacaaccccttgagtgatctgaggtggctctgtttttttactgtttctgcatcttctagaaggtaaactcaacaatataaccatttctgaaggtgatccaaaaagcaaaacaataaaggtaaaacacaaggaaataattttggtgaatttcatgaatagttgcaaatgaagggatggggtgggtaaaagtcccattttgcttccagaccttggaatagtcttcctctcttttgcccaaggatgtgtctatccagcacatctttgcatgagttctttcttactaacttaaacttacggggcttcttgtcatttgagtaccacggccctgcacctttgatcccctgacagcatcattaagggcagattgtcattcctgttttacagatgagaaagctgtggcttggtaaagtgattcattgcctagaggagttatagtaagtggtgaggctgaagccctgattttcagcccccacacacctggattttttccatgttttcatgtttgtctgttctttctgtatttcaagtctcttcaaatcccgactgctgccttctgccttcaccacttgtgtgcactgttcaacctgtcttatgctttgcttccagggagtctccccaaccacttctttgagcacttacttgctcttgttcaatcttggtaactctccgttaccatcagggcacatctggattccttaacatcatggagccctagctaatttcttcgagcaaacagttcttgctcctctatttatttccacccttgcgctttgggtgttaatctcccatcctcgtggaaagttcttgatgttcctttccaccagtcctagggccaggctttaatcccattgatctcccactatctttaaagcctctgctgaccaccataccccactccagcctcactgagcatttttgtgtaaggttagtggtgcagttcatttagcaataaatactgttgtaccttttgcagtagacaactattaactttcatccttgattctcagttttttccaaaatacaagtgaatacctggtttccccagcaacattgtaagattgagagtaggaattcattgagattttaatgaattccatggattgtcttaagagctatctaaacttggaagaaaaataacttccagagcatctaaaattgaaaataaaagatcagaagcaaatgaaagatcaattccacacagcttttcctctcttagacgtccctcttctgccatatcctgtaaacatctgaagtgttctgagtacatttggagagaatatttaatgatcacactgtgattagacatgagtagtccctgccagtgggatgttcctgtcctttgcattttaaccacatgttctgtgctctctgtggtaaagataatctaacagtaataaaaacttatggagaaaattacccagagctcctttatcattacgatttttaatactctcttctaatccttatgcacatgtgtatggatttatgtactgcaaatcattgttttgtaatacattctcaaaaatgtgctttaggtttttacaactaccataatattttgtaattttccttcattactgtaatttgctaaaccatttctgttttggtagataattaggtagtttccagttctgctttttagaagatactacagagaacttctttgtgcatatttccttagaacaagttccagtagaagacttactcgcaaaagcagtggaattttttcttagtattttctgttacaggtacagaagagtgcatacaacacacagttttgtcgaatagttatgaagtgaacacttgtctaaccactgcccgagtcaagaaagaacatttctaaacatgtttgccaatttaatagatataaaggaagtatctcaaggttgctttaactgacatttctttaacacatgacaacatatttttatgggggaggggactagagagaaaatgacatatttttatgtgtgcttatttgtatctcttgaattctgtctgcatcttttacccattacactttcaaatacttgtgaaatcattggtcgagatgaattatggctataaataaaatttcactaatctaattatcactgatttagaaataatagttcaacccaagacatgc

SEQ ID NO: 438199 - DNA, 6875 bp, Homo sapiens
agcaccggaagccgctcccctgtgaggctgcggaccgggagcagcggccgcaggtccgggcgccatggctgcggagcggacccggccgctgcaaggctctggcggtccgagcgtgcctagtagctgtgaacccggcgcgaggtcccgggccccggggcgctcgctcaggtaaatttttccataaccttatggagagaaaggactttgagacatggcttgataacatttctgttacatttctttctctgacggacttgcagaaaaatgaaactctggatcacctgattagtctgagtggggcagtccagctcaggcatctctccaataacctagagactctcctcaagcgggacttcctcaaactccttcccctggagctcagtttttatttgttaaaatggctcgatcctcagactttactcacatgctgcctcgtctctaaacagtggaataaggtgataagtgcctgtacagaggtgtggcagactgcatgtaaaaatttgggctggcagatagatgattctgttcaggacgctttgcactggaagaaggtttatttgaaggctattttgagaatgaagcaactggaggaccatgaagcctttgaaacctcgtcattaattggacacagtgccagagtgtatgcactttactacaaagatggacttctctgtacagggtcagatgacttgtctgcaaagctgtgggatgtgagcacagggcagtgcgtttatggcatccagacccacacttgtgcagcggtgaagtttgatgaacagaagcttgtgacaggctcctttgacaacactgtggcttgctgggaatggagttccggagccaggacccagcactttcgggggcacacgggggcggtatttagcgtggactacaatgatgaactggatatcttggtgagcggctctgcagacttcactgtgaaagtatgggctttatctgctgggacatgcctgaacacactcaccgggcacacggaatgggtcaccaaggtagttttgcagaagtgcaaagtcaagtctctcttgcacagtcctggagactacatcctcttaagtgcagacaaatatgagattaagatttggccaattgggagagaaatcaactgtaagtgcttaaagacattgtctgtctctgaggatagaagtatctgcctgcagccaagacttcattttgatggcaaatacattgtctgtagttcagcacttggtctctaccagtgggactttgccagttatgatattctcagggtcatcaagactcctgagatagcaaacttggccttgcttggctttggagatatctttgccctgctgtttgacaaccgctacctgtacatcatggacttgcggacagagagcctgattagtcgctggcctctgccagagtacaggaaatcaaagagaggctcaagcttcctggcaggcgaagcatcctggctgaatggactggatgggcacaatgacacgggcttggtctttgccaccagcatgcctgaccacagtattcacctggtgttgtggaaggagcacggctgacaccatgagccaccaccgctgactgactttgggtgccggggctgcgggttttgggtgcaacctctgcggcagccgactgcatgaaccaaagttctcacctaatggtatcatcacgcagtgcacaatcatttatctatgttttgccaggggccagggctcggggtgggggagggcttgttttattgacatacaacgcagcatgctaatggggtacaccattgacttcatttgtacttagttatgttggtcagtgttagaggatgcattttgggttcatctttcttgagtggagtattggttttaagtaaagaaagttaaatgatccattaatctgctaattggttgcctatgaaatcacattgtctgttattaaagctttttaccatagcctttttttcttttgaagttgaagcaaaggtgctatgatgttgttacagcaactttcctcacacggggtttagctcttataagagccagtgttaaaacttccaccaaataccagtttataaacttccaccaaataccagtgctaaggaaagtctgtcttccagttcaaatccaattctgtaaattgaatgttagcaactcattctaaaccttatatcttggcagagtcaaggttggccatgtttaagatgtgagcgagttctgtagtttttgttgccatgtcggggaagctagtccccggcagcctggatgactgcacagcggtgccctggtatagcagaaaagagcagtgagctggaaggttagagaccgggcctcttaccctggaactctgcaccctctctgggtcccagcttccttgtctgtacagccaggtatgaagctcagtgatttctaagattctttctggtccttcacctactgaaatgtgtaaaagttgatcatgtatttttgtctgatccctgattcatggtttctttcaggtcggataatatttaaatgaaatgactgttacagagttttctataagaacatcaattatatgaaaaggatgaataaaagggaaatgtagaaaatatagctgattccacttagacagtttaagtaattggttgaagaaatgctgatagaagccatggtttaaatagggacacagtatgctatactagaaggatacctgaacccaacctaacttcctcctttgcctctaacttaatctgcagcctcaggcaagttaactttctcttctaagaccatcattttcttcatcttttaagtgagggaattgtcctagatgagggctcacaaacccaaatgcctaagggagccgtgcaggtaacataaatgagtaaaacattctggggaggattgtgctgtcccctggaaagttgatctaatagggcagttattcagctctgttttgtcattaggagaagcaagcccagggttggcaggtcttcacattgtttcaggaggagctagaaatccagatttttatttgaaatcctggatttttaaaacgttacaactgattaaagaaaatttgaaataaggtgagccaaacaaaacatgtccctgggttgccagattgtgtcctcctccctctctaaagttaggtaattttgtgattcagcagtggaaatgttagtggtcacaatcagggagagagtagagggagcaagcagtagaaaaatctcagccgctcttcagctgtctccccttgtattacaagggtggtggggagggatgtatttcattcacagaccaataggaaggtagtttgaagatgaacataagaattggaacctcagtgacagcttatgtctgggaacatgagttattccttcttgctgactccagtataaagcatatccattttacaggtgagaaaaagggttgctggcagagctgagaatgatgtgaactctagagtggggacctatctcttgcagaatctgcattagcatagagccagactctggacctctgagtgctgtgaagttgatagaaattaatggtgaatttcaaggacagatatcattaatatccatgttgaaactctgtggggtttaagcaaaagaacaatatcttcccccatcccacaaaatctgggtttaatctatctcacattgagttctgtgcatcagctctgcttagtactctagaaatagaaccggaatcacaactgaatctattttgcagaagccccaggagactttgggcactgatgatggtaaatgactttttactctattattatttctttttttttgagacagagtttcgctcttactgcgcaggctggagtgcaatggcacgatcttggctcactgcaacctccgcctcctgggttcaagtgattctcctgcctcagcctcctaagtagctgggattacaagcatctgccatgacacccaactaatttttatatttttagtagagacagggttccaccatgttggccaggctggtcttgaactcctgacctcaggtcatccacctgccttggcctcccaaagtgctgggattacaggcgtgagccaccacgcctggccgagtttttactttttatcgagcctgaacagataactattactgatctaatgaccatccccaccctacctcactttcagatctatccaatagcttcaaagggcaagtaattataatcatttgtgggaaaagttttattaaaaagtgacaaacttgaagctgtatatagtatgttctatttcagtttttagtggtgaatacagaagtcatcaaggtggtacttggtgccgctggaattttttttttttcctaggcagtcttgctctgtcatacaggctggagtacagtggcatcatcatgcagctggattttgacagcagaacttcaggcagtaattggagtcctaatgtcagttcttccttatggaggcctttatttggcctgagattttattcaactactttatagatgctgggtttattcatactatcgccagtttttataaaaatggaaaactagctcatcctttttgcaaaagaaagcaaagtggggagtcagaatgagaagtggataggggataactaaaactattctttactctcctttcattgcctttgagagctagctcttgcacacactgactttggcttccttagcgcataggtaagggaattgcctttccctcttttgtgaatattctcatttctgaaaaattctaagtcatgagaagataagccctatcctttcttacaaggattggatttcttgggtgacactgtggtgtggtggaagccagcggcttctttcaggttcataaaggccatcataacaacttcaggcttcatggtgtggacagggatccaggagagctgagtggatgtgtgaagtttctgatagattctgtcatcattccaaaggaatgtagtttcctccagctcaatcatttgaagtaatacacattgccaaatctgactgtaacctgacattttagacctattggagaaataggaagaaagcccctccagtggaaggactggacttggaagaagttctgcaggaaggtgcatgcaattggatagctgttcatgagtgaaacgtggggaacattgctatgaaattgtaaggtttgcacttcatttttcgtagtttaaaaattgctctgttctggctgttgaaaacacttggtgtgaggtttgaatgaggattatataatcattctagtattcataggaaaatgattactgctctctatttgtaaaacaaaagaaataactttcggaaacagtattttagacatgaggaaattgtttgtattaggcattttgatctaacagaatcagctaaggatagtggatcctggctttacacatttctttgaccaaacccagctggcaacttgaagttgttactgtgtggcttccagattgcctagaggtgaatcctaccaacatcactgttttttttgttttgttttgttttttttgtatgtttttgagacagagtcttgctctatccccaggctggagtgcagtggcgtgatctcggcttactgcaacctcagcctcctgggttcaagcgattctcctgcctcagcctcctgagtagctgagactacaggcgcgtgccaccacgcccagctatttttgtatttttagtagagacgaggtttcactatgttggccaggatggtcttgatttcttgacctcgtgttctgcccgcctctacctcccccagcatcacttttatagctttctgtgcctcttcctctgggccttggtgtatgaagccacttgcctttctctgttgggaagcgagcagaatcagattgctactcatgatgcagtccgggcagggcatactgtcacctttgcctgtggacacagttgtcaggataggggagaagccctttaggtccgtcttcttgacacagccctcctacctggttacgctggtgctttcgcttggtttagacaaccaagacacttgagaattatgctgtcctcagaatgtctgatgaaaagaacagattcacttttttgacacaatgcccattagccatctttggcagtgtttctgatcaaaggttccccatgcctgctctaggaaagtaaacttttttcagaataaatcctcaaatggattactgagtagtctttgcaccattcccatcagcctaatcagactgaatggtcacgctcagtgcaaaaagctgttttgctgttaggatgtttcagtgtttcttgtctttcctggaacagttcagttgtttaaatttagtaattcaatcctgaccagtgtaaacccacttaattattgcagcctaaagaattcagctacttctactcttcataaatgtgcccaagtaaatatgtgtttttaatattcaaccctggaaaattagtaattcagatgataaaagctcatgttttggtgtctttgtactcagattgtgaacaggcatatttcactgatttagacttagtatacttgatgagaatgctcaggttgaagagatagttctgtcagcaatccaacatctatagcaatgtggaaaaagtaatcaactcatatttcacgaatttgatgtatgttgtgatttagagggcatgagataaagtttatatttgaactgtgtggggtagggggaagaagaggttgcttaagcaaatagtggggtgattgtggaacaagatgtctctaagatgagaagttattttcttgcatcatagaagcactctttttacccgtgagtgattgtgttaactataaatcatttatatctgtacattaaagcagattccctcaattaggcaaatttggttagccaagcccaagttattgtttgtacttgaaagtaataaagctgcatttccttaaaaata

SEQ ID NO: 438200 - DNA, 6823 bp, Homo sapiens
agcaccggaagccgctcccctgtgaggctgcggaccgggagcagcggccgcaggtccgggcgccatggctgcggagcggacccggccgctgcaaggctctggcggtccgagcgtgcctagtagctgtgaacccggcgcgaggtcccgggccccggggcgctcgctcagaaaaatgaaactctggatcacctgattagtctgagtggggcagtccagctcaggcatctctccaataacctagagactctcctcaagcgggacttcctcaaactccttcccctggagctcagtttttatttgttaaaatggctcgatcctcagactttactcacatgctgcctcgtctctaaacagtggaataaggtgataagtgcctgtacagaggtgtggcagactgcatgtaaaaatttgggctggcagatagatgattctgttcaggacgctttgcactggaagaaggtttatttgaaggctattttgagaatgaagcaactggaggaccatgaagcctttgaaacctcgtcattaattggacacagtgccagagtgtatgcactttactacaaagatggacttctctgtacagggtcagatgacttgtctgcaaagctgtgggatgtgagcacagggcagtgcgtttatggcatccagacccacacttgtgcagcggtgaagtttgatgaacagaagcttgtgacaggctcctttgacaacactgtggcttgctgggaatggagttccggagccaggacccagcactttcgggggcacacgggggcggtatttagcgtggactacaatgatgaactggatatcttggtgagcggctctgcagacttcactgtgaaagtatgggctttatctgctgggacatgcctgaacacactcaccgggcacacggaatgggtcaccaaggtagttttgcagaagtgcaaagtcaagtctctcttgcacagtcctggagactacatcctcttaagtgcagacaaatatgagattaagatttggccaattgggagagaaatcaactgtaagtgcttaaagacattgtctgtctctgaggatagaagtatctgcctgcagccaagacttcattttgatggcaaatacattgtctgtagttcagcacttggtctctaccagtgggactttgccagttatgatattctcagggtcatcaagactcctgagatagcaaacttggccttgcttggctttggagatatctttgccctgctgtttgacaaccgctacctgtacatcatggacttgcggacagagagcctgattagtcgctggcctctgccagagtacaggaaatcaaagagaggctcaagcttcctggcaggcgaagcatcctggctgaatggactggatgggcacaatgacacgggcttggtctttgccaccagcatgcctgaccacagtattcacctggtgttgtggaaggagcacggctgacaccatgagccaccaccgctgactgactttgggtgccggggctgcgggttttgggtgcaacctctgcggcagccgactgcatgaaccaaagttctcacctaatggtatcatcacgcagtgcacaatcatttatctatgttttgccaggggccagggctcggggtgggggagggcttgttttattgacatacaacgcagcatgctaatggggtacaccattgacttcatttgtacttagttatgttggtcagtgttagaggatgcattttgggttcatctttcttgagtggagtattggttttaagtaaagaaagttaaatgatccattaatctgctaattggttgcctatgaaatcacattgtctgttattaaagctttttaccatagcctttttttcttttgaagttgaagcaaaggtgctatgatgttgttacagcaactttcctcacacggggtttagctcttataagagccagtgttaaaacttccaccaaataccagtttataaacttccaccaaataccagtgctaaggaaagtctgtcttccagttcaaatccaattctgtaaattgaatgttagcaactcattctaaaccttatatcttggcagagtcaaggttggccatgtttaagatgtgagcgagttctgtagtttttgttgccatgtcggggaagctagtccccggcagcctggatgactgcacagcggtgccctggtatagcagaaaagagcagtgagctggaaggttagagaccgggcctcttaccctggaactctgcaccctctctgggtcccagcttccttgtctgtacagccaggtatgaagctcagtgatttctaagattctttctggtccttcacctactgaaatgtgtaaaagttgatcatgtatttttgtctgatccctgattcatggtttctttcaggtcggataatatttaaatgaaatgactgttacagagttttctataagaacatcaattatatgaaaaggatgaataaaagggaaatgtagaaaatatagctgattccacttagacagtttaagtaattggttgaagaaatgctgatagaagccatggtttaaatagggacacagtatgctatactagaaggatacctgaacccaacctaacttcctcctttgcctctaacttaatctgcagcctcaggcaagttaactttctcttctaagaccatcattttcttcatcttttaagtgagggaattgtcctagatgagggctcacaaacccaaatgcctaagggagccgtgcaggtaacataaatgagtaaaacattctggggaggattgtgctgtcccctggaaagttgatctaatagggcagttattcagctctgttttgtcattaggagaagcaagcccagggttggcaggtcttcacattgtttcaggaggagctagaaatccagatttttatttgaaatcctggatttttaaaacgttacaactgattaaagaaaatttgaaataaggtgagccaaacaaaacatgtccctgggttgccagattgtgtcctcctccctctctaaagttaggtaattttgtgattcagcagtggaaatgttagtggtcacaatcagggagagagtagagggagcaagcagtagaaaaatctcagccgctcttcagctgtctccccttgtattacaagggtggtggggagggatgtatttcattcacagaccaataggaaggtagtttgaagatgaacataagaattggaacctcagtgacagcttatgtctgggaacatgagttattccttcttgctgactccagtataaagcatatccattttacaggtgagaaaaagggttgctggcagagctgagaatgatgtgaactctagagtggggacctatctcttgcagaatctgcattagcatagagccagactctggacctctgagtgctgtgaagttgatagaaattaatggtgaatttcaaggacagatatcattaatatccatgttgaaactctgtggggtttaagcaaaagaacaatatcttcccccatcccacaaaatctgggtttaatctatctcacattgagttctgtgcatcagctctgcttagtactctagaaatagaaccggaatcacaactgaatctattttgcagaagccccaggagactttgggcactgatgatggtaaatgactttttactctattattatttctttttttttgagacagagtttcgctcttactgcgcaggctggagtgcaatggcacgatcttggctcactgcaacctccgcctcctgggttcaagtgattctcctgcctcagcctcctaagtagctgggattacaagcatctgccatgacacccaactaatttttatatttttagtagagacagggttccaccatgttggccaggctggtcttgaactcctgacctcaggtcatccacctgccttggcctcccaaagtgctgggattacaggcgtgagccaccacgcctggccgagtttttactttttatcgagcctgaacagataactattactgatctaatgaccatccccaccctacctcactttcagatctatccaatagcttcaaagggcaagtaattataatcatttgtgggaaaagttttattaaaaagtgacaaacttgaagctgtatatagtatgttctatttcagtttttagtggtgaatacagaagtcatcaaggtggtacttggtgccgctggaattttttttttttcctaggcagtcttgctctgtcatacaggctggagtacagtggcatcatcatgcagctggattttgacagcagaacttcaggcagtaattggagtcctaatgtcagttcttccttatggaggcctttatttggcctgagattttattcaactactttatagatgctgggtttattcatactatcgccagtttttataaaaatggaaaactagctcatcctttttgcaaaagaaagcaaagtggggagtcagaatgagaagtggataggggataactaaaactattctttactctcctttcattgcctttgagagctagctcttgcacacactgactttggcttccttagcgcataggtaagggaattgcctttccctcttttgtgaatattctcatttctgaaaaattctaagtcatgagaagataagccctatcctttcttacaaggattggatttcttgggtgacactgtggtgtggtggaagccagcggcttctttcaggttcataaaggccatcataacaacttcaggcttcatggtgtggacagggatccaggagagctgagtggatgtgtgaagtttctgatagattctgtcatcattccaaaggaatgtagtttcctccagctcaatcatttgaagtaatacacattgccaaatctgactgtaacctgacattttagacctattggagaaataggaagaaagcccctccagtggaaggactggacttggaagaagttctgcaggaaggtgcatgcaattggatagctgttcatgagtgaaacgtggggaacattgctatgaaattgtaaggtttgcacttcatttttcgtagtttaaaaattgctctgttctggctgttgaaaacacttggtgtgaggtttgaatgaggattatataatcattctagtattcataggaaaatgattactgctctctatttgtaaaacaaaagaaataactttcggaaacagtattttagacatgaggaaattgtttgtattaggcattttgatctaacagaatcagctaaggatagtggatcctggctttacacatttctttgaccaaacccagctggcaacttgaagttgttactgtgtggcttccagattgcctagaggtgaatcctaccaacatcactgttttttttgttttgttttgttttttttgtatgtttttgagacagagtcttgctctatccccaggctggagtgcagtggcgtgatctcggcttactgcaacctcagcctcctgggttcaagcgattctcctgcctcagcctcctgagtagctgagactacaggcgcgtgccaccacgcccagctatttttgtatttttagtagagacgaggtttcactatgttggccaggatggtcttgatttcttgacctcgtgttctgcccgcctctacctcccaaagtgccgggattacaggcgtgagctgctgtgcccggccccagcatcacttttatagctttctgtgcctcttcctctgggccttggtgtatgaagccacttgcctttctctgttgggaagcgagcagaatcagattgctactcatgatgcagtccgggcagggcatactgtcacctttgcctgtggacacagttgtcaggataggggagaagccctttaggtccgtcttcttgacacagccctcctacctggttacgctggtgctttcgcttggtttagacaaccaagacacttgagaattatgctgtcctcagaatgtctgatgaaaagaacagattcacttttttgacacaatgcccattagccatctttggcagtgtttctgatcaaaggttccccatgcctgctctaggaaagtaaacttttttcagaataaatcctcaaatggattactgagtagtctttgcaccattcccatcagcctaatcagactgaatggtcacgctcagtgcaaaaagctgttttgctgttaggatgtttcagtgtttcttgtctttcctggaacagttcagttgtttaaatttagtaattcaatcctgaccagtgtaaacccacttaattattgcagcctaaagaattcagctacttctactcttcataaatgtgcccaagtaaatatgtgtttttaatattcaaccctggaaaattagtaattcagatgataaaagctcatgttttggtgtctttgtactcagattgtgaacaggcatatttcactgatttagacttagtatacttgatgagaatgctcaggttgaagagatagttctgtcagcaatccaacatctatagcaatgtggaaaaagtaatcaactcatatttcacgaatttgatgtatgttgtgatttagagggcatgagataaagtttatatttgaactgtgtggggtagggggaagaagaggttgcttaagcaaatagtggggtgattgtggaacaagatgtctctaagatgagaagttattttcttgcatcatagaagcactctttttacccgtgagtgattgtgttaactataaatcatttatatctgtacattaaagcagattccctcaattaggcaaatttggttagccaagcccaagttattgtttgtacttgaaagtaataaagctgcatttccttaaaaata

SEQ ID NO: 438201 - DNA, 6691 bp, Homo sapiens
ccttaaaggaagaatcagtgtcttcatctctgggtccctaatgttcctttagaactggtatacatttgaaaacaaatatttgagtacacactatacagcttacactgtttttggcgctggggatacagctgtgaagaaattcagacacttttgagttaatggcttaatctaacctttgagatccttgtttttgttttgttttttctctctttacattgggttttcttgagtctgggtgctgttttgcagcttccattctttatattttgtcttactgttagtgtgtatcagagtaggaccatgtacgttttgttttcctgcataaattagataaagtattgtgtagtgtcaggcaggcagtcctaagaaggaatgccattatctccaacatttgttttgcctctcactgtagctaccacaaataaaagagattgtattattcctaggactttccaccttagaataataagctataatagtaagaattttgaaatagttttatcagaaaattgctagttgaatagcatcattcttacggtgtctctggttgggaaattatataattggggaaaataaacattattgaactctattataaaagacccactgacagagacatgttttaactttgtgtaattatatgcactagtatttagcgtggactacaatgatgaactggatatcttggtgagcggctctgcagacttcactgtgaaagtatgggctttatctgctgggacatgcctgaacacactcaccgggcacacggaatgggtcaccaaggtagttttgcagaagtgcaaagtcaagtctctcttgcacagtcctggagactacatcctcttaagtgcagacaaatatgagattaagatttggccaattgggagagaaatcaactgtaagtgcttaaagacattgtctgtctctgaggatagaagtatctgcctgcagccaagacttcattttgatggcaaatacattgtctgtagttcagcacttggtctctaccagtgggactttgccagttatgatattctcagggtcatcaagactcctgagatagcaaacttggccttgcttggctttggagatatctttgccctgctgtttgacaaccgctacctgtacatcatggacttgcggacagagagcctgattagtcgctggcctctgccagagtacaggaaatcaaagagaggctcaagcttcctggcaggcgaagcatcctggctgaatggactggatgggcacaatgacacgggcttggtctttgccaccagcatgcctgaccacagtattcacctggtgttgtggaaggagcacggctgacaccatgagccaccaccgctgactgactttgggtgccggggctgcgggttttgggtgcaacctctgcggcagccgactgcatgaaccaaagttctcacctaatggtatcatcacgcagtgcacaatcatttatctatgttttgccaggggccagggctcggggtgggggagggcttgttttattgacatacaacgcagcatgctaatggggtacaccattgacttcatttgtacttagttatgttggtcagtgttagaggatgcattttgggttcatctttcttgagtggagtattggttttaagtaaagaaagttaaatgatccattaatctgctaattggttgcctatgaaatcacattgtctgttattaaagctttttaccatagcctttttttcttttgaagttgaagcaaaggtgctatgatgttgttacagcaactttcctcacacggggtttagctcttataagagccagtgttaaaacttccaccaaataccagtttataaacttccaccaaataccagtgctaaggaaagtctgtcttccagttcaaatccaattctgtaaattgaatgttagcaactcattctaaaccttatatcttggcagagtcaaggttggccatgtttaagatgtgagcgagttctgtagtttttgttgccatgtcggggaagctagtccccggcagcctggatgactgcacagcggtgccctggtatagcagaaaagagcagtgagctggaaggttagagaccgggcctcttaccctggaactctgcaccctctctgggtcccagcttccttgtctgtacagccaggtatgaagctcagtgatttctaagattctttctggtccttcacctactgaaatgtgtaaaagttgatcatgtatttttgtctgatccctgattcatggtttctttcaggtcggataatatttaaatgaaatgactgttacagagttttctataagaacatcaattatatgaaaaggatgaataaaagggaaatgtagaaaatatagctgattccacttagacagtttaagtaattggttgaagaaatgctgatagaagccatggtttaaatagggacacagtatgctatactagaaggatacctgaacccaacctaacttcctcctttgcctctaacttaatctgcagcctcaggcaagttaactttctcttctaagaccatcattttcttcatcttttaagtgagggaattgtcctagatgagggctcacaaacccaaatgcctaagggagccgtgcaggtaacataaatgagtaaaacattctggggaggattgtgctgtcccctggaaagttgatctaatagggcagttattcagctctgttttgtcattaggagaagcaagcccagggttggcaggtcttcacattgtttcaggaggagctagaaatccagatttttatttgaaatcctggatttttaaaacgttacaactgattaaagaaaatttgaaataaggtgagccaaacaaaacatgtccctgggttgccagattgtgtcctcctccctctctaaagttaggtaattttgtgattcagcagtggaaatgttagtggtcacaatcagggagagagtagagggagcaagcagtagaaaaatctcagccgctcttcagctgtctccccttgtattacaagggtggtggggagggatgtatttcattcacagaccaataggaaggtagtttgaagatgaacataagaattggaacctcagtgacagcttatgtctgggaacatgagttattccttcttgctgactccagtataaagcatatccattttacaggtgagaaaaagggttgctggcagagctgagaatgatgtgaactctagagtggggacctatctcttgcagaatctgcattagcatagagccagactctggacctctgagtgctgtgaagttgatagaaattaatggtgaatttcaaggacagatatcattaatatccatgttgaaactctgtggggtttaagcaaaagaacaatatcttcccccatcccacaaaatctgggtttaatctatctcacattgagttctgtgcatcagctctgcttagtactctagaaatagaaccggaatcacaactgaatctattttgcagaagccccaggagactttgggcactgatgatggtaaatgactttttactctattattatttctttttttttgagacagagtttcgctcttactgcgcaggctggagtgcaatggcacgatcttggctcactgcaacctccgcctcctgggttcaagtgattctcctgcctcagcctcctaagtagctgggattacaagcatctgccatgacacccaactaatttttatatttttagtagagacagggttccaccatgttggccaggctggtcttgaactcctgacctcaggtcatccacctgccttggcctcccaaagtgctgggattacaggcgtgagccaccacgcctggccgagtttttactttttatcgagcctgaacagataactattactgatctaatgaccatccccaccctacctcactttcagatctatccaatagcttcaaagggcaagtaattataatcatttgtgggaaaagttttattaaaaagtgacaaacttgaagctgtatatagtatgttctatttcagtttttagtggtgaatacagaagtcatcaaggtggtacttggtgccgctggaattttttttttttcctaggcagtcttgctctgtcatacaggctggagtacagtggcatcatcatgcagctggattttgacagcagaacttcaggcagtaattggagtcctaatgtcagttcttccttatggaggcctttatttggcctgagattttattcaactactttatagatgctgggtttattcatactatcgccagtttttataaaaatggaaaactagctcatcctttttgcaaaagaaagcaaagtggggagtcagaatgagaagtggataggggataactaaaactattctttactctcctttcattgcctttgagagctagctcttgcacacactgactttggcttccttagcgcataggtaagggaattgcctttccctcttttgtgaatattctcatttctgaaaaattctaagtcatgagaagataagccctatcctttcttacaaggattggatttcttgggtgacactgtggtgtggtggaagccagcggcttctttcaggttcataaaggccatcataacaacttcaggcttcatggtgtggacagggatccaggagagctgagtggatgtgtgaagtttctgatagattctgtcatcattccaaaggaatgtagtttcctccagctcaatcatttgaagtaatacacattgccaaatctgactgtaacctgacattttagacctattggagaaataggaagaaagcccctccagtggaaggactggacttggaagaagttctgcaggaaggtgcatgcaattggatagctgttcatgagtgaaacgtggggaacattgctatgaaattgtaaggtttgcacttcatttttcgtagtttaaaaattgctctgttctggctgttgaaaacacttggtgtgaggtttgaatgaggattatataatcattctagtattcataggaaaatgattactgctctctatttgtaaaacaaaagaaataactttcggaaacagtattttagacatgaggaaattgtttgtattaggcattttgatctaacagaatcagctaaggatagtggatcctggctttacacatttctttgaccaaacccagctggcaacttgaagttgttactgtgtggcttccagattgcctagaggtgaatcctaccaacatcactgttttttttgttttgttttgttttttttgtatgtttttgagacagagtcttgctctatccccaggctggagtgcagtggcgtgatctcggcttactgcaacctcagcctcctgggttcaagcgattctcctgcctcagcctcctgagtagctgagactacaggcgcgtgccaccacgcccagctatttttgtatttttagtagagacgaggtttcactatgttggccaggatggtcttgatttcttgacctcgtgttctgcccgcctctacctcccaaagtgccgggattacaggcgtgagctgctgtgcccggccccagcatcacttttatagctttctgtgcctcttcctctgggccttggtgtatgaagccacttgcctttctctgttgggaagcgagcagaatcagattgctactcatgatgcagtccgggcagggcatactgtcacctttgcctgtggacacagttgtcaggataggggagaagccctttaggtccgtcttcttgacacagccctcctacctggttacgctggtgctttcgcttggtttagacaaccaagacacttgagaattatgctgtcctcagaatgtctgatgaaaagaacagattcacttttttgacacaatgcccattagccatctttggcagtgtttctgatcaaaggttccccatgcctgctctaggaaagtaaacttttttcagaataaatcctcaaatggattactgagtagtctttgcaccattcccatcagcctaatcagactgaatggtcacgctcagtgcaaaaagctgttttgctgttaggatgtttcagtgtttcttgtctttcctggaacagttcagttgtttaaatttagtaattcaatcctgaccagtgtaaacccacttaattattgcagcctaaagaattcagctacttctactcttcataaatgtgcccaagtaaatatgtgtttttaatattcaaccctggaaaattagtaattcagatgataaaagctcatgttttggtgtctttgtactcagattgtgaacaggcatatttcactgatttagacttagtatacttgatgagaatgctcaggttgaagagatagttctgtcagcaatccaacatctatagcaatgtggaaaaagtaatcaactcatatttcacgaatttgatgtatgttgtgatttagagggcatgagataaagtttatatttgaactgtgtggggtagggggaagaagaggttgcttaagcaaatagtggggtgattgtggaacaagatgtctctaagatgagaagttattttcttgcatcatagaagcactctttttacccgtgagtgattgtgttaactataaatcatttatatctgtacattaaagcagattccctcaattaggcaaatttggttagccaagcccaagttattgtttgtacttgaaagtaataaagctgcatttccttaaaaata

SEQ ID NO: 438202 - DNA, 6081 bp, Homo sapiens
ccattattggatcttttatactgtcccgtgtgataggcattatcttcattgcaggagctggagttaagagagattaaataatttacccaagattgcacaggagaattaagacttgaacctgtgattcttggctataaaacctggggtctttccagtatacttcactttctatctgacttcacaaatgcagaccattttaaggacaagcttttctgtagtgatgtgatctctcatctttcctcattttcttttttctgtagatttggccaattgggagagaaatcaactgtaagtgcttaaagacattgtctgtctctgaggatagaagtatctgcctgcagccaagacttcattttgatggcaaatacattgtctgtagttcagcacttggtctctaccagtgggactttgccagttatgatattctcagggtcatcaagactcctgagatagcaaacttggccttgcttggctttggagatatctttgccctgctgtttgacaaccgctacctgtacatcatggacttgcggacagagagcctgattagtcgctggcctctgccagagtacaggaaatcaaagagaggctcaagcttcctggcaggcgaagcatcctggctgaatggactggatgggcacaatgacacgggcttggtctttgccaccagcatgcctgaccacagtattcacctggtgttgtggaaggagcacggctgacaccatgagccaccaccgctgactgactttgggtgccggggctgcgggttttgggtgcaacctctgcggcagccgactgcatgaaccaaagttctcacctaatggtatcatcacgcagtgcacaatcatttatctatgttttgccaggggccagggctcggggtgggggagggcttgttttattgacatacaacgcagcatgctaatggggtacaccattgacttcatttgtacttagttatgttggtcagtgttagaggatgcattttgggttcatctttcttgagtggagtattggttttaagtaaagaaagttaaatgatccattaatctgctaattggttgcctatgaaatcacattgtctgttattaaagctttttaccatagcctttttttcttttgaagttgaagcaaaggtgctatgatgttgttacagcaactttcctcacacggggtttagctcttataagagccagtgttaaaacttccaccaaataccagtttataaacttccaccaaataccagtgctaaggaaagtctgtcttccagttcaaatccaattctgtaaattgaatgttagcaactcattctaaaccttatatcttggcagagtcaaggttggccatgtttaagatgtgagcgagttctgtagtttttgttgccatgtcggggaagctagtccccggcagcctggatgactgcacagcggtgccctggtatagcagaaaagagcagtgagctggaaggttagagaccgggcctcttaccctggaactctgcaccctctctgggtcccagcttccttgtctgtacagccaggtatgaagctcagtgatttctaagattctttctggtccttcacctactgaaatgtgtaaaagttgatcatgtatttttgtctgatccctgattcatggtttctttcaggtcggataatatttaaatgaaatgactgttacagagttttctataagaacatcaattatatgaaaaggatgaataaaagggaaatgtagaaaatatagctgattccacttagacagtttaagtaattggttgaagaaatgctgatagaagccatggtttaaatagggacacagtatgctatactagaaggatacctgaacccaacctaacttcctcctttgcctctaacttaatctgcagcctcaggcaagttaactttctcttctaagaccatcattttcttcatcttttaagtgagggaattgtcctagatgagggctcacaaacccaaatgcctaagggagccgtgcaggtaacataaatgagtaaaacattctggggaggattgtgctgtcccctggaaagttgatctaatagggcagttattcagctctgttttgtcattaggagaagcaagcccagggttggcaggtcttcacattgtttcaggaggagctagaaatccagatttttatttgaaatcctggatttttaaaacgttacaactgattaaagaaaatttgaaataaggtgagccaaacaaaacatgtccctgggttgccagattgtgtcctcctccctctctaaagttaggtaattttgtgattcagcagtggaaatgttagtggtcacaatcagggagagagtagagggagcaagcagtagaaaaatctcagccgctcttcagctgtctccccttgtattacaagggtggtggggagggatgtatttcattcacagaccaataggaaggtagtttgaagatgaacataagaattggaacctcagtgacagcttatgtctgggaacatgagttattccttcttgctgactccagtataaagcatatccattttacaggtgagaaaaagggttgctggcagagctgagaatgatgtgaactctagagtggggacctatctcttgcagaatctgcattagcatagagccagactctggacctctgagtgctgtgaagttgatagaaattaatggtgaatttcaaggacagatatcattaatatccatgttgaaactctgtggggtttaagcaaaagaacaatatcttcccccatcccacaaaatctgggtttaatctatctcacattgagttctgtgcatcagctctgcttagtactctagaaatagaaccggaatcacaactgaatctattttgcagaagccccaggagactttgggcactgatgatggtaaatgactttttactctattattatttctttttttttgagacagagtttcgctcttactgcgcaggctggagtgcaatggcacgatcttggctcactgcaacctccgcctcctgggttcaagtgattctcctgcctcagcctcctaagtagctgggattacaagcatctgccatgacacccaactaatttttatatttttagtagagacagggttccaccatgttggccaggctggtcttgaactcctgacctcaggtcatccacctgccttggcctcccaaagtgctgggattacaggcgtgagccaccacgcctggccgagtttttactttttatcgagcctgaacagataactattactgatctaatgaccatccccaccctacctcactttcagatctatccaatagcttcaaagggcaagtaattataatcatttgtgggaaaagttttattaaaaagtgacaaacttgaagctgtatatagtatgttctatttcagtttttagtggtgaatacagaagtcatcaaggtggtacttggtgccgctggaattttttttttttcctaggcagtcttgctctgtcatacaggctggagtacagtggcatcatcatgcagctggattttgacagcagaacttcaggcagtaattggagtcctaatgtcagttcttccttatggaggcctttatttggcctgagattttattcaactactttatagatgctgggtttattcatactatcgccagtttttataaaaatggaaaactagctcatcctttttgcaaaagaaagcaaagtggggagtcagaatgagaagtggataggggataactaaaactattctttactctcctttcattgcctttgagagctagctcttgcacacactgactttggcttccttagcgcataggtaagggaattgcctttccctcttttgtgaatattctcatttctgaaaaattctaagtcatgagaagataagccctatcctttcttacaaggattggatttcttgggtgacactgtggtgtggtggaagccagcggcttctttcaggttcataaaggccatcataacaacttcaggcttcatggtgtggacagggatccaggagagctgagtggatgtgtgaagtttctgatagattctgtcatcattccaaaggaatgtagtttcctccagctcaatcatttgaagtaatacacattgccaaatctgactgtaacctgacattttagacctattggagaaataggaagaaagcccctccagtggaaggactggacttggaagaagttctgcaggaaggtgcatgcaattggatagctgttcatgagtgaaacgtggggaacattgctatgaaattgtaaggtttgcacttcatttttcgtagtttaaaaattgctctgttctggctgttgaaaacacttggtgtgaggtttgaatgaggattatataatcattctagtattcataggaaaatgattactgctctctatttgtaaaacaaaagaaataactttcggaaacagtattttagacatgaggaaattgtttgtattaggcattttgatctaacagaatcagctaaggatagtggatcctggctttacacatttctttgaccaaacccagctggcaacttgaagttgttactgtgtggcttccagattgcctagaggtgaatcctaccaacatcactgttttttttgttttgttttgttttttttgtatgtttttgagacagagtcttgctctatccccaggctggagtgcagtggcgtgatctcggcttactgcaacctcagcctcctgggttcaagcgattctcctgcctcagcctcctgagtagctgagactacaggcgcgtgccaccacgcccagctatttttgtatttttagtagagacgaggtttcactatgttggccaggatggtcttgatttcttgacctcgtgttctgcccgcctctacctcccaaagtgccgggattacaggcgtgagctgctgtgcccggccccagcatcacttttatagctttctgtgcctcttcctctgggccttggtgtatgaagccacttgcctttctctgttgggaagcgagcagaatcagattgctactcatgatgcagtccgggcagggcatactgtcacctttgcctgtggacacagttgtcaggataggggagaagccctttaggtccgtcttcttgacacagccctcctacctggttacgctggtgctttcgcttggtttagacaaccaagacacttgagaattatgctgtcctcagaatgtctgatgaaaagaacagattcacttttttgacacaatgcccattagccatctttggcagtgtttctgatcaaaggttccccatgcctgctctaggaaagtaaacttttttcagaataaatcctcaaatggattactgagtagtctttgcaccattcccatcagcctaatcagactgaatggtcacgctcagtgcaaaaagctgttttgctgttaggatgtttcagtgtttcttgtctttcctggaacagttcagttgtttaaatttagtaattcaatcctgaccagtgtaaacccacttaattattgcagcctaaagaattcagctacttctactcttcataaatgtgcccaagtaaatatgtgtttttaatattcaaccctggaaaattagtaattcagatgataaaagctcatgttttggtgtctttgtactcagattgtgaacaggcatatttcactgatttagacttagtatacttgatgagaatgctcaggttgaagagatagttctgtcagcaatccaacatctatagcaatgtggaaaaagtaatcaactcatatttcacgaatttgatgtatgttgtgatttagagggcatgagataaagtttatatttgaactgtgtggggtagggggaagaagaggttgcttaagcaaatagtggggtgattgtggaacaagatgtctctaagatgagaagttattttcttgcatcatagaagcactctttttacccgtgagtgattgtgttaactataaatcatttatatctgtacattaaagcagattccctcaattaggcaaatttggttagccaagcccaagttattgtttgtacttgaaagtaataaagctgcatttccttaaaaata

SEQ ID NO: 438203 - DNA, 5835 bp, Homo sapiens
cgctcccggcttttttataagtgggctgagcttttctccttatattttactttttatcaaaaacatttaactctaaatttgcttgaatttaatattggttttaaatatctccagaaaagattacagtagcataaacagaagcaaggttgccttctttcacagtccctaactctcatccttgtagggtcatcaagactcctgagatagcaaacttggccttgcttggctttggagatatctttgccctgctgtttgacaaccgctacctgtacatcatggacttgcggacagagagcctgattagtcgctggcctctgccagagtacaggaaatcaaagagaggctcaagcttcctggcaggcgaagcatcctggctgaatggactggatgggcacaatgacacgggcttggtctttgccaccagcatgcctgaccacagtattcacctggtgttgtggaaggagcacggctgacaccatgagccaccaccgctgactgactttgggtgccggggctgcgggttttgggtgcaacctctgcggcagccgactgcatgaaccaaagttctcacctaatggtatcatcacgcagtgcacaatcatttatctatgttttgccaggggccagggctcggggtgggggagggcttgttttattgacatacaacgcagcatgctaatggggtacaccattgacttcatttgtacttagttatgttggtcagtgttagaggatgcattttgggttcatctttcttgagtggagtattggttttaagtaaagaaagttaaatgatccattaatctgctaattggttgcctatgaaatcacattgtctgttattaaagctttttaccatagcctttttttcttttgaagttgaagcaaaggtgctatgatgttgttacagcaactttcctcacacggggtttagctcttataagagccagtgttaaaacttccaccaaataccagtttataaacttccaccaaataccagtgctaaggaaagtctgtcttccagttcaaatccaattctgtaaattgaatgttagcaactcattctaaaccttatatcttggcagagtcaaggttggccatgtttaagatgtgagcgagttctgtagtttttgttgccatgtcggggaagctagtccccggcagcctggatgactgcacagcggtgccctggtatagcagaaaagagcagtgagctggaaggttagagaccgggcctcttaccctggaactctgcaccctctctgggtcccagcttccttgtctgtacagccaggtatgaagctcagtgatttctaagattctttctggtccttcacctactgaaatgtgtaaaagttgatcatgtatttttgtctgatccctgattcatggtttctttcaggtcggataatatttaaatgaaatgactgttacagagttttctataagaacatcaattatatgaaaaggatgaataaaagggaaatgtagaaaatatagctgattccacttagacagtttaagtaattggttgaagaaatgctgatagaagccatggtttaaatagggacacagtatgctatactagaaggatacctgaacccaacctaacttcctcctttgcctctaacttaatctgcagcctcaggcaagttaactttctcttctaagaccatcattttcttcatcttttaagtgagggaattgtcctagatgagggctcacaaacccaaatgcctaagggagccgtgcaggtaacataaatgagtaaaacattctggggaggattgtgctgtcccctggaaagttgatctaatagggcagttattcagctctgttttgtcattaggagaagcaagcccagggttggcaggtcttcacattgtttcaggaggagctagaaatccagatttttatttgaaatcctggatttttaaaacgttacaactgattaaagaaaatttgaaataaggtgagccaaacaaaacatgtccctgggttgccagattgtgtcctcctccctctctaaagttaggtaattttgtgattcagcagtggaaatgttagtggtcacaatcagggagagagtagagggagcaagcagtagaaaaatctcagccgctcttcagctgtctccccttgtattacaagggtggtggggagggatgtatttcattcacagaccaataggaaggtagtttgaagatgaacataagaattggaacctcagtgacagcttatgtctgggaacatgagttattccttcttgctgactccagtataaagcatatccattttacaggtgagaaaaagggttgctggcagagctgagaatgatgtgaactctagagtggggacctatctcttgcagaatctgcattagcatagagccagactctggacctctgagtgctgtgaagttgatagaaattaatggtgaatttcaaggacagatatcattaatatccatgttgaaactctgtggggtttaagcaaaagaacaatatcttcccccatcccacaaaatctgggtttaatctatctcacattgagttctgtgcatcagctctgcttagtactctagaaatagaaccggaatcacaactgaatctattttgcagaagccccaggagactttgggcactgatgatggtaaatgactttttactctattattatttctttttttttgagacagagtttcgctcttactgcgcaggctggagtgcaatggcacgatcttggctcactgcaacctccgcctcctgggttcaagtgattctcctgcctcagcctcctaagtagctgggattacaagcatctgccatgacacccaactaatttttatatttttagtagagacagggttccaccatgttggccaggctggtcttgaactcctgacctcaggtcatccacctgccttggcctcccaaagtgctgggattacaggcgtgagccaccacgcctggccgagtttttactttttatcgagcctgaacagataactattactgatctaatgaccatccccaccctacctcactttcagatctatccaatagcttcaaagggcaagtaattataatcatttgtgggaaaagttttattaaaaagtgacaaacttgaagctgtatatagtatgttctatttcagtttttagtggtgaatacagaagtcatcaaggtggtacttggtgccgctggaattttttttttttcctaggcagtcttgctctgtcatacaggctggagtacagtggcatcatcatgcagctggattttgacagcagaacttcaggcagtaattggagtcctaatgtcagttcttccttatggaggcctttatttggcctgagattttattcaactactttatagatgctgggtttattcatactatcgccagtttttataaaaatggaaaactagctcatcctttttgcaaaagaaagcaaagtggggagtcagaatgagaagtggataggggataactaaaactattctttactctcctttcattgcctttgagagctagctcttgcacacactgactttggcttccttagcgcataggtaagggaattgcctttccctcttttgtgaatattctcatttctgaaaaattctaagtcatgagaagataagccctatcctttcttacaaggattggatttcttgggtgacactgtggtgtggtggaagccagcggcttctttcaggttcataaaggccatcataacaacttcaggcttcatggtgtggacagggatccaggagagctgagtggatgtgtgaagtttctgatagattctgtcatcattccaaaggaatgtagtttcctccagctcaatcatttgaagtaatacacattgccaaatctgactgtaacctgacattttagacctattggagaaataggaagaaagcccctccagtggaaggactggacttggaagaagttctgcaggaaggtgcatgcaattggatagctgttcatgagtgaaacgtggggaacattgctatgaaattgtaaggtttgcacttcatttttcgtagtttaaaaattgctctgttctggctgttgaaaacacttggtgtgaggtttgaatgaggattatataatcattctagtattcataggaaaatgattactgctctctatttgtaaaacaaaagaaataactttcggaaacagtattttagacatgaggaaattgtttgtattaggcattttgatctaacagaatcagctaaggatagtggatcctggctttacacatttctttgaccaaacccagctggcaacttgaagttgttactgtgtggcttccagattgcctagaggtgaatcctaccaacatcactgttttttttgttttgttttgttttttttgtatgtttttgagacagagtcttgctctatccccaggctggagtgcagtggcgtgatctcggcttactgcaacctcagcctcctgggttcaagcgattctcctgcctcagcctcctgagtagctgagactacaggcgcgtgccaccacgcccagctatttttgtatttttagtagagacgaggtttcactatgttggccaggatggtcttgatttcttgacctcgtgttctgcccgcctctacctcccaaagtgccgggattacaggcgtgagctgctgtgcccggccccagcatcacttttatagctttctgtgcctcttcctctgggccttggtgtatgaagccacttgcctttctctgttgggaagcgagcagaatcagattgctactcatgatgcagtccgggcagggcatactgtcacctttgcctgtggacacagttgtcaggataggggagaagccctttaggtccgtcttcttgacacagccctcctacctggttacgctggtgctttcgcttggtttagacaaccaagacacttgagaattatgctgtcctcagaatgtctgatgaaaagaacagattcacttttttgacacaatgcccattagccatctttggcagtgtttctgatcaaaggttccccatgcctgctctaggaaagtaaacttttttcagaataaatcctcaaatggattactgagtagtctttgcaccattcccatcagcctaatcagactgaatggtcacgctcagtgcaaaaagctgttttgctgttaggatgtttcagtgtttcttgtctttcctggaacagttcagttgtttaaatttagtaattcaatcctgaccagtgtaaacccacttaattattgcagcctaaagaattcagctacttctactcttcataaatgtgcccaagtaaatatgtgtttttaatattcaaccctggaaaattagtaattcagatgataaaagctcatgttttggtgtctttgtactcagattgtgaacaggcatatttcactgatttagacttagtatacttgatgagaatgctcaggttgaagagatagttctgtcagcaatccaacatctatagcaatgtggaaaaagtaatcaactcatatttcacgaatttgatgtatgttgtgatttagagggcatgagataaagtttatatttgaactgtgtggggtagggggaagaagaggttgcttaagcaaatagtggggtgattgtggaacaagatgtctctaagatgagaagttattttcttgcatcatagaagcactctttttacccgtgagtgattgtgttaactataaatcatttatatctgtacattaaagcagattccctcaattaggcaaatttggttagccaagcccaagttattgtttgtacttgaaagtaataaagctgcatttccttaaaaata

SEQ ID NO: 438204 - DNA, 4495 bp, Homo sapiens
taagtcacctcgggaccttatttccttcttattggctgtacctgattcatggtttctttcaggtcggataatatttaaatgaaatgactgttacagagttttctataagaacatcaattatatgaaaaggatgaataaaagggaaatgtagaaaatatagctgattccacttagacagtttaagtaattggttgaagaaatgctgatagaagccatggtttaaatagggacacagtatgctatactagaaggatacctgaacccaacctaacttcctcctttgcctctaacttaatctgcagcctcaggcaagttaactttctcttctaagaccatcattttcttcatcttttaagtgagggaattgtcctagatgagggctcacaaacccaaatgcctaagggagccgtgcaggtaacataaatgagtaaaacattctggggaggattgtgctgtcccctggaaagttgatctaatagggcagttattcagctctgttttgtcattaggagaagcaagcccagggttggcaggtcttcacattgtttcaggaggagctagaaatccagatttttatttgaaatcctggatttttaaaacgttacaactgattaaagaaaatttgaaataaggtgagccaaacaaaacatgtccctgggttgccagattgtgtcctcctccctctctaaagttaggtaattttgtgattcagcagtggaaatgttagtggtcacaatcagggagagagtagagggagcaagcagtagaaaaatctcagccgctcttcagctgtctccccttgtattacaagggtggtggggagggatgtatttcattcacagaccaataggaaggtagtttgaagatgaacataagaattggaacctcagtgacagcttatgtctgggaacatgagttattccttcttgctgactccagtataaagcatatccattttacaggtgagaaaaagggttgctggcagagctgagaatgatgtgaactctagagtggggacctatctcttgcagaatctgcattagcatagagccagactctggacctctgagtgctgtgaagttgatagaaattaatggtgaatttcaaggacagatatcattaatatccatgttgaaactctgtggggtttaagcaaaagaacaatatcttcccccatcccacaaaatctgggtttaatctatctcacattgagttctgtgcatcagctctgcttagtactctagaaatagaaccggaatcacaactgaatctattttgcagaagccccaggagactttgggcactgatgatggtaaatgactttttactctattattatttctttttttttgagacagagtttcgctcttactgcgcaggctggagtgcaatggcacgatcttggctcactgcaacctccgcctcctgggttcaagtgattctcctgcctcagcctcctaagtagctgggattacaagcatctgccatgacacccaactaatttttatatttttagtagagacagggttccaccatgttggccaggctggtcttgaactcctgacctcaggtcatccacctgccttggcctcccaaagtgctgggattacaggcgtgagccaccacgcctggccgagtttttactttttatcgagcctgaacagataactattactgatctaatgaccatccccaccctacctcactttcagatctatccaatagcttcaaagggcaagtaattataatcatttgtgggaaaagttttattaaaaagtgacaaacttgaagctgtatatagtatgttctatttcagtttttagtggtgaatacagaagtcatcaaggtggtacttggtgccgctggaattttttttttttcctaggcagtcttgctctgtcatacaggctggagtacagtggcatcatcatgcagctggattttgacagcagaacttcaggcagtaattggagtcctaatgtcagttcttccttatggaggcctttatttggcctgagattttattcaactactttatagatgctgggtttattcatactatcgccagtttttataaaaatggaaaactagctcatcctttttgcaaaagaaagcaaagtggggagtcagaatgagaagtggataggggataactaaaactattctttactctcctttcattgcctttgagagctagctcttgcacacactgactttggcttccttagcgcataggtaagggaattgcctttccctcttttgtgaatattctcatttctgaaaaattctaagtcatgagaagataagccctatcctttcttacaaggattggatttcttgggtgacactgtggtgtggtggaagccagcggcttctttcaggttcataaaggccatcataacaacttcaggcttcatggtgtggacagggatccaggagagctgagtggatgtgtgaagtttctgatagattctgtcatcattccaaaggaatgtagtttcctccagctcaatcatttgaagtaatacacattgccaaatctgactgtaacctgacattttagacctattggagaaataggaagaaagcccctccagtggaaggactggacttggaagaagttctgcaggaaggtgcatgcaattggatagctgttcatgagtgaaacgtggggaacattgctatgaaattgtaaggtttgcacttcatttttcgtagtttaaaaattgctctgttctggctgttgaaaacacttggtgtgaggtttgaatgaggattatataatcattctagtattcataggaaaatgattactgctctctatttgtaaaacaaaagaaataactttcggaaacagtattttagacatgaggaaattgtttgtattaggcattttgatctaacagaatcagctaaggatagtggatcctggctttacacatttctttgaccaaacccagctggcaacttgaagttgttactgtgtggcttccagattgcctagaggtgaatcctaccaacatcactgttttttttgttttgttttgttttttttgtatgtttttgagacagagtcttgctctatccccaggctggagtgcagtggcgtgatctcggcttactgcaacctcagcctcctgggttcaagcgattctcctgcctcagcctcctgagtagctgagactacaggcgcgtgccaccacgcccagctatttttgtatttttagtagagacgaggtttcactatgttggccaggatggtcttgatttcttgacctcgtgttctgcccgcctctacctcccaaagtgccgggattacaggcgtgagctgctgtgcccggccccagcatcacttttatagctttctgtgcctcttcctctgggccttggtgtatgaagccacttgcctttctctgttgggaagcgagcagaatcagattgctactcatgatgcagtccgggcagggcatactgtcacctttgcctgtggacacagttgtcaggataggggagaagccctttaggtccgtcttcttgacacagccctcctacctggttacgctggtgctttcgcttggtttagacaaccaagacacttgagaattatgctgtcctcagaatgtctgatgaaaagaacagattcacttttttgacacaatgcccattagccatctttggcagtgtttctgatcaaaggttccccatgcctgctctaggaaagtaaacttttttcagaataaatcctcaaatggattactgagtagtctttgcaccattcccatcagcctaatcagactgaatggtcacgctcagtgcaaaaagctgttttgctgttaggatgtttcagtgtttcttgtctttcctggaacagttcagttgtttaaatttagtaattcaatcctgaccagtgtaaacccacttaattattgcagcctaaagaattcagctacttctactcttcataaatgtgcccaagtaaatatgtgtttttaatattcaaccctggaaaattagtaattcagatgataaaagctcatgttttggtgtctttgtactcagattgtgaacaggcatatttcactgatttagacttagtatacttgatgagaatgctcaggttgaagagatagttctgtcagcaatccaacatctatagcaatgtggaaaaagtaatcaactcatatttcacgaatttgatgtatgttgtgatttagagggcatgagataaagtttatatttgaactgtgtggggtagggggaagaagaggttgcttaagcaaatagtggggtgattgtggaacaagatgtctctaagatgagaagttattttcttgcatcatagaagcactctttttacccgtgagtgattgtgttaactataaatcatttatatctgtacattaaagcagattccctcaattaggcaaatttggttagccaagcccaagttattgtttgtacttgaaagtaataaagctgcatttccttaaaaata

SEQ ID NO: 438205 - DNA, 6266 bp, Homo sapiens
agcaccggaagccgctcccctgtgaggctgcggaccgggagcagcggccgcaggtccgggcgccatggctgcggagcggacccggccgctgcaaggctctggcggtccgagcgtgcctagtagctgtgaacccggcgcgaggtcccgggccccggggcgctcgctcaggtaaatttttccataaccttatggagagaaaggactttgagacatggcttgataacatttctgttacatttctttctctgacggacttgcagaaaaatgaaactctggatcacctgattagtctgagtggggcagtccagctcaggcatctctccaataacctagagactctcctcaagcgggacttcctcaaactccttcccctggagctcagtttttatttgttaaaatggctcgatcctcagactttactcacatgctgcctcgtctctaaacagtggaataaggtgataagtgcctgtacagaggtgtggcagactgcatgtaaaaatttgggctggcagatagatgattctgttcaggacgctttgcactggaagaaggtttatttgaaggctattttgagaatgaagcaactggaggaccatgaagcctttgaaacctcgtcattaattggacacagtgccagagtgtatgcactttactacaaagatggacttctctgtacagggtcagatgacttgtctgcaaagctgtgggatgtgagcacagggcagtgcgtttatggcatccagacccacacttgtgcagcggtgaagtttgatgaacagaagcttgtgacaggctcctttgacaacactgtggcttgctgggaatggagttccggagccaggacccagcactttcgggggcacacgggggcggtatttagcgtggactacaatgatgaactggatatcttggtgagcggctctgcagacttcactgtgaaagtatgggctttatctgctgggacatgcctgaacacactcaccgggcacacggaatgggtcaccaaggtagttttgcagaagtgcaaagtcaagtctctcttgcacagtcctggagactacatcctcttaagtgcagacaaatatgagattaagatttggccaattgggagagaaatcaactgtaagtgcttaaagacattgtctgtctctgaggatagaagtatctgcctgcagccaagacttcattttgatggcaaatacattgtctgtagttcagcacttggtctctaccagtgggactttgccagttatgatattctcagggtcatcaagactcctgagatagcaaacttggccttgcttggctttggagatatctttgccctgctgtttgacaaccgctacctgtacatcatggacttgcggacagagagcctgattagtcgctggcctctgccagagtacaggaaatcaaagagaggctcaagcttcctggcaggcgaagcatcctggctgaatggactggatgggcacaatgacacgggcttggtctttgccaccagcatgcctgaccacagtattcacctggtgttgtggaaggagcacggctgacaccatgagccaccaccgctgactgactttgggtgccggggctgcgggttttgggtgcaacctctgcggcagccgactgcatgaaccaaagttctcacctaatggtatcatcacgcagtgcacaatcatttatctatgttttgccaggggccagggctcggggtgggggagggcttgttttattgacatacaacgcagcatgctaatggggtacaccattgacttcatttgtacttagttatgttggtcagtgttagaggatgcattttgggttcatctttcttgagtggagtattggttttaagtaaagaaagttaaatgatccattaatctgctaattggttgcctatgaaatcacattgtctgttattaaagctttttaccatagcctttttttcttttgaagttgaagcaaaggtgctatgatgttgttacagcaactttcctcacacggggtttagctcttataagagccagtgttaaaacttccaccaaataccagtttataaacttccaccaaataccagtgctaaggaaagtctgtcttccagttcaaatccaattctgtaaattgaatgttagcaactcattctaaaccttatatcttggcagagtcaaggttggccatgtttaagatgtgagcgagttctgtagtttttgttgccatgtcggggaagctagtccccggcagcctggatgactgcacagcggtgccctggtatagcagaaaagagcagtgagctggaaggttagagaccgggcctcttaccctggaactctgcaccctctctgggtcccagcttccttgtctgtacagccaggtatgaagctcagtgatttctaagattctttctggtccttcacctactgaaatgtgtaaaagttgatcatgtatttttgtctgatccctgattcatggtttctttcaggtcggataatatttaaatgaaatgactgttacagagttttctataagaacatcaattatatgaaaaggatgaataaaagggaaatgtagaaaatatagctgattccacttagacagtttaagtaattggttgaagaaatgctgatagaagccatggtttaaatagggacacagtatgctatactagaaggatacctgaacccaacctaacttcctcctttgcctctaacttaatctgcagcctcaggcaagttaactttctcttctaagaccatcattttcttcatcttttaagtgagggaattgtcctagatgagggctcacaaacccaaatgcctaagggagccgtgcaggtaacataaatgagtaaaacattctggggaggattgtgctgtcccctggaaagttgatctaatagggcagttattcagctctgttttgtcattaggagaagcaagcccagggttggcaggtcttcacattgtttcaggaggagctagaaatccagatttttatttgaaatcctggatttttaaaacgttacaactgattaaagaaaatttgaaataaggtgagccaaacaaaacatgtccctgggttgccagattgtgtcctcctccctctctaaagttaggtaattttgtgattcagcagtggaaatgttagtggtcacaatcagggagagagtagagggagcaagcagtagaaaaatctcagccgctcttcagctgtctccccttgtattacaagggtggtggggagggatgtatttcattcacagaccaataggaaggtagtttgaagatgaacataagaattggaacctcagtgacagcttatgtctgggaacatgagttattccttcttgctgactccagtataaagcatatccattttacaggtgagaaaaagggttgctggcagagctgagaatgatgtgaactctagagtggggacctatctcttgcagaatctgcattagcatagagccagactctggacctctgagtgctgtgaagttgatagaaattaatggtgaatttcaaggacagatatcattaatatccatgttgaaactctgtggggtttaagcaaaagaacaatatcttcccccatcccacaaaatctgggtttaatctatctcacattgagttctgtgcatcagctctgcttagtactctagaaatagaaccggaatcacaactgaatctattttgcagaagccccaggagactttgggcactgatgatggtaaatgactttttactctattattatttctttttttttgagacagagtttcgctcttactgcgcaggctggagtgcaatggcacgatcttggctcactgcaacctccgcctcctgggttcaagtgattctcctgcctcagcctcctaagtagctgggattacaagcatctgccatgacacccaactaatttttatatttttagtagagacagggttccaccatgttggccaggctggtcttgaactcctgacctcaggtcatccacctgccttggcctcccaaagtgctgggattacaggcgtgagccaccacgcctggccgagtttttactttttatcgagcctgaacagataactattactgatctaatgaccatccccaccctacctcactttcagatctatccaatagcttcaaagggcaagtaattataatcatttgtgggaaaagttttattaaaaagtgacaaacttgaagctgtatatagtatgttctatttcagtttttagtggtgaatacagaagtcatcaaggtggtacttggtgccgctggaattttttttttttcctaggcagtcttgctctgtcatacaggctggagtacagtggcatcatcatgcagctggattttgacagcagaacttcaggcagtaattggagtcctaatgtcagttcttccttatggaggcctttatttggcctgagattttattcaactactttatagatgctgggtttattcatactatcgccagtttttataaaaatggaaaactagctcatcctttttgcaaaagaaagcaaagtggggagtcagaatgagaagtggataggggataactaaaactattctttactctcctttcattgcctttgagagctagctcttgcacacactgactttggcttccttagcgcataggtaagggaattgcctttccctcttttgtgaatattctcatttctgaaaaattctaagtcatgagaagataagccctatcctttcttacaaggattggatttcttgggtgacactgtggtgtggtggaagccagcggcttctttcaggttcataaaggccatcataacaacttcaggcttcatggtgtggacagggatccaggagagctgagtggatgtgtgaagtttctgatagattctgtcatcattccaaaggaatgtagtttcctccagctcaatcatttgaagtaatacacattgccaaatctgactgtaacctgacattttagacctattggagaaataggaagaaagcccctccagtggaaggactggacttggaagaagttctgcaggaaggtgcatgcaattggatagctgttcatgagtgaaacgtggggaacattgctatgaaattgtaaggtttgcacttcatttttcgtagtttaaaaattgctctgttctggctgttgaaaacacttggtgtgaggtttgaatgaggattatataatcattctagtattcataggaaaatgattactgctctctatttgtaaaacaaaagaaataactttcggaaacagtattttagacatgaggaaattgtttgtattaggcattttgatctaacagaatcagctaaggatagtggatcctggctttacacatttctttgaccaaacccagctggcaacttgaagttgttactgtgtggcttccagattgcctagaggtgaatcctaccaacatcactgttttttttgttttgttttgttttttttgtatgtttttgagacagagtcttgctctatccccaggctggagtgcagtggcgtgatctcggcttactgcaacctcagcctcctgggttcaagcgattctcctgcctcagcctcctgagtagctgagactacaggcgcgtgccaccacgcccagctatttttgtatttttagtagagacgaggtttcactatgttggccaggatggtcttgatttcttgacctcgtgttctgcccgcctctacctcccaaagtgccgggattacaggcgtgagctgctgtgcccggccccagcatcacttttatagctttctgtgcctcttcctctgggccttggtgtatgaagccacttgcctttctctgttgggaagcgagcagaatcagattgctactcatgatgcagtccgggcagggcatactgtcacctttgcctgtggacacagttgtcaggataggggagaagccctttaggtccgtcttcttgacacagccctcctacctggttacgctggtgctttcgcttggtttagacaaccaagacacttgagaattatgctgtcctcagaatgtctgatgaaaagaacagattcacttttttgacacaatgcccattagccatctttggcagtgtttctgatcaaaggttccccatgcctgctctacaagaaacactgaaacatcctaacagcaaaacagctttttgcactgagcgtgaccattcagtctgattaggctgatgggaatggtgcaaagactactcagtaatccatttgaggatttattctgaaaaaag

SEQ ID NO: 438206 - DNA, 5078 bp, Homo sapiens
agcaccggaagccgctcccctgtgaggctgcggaccgggagcagcggccgcaggtccgggcgccatggctgcggagcggacccggccgctgcaaggctctggcggtccgagcgtgcctagtagctgtgaacccggcgcgaggtcccgggccccggggcgctcgctcaggtaaatttttccataaccttatggagagaaaggactttgagacatggcttgataacatttctgttacatttctttctctgacggacttgcagaaaaatgaaactctggatcacctgattagtctgagtggggcagtccagctcaggcatctctccaataacctagagactctcctcaagcgggacttcctcaaactccttcccctggagctcagtttttatttgttaaaatggctcgatcctcagactttactcacatgctgcctcgtctctaaacagtggaataaggtgataagtgcctgtacagaggtgtggcagactgcatgtaaaaatttgggctggcagatagatgattctgttcaggacgctttgcactggaagaaggtttatttgaaggctattttgagaatgaagcaactggaggaccatgaagcctttgaaacctcgtcattaattggacacagtgccagagtgtatgcactttactacaaagatggacttctctgtacagggtcagatgacttgtctgcaaagctgtgggatgtgagcacagggcagtgcgtttatggcatccagacccacacttgtgcagcggtgaagtttgatgaacagaagcttgtgacaggctcctttgacaacactgtggcttgctgggaatggagttccggagccaggacccagcactttcgggggcacacgggggcggtatttagcgtggactacaatgatgaactggatatcttggtgagcggctctgcagacttcactgtgaaagtatgggctttatctgctgggacatgcctgaacacactcaccgggcacacggaatgggtcaccaaggtagttttgcagaagtgcaaagtcaagtctctcttgcacagtcctggagactacatcctcttaagtgcagacaaatatgagattaagatttggccaattgggagagaaatcaactgtaagtgcttaaagacattgtctgtctctgaggatagaagtatctgcctgcagccaagacttcattttgatggcaaatacattgtctgtagttcagcacttggtctctaccagtgggactttgccagttatgatattctcagggtcatcaagactcctgagatagcaaacttggccttgcttggctttggagatatctttgccctgctgtttgacaaccgctacctgtacatcatggacttgcggacagagagcctgattagtcgctggcctctgccagagtacaggaaatcaaagagaggctcaagcttcctggcaggcgaagcatcctggctgaatggactggatgggcacaatgacacgggcttggtctttgccaccagcatgcctgaccacagtattcacctggtgttgtggaaggagcacggctgacaccatgagccaccaccgctgactgactttgggtgccggggctgcgggttttgggtgcaacctctgcggcagccgactgcatgaaccaaagttctcacctaatggtatcatcacgcagtgcacaatcatttatctatgttttgccaggggccagggctcggggtgggggagggcttgttttattgacatacaacgcagcatgctaatggggtacaccattgacttcatttgtacttagttatgttggtcagtgttagaggatgcattttgggttcatctttcttgagtggagtattggttttaagtaaagaaagttaaatgatccattaatctgctaattggttgcctatgaaatcacattgtctgttattaaagctttttaccatagcctttttttcttttgaagttgaagcaaaggtgctatgatgttgttacagcaactttcctcacacggggtttagctcttataagagccagtgttaaaacttccaccaaataccagtttataaacttccaccaaataccagtgctaaggaaagtctgtcttccagttcaaatccaattctgtaaattgaatgttagcaactcattctaaaccttatatcttggcagagtcaaggttggccatgtttaagatgtgagcgagttctgtagtttttgttgccatgtcggggaagctagtccccggcagcctggatgactgcacagcggtgccctggtatagcagaaaagagcagtgagctggaaggttagagaccgggcctcttaccctggaactctgcaccctctctgggtcccagcttccttgtctgtacagccaggtatgaagctcagtgatttctaagattctttctggtccttcacctactgaaatgtgtaaaagttgatcatgtatttttgtctgatccctgattcatggtttctttcaggtcggataatatttaaatgaaatgactgttacagagttttctataagaacatcaattatatgaaaaggatgaataaaagggaaatgtagaaaatatagctgattccacttagacagtttaagtaattggttgaagaaatgctgatagaagccatggtttaaatagggacacagtatgctatactagaaggatacctgaacccaacctaacttcctcctttgcctctaacttaatctgcagcctcaggcaagttaactttctcttctaagaccatcattttcttcatcttttaagtgagggaattgtcctagatgagggctcacaaacccaaatgcctaagggagccgtgcaggtaacataaatgagtaaaacattctggggaggattgtgctgtcccctggaaagttgatctaatagggcagttattcagctctgttttgtcattaggagaagcaagcccagggttggcaggtcttcacattgtttcaggaggagctagaaatccagatttttatttgaaatcctggatttttaaaacgttacaactgattaaagaaaatttgaaataaggtgagccaaacaaaacatgtccctgggttgccagattgtgtcctcctccctctctaaagttaggtaattttgtgattcagcagtggaaatgttagtggtcacaatcagggagagagtagagggagcaagcagtagaaaaatctcagccgctcttcagctgtctccccttgtattacaagggtggtggggagggatgtatttcattcacagaccaataggaaggtagtttgaagatgaacataagaattggaacctcagtgacagcttatgtctgggaacatgagttattccttcttgctgactccagtataaagcatatccattttacaggtgagaaaaagggttgctggcagagctgagaatgatgtgaactctagagtggggacctatctcttgcagaatctgcattagcatagagccagactctggacctctgagtgctgtgaagttgatagaaattaatggtgaatttcaaggacagatatcattaatatccatgttgaaactctgtggggtttaagcaaaagaacaatatcttcccccatcccacaaaatctgggtttaatctatctcacattgagttctgtgcatcagctctgcttagtactctagaaatagaaccggaatcacaactgaatctattttgcagaagccccaggagactttgggcactgatgatggtaaatgactttttactctattattatttctttttttttgagacagagtttcgctcttactgcgcaggctggagtgcaatggcacgatcttggctcactgcaacctccgcctcctgggttcaagtgattctcctgcctcagcctcctaagtagctgggattacaagcatctgccatgacacccaactaatttttatatttttagtagagacagggttccaccatgttggccaggctggtcttgaactcctgacctcaggtcatccacctgccttggcctcccaaagtgctgggattacaggcgtgagccaccacgcctggccgagtttttactttttatcgagcctgaacagataactattactgatctaatgaccatccccaccctacctcactttcagatctatccaatagcttcaaagggcaagtaattataatcatttgtgggaaaagttttattaaaaagtgacaaacttgaagctgtatatagtatgttctatttcagtttttagtggtgaatacagaagtcatcaaggtggtacttggtgccgctggaattttttttttttcctaggcagtcttgctctgtcatacaggctggagtacagtggcatcatcatgcagctggattttgacagcagaacttcaggcagtaattggagtcctaatgtcagttcttccttatggaggcctttatttggcctgagattttattcaactactttatagatgctgggtttattcatactatcgccagtttttataaaaatggaaaactagctcatcctttttgcaaaagaaagcaaagtggggagtcagaatgagaagtggataggggataactaaaactattctttactctcctttcattgcctttgagagctagctcttgcacacactgactttggcttccttagcgcataggtaagggaattgcctttccctcttttgtgaatattctcatttctgaaaaattctaagtcatgagaagataagccctatcctttcttacaaggattggatttcttgggtgacactgtggtgtggtggaagccagcggcttctttcaggttcataaaggccatcataacaacttcaggcttcatggtgtggacagggatccaggagagctgagtggatgtgtgaagtttctgatagattctgtcatcattccaaaggaatgtagtttcctccagctcaatcatttgaagtaatacacattgccaaatctgactgtaacctgacattttagacctattggagaaataggaagaaagcccctccagtggaaggactgcactccagcctgggcgacagagtgagactccatctcaaaaaaaaaagaat

SEQ ID NO: 438207 - DNA, 1394 bp, Homo sapiens
agcaccggaagccgctcccctgtgaggctgcggaccgggagcagcggccgcaggtccgggcgccatggctgcggagcggacccggccgctgcaaggctctggcggtccgagcgtgcctagtagctgtgaacccggcgcgaggtcccgggccccggggcgctcgctcaggtaaatttttccataaccttatggagagaaaggactttgagacatggcttgataacatttctgttacatttctttctctgacggacttgcagaaaaatgaaactctggatcacctgattagtctgagtggggcagtccagctcaggcatctctccaataacctagagactctcctcaagcgggacttcctcaaactccttcccctggagctcagtttttatttgttaaaatggctcgatcctcagactttactcacatgctgcctcgtctctaaacagtggaataaggtgataagtgcctgtacagaggtgtggcagactgcatgtaaaaatttgggctggcagatagatgattctgttcaggacgctttgcactggaagaaggtttatttgaaggctattttgagaatgaagcaactggaggaccatgaagcctttgaaacctcgtcattaattggacacagtgccagagtgtatgcactttactacaaagatggacttctctgtacagggtcagatgacttgtctgcaaagctgtgggatgtgagcacagggcagtgcgtttatggcatccagacccacacttgtgcagcggtgaagtttgatgaacagaagcttgtgacaggctcctttgacaacactgtggcttgctgggaatggagttccggagccaggacccagcactttcgggggcacacgggggcggtatttagcgtggactacaatgatgaactggatatcttggtgagcggctctgcagacttcactgtgaaagtatgggctttatctgctgggacatgcctgaacacactcaccgggcacacggaatgggtcaccaaggtaggaagacttggaagaagtctcctgcttatcaggctttttgagggagggcgtggaggatggtagacactgccttataagtgttaggtgagtcataagatggaattgctgtacctacaaagcataatggtacacaacagtgaccagcaagtagaaggtacttaatacatggtttaacaaataaatgacttatggacatggaaagttgcccacaatatattaggtggatagagggggcaaataaaacagattacatacaaaaaaatatgtagagtgtgataccggtttctgaatgtgttcatgcatcaaaatgttgaaggtgggtatttctggtgggattgtgggcgtgtttttccctttagaataaacatgtttctttcttaatca

SEQ ID NO: 438208 - DNA, 743 bp, Homo sapiens
agcaccggaagccgctcccctgtgaggctgcggaccgggagcagcggccgcaggtccgggtctgtatgcgaggcggggccggtcggggaggggactcttaggcgcccgcggctctgctgacccgccgcgccttggctgtttttctttccctgcaggcgccatggctgcggagcggacccggccgctgcaaggctctggcggtccgagcgtgcctagtagctgtgaacccggcgcgaggtcccgggccccggggcgctcgctcaggtcagtgccgcgcggaacacgattccgagagcaagggacctgggagcaacgaatgggttgatgggatctggattttagagacgggaaaacagggttttggagttactgcctcctactgcctccatttccttagctgcgaaatgagttaacagtgatgtcccagggctaccaaacgtttgaaagacgatgaagtgtgatgaggtggtttatgaagtacaaagcgctatactgcgccataattgtgggtatgccatgaaaacaggtgtgtatgtggggtgctgcttgaagtaaagcaaagataacaatattaatgctaagtaataatggtaactgacatttactgtaggcttacagcgtgccgagtactgtgctaaacgctttacttgcactgtcttgtttaaccctcataaaaacccttgtaggtaatgctcttggctgtattttacaagtgaggaaacagggcatgagacaggtgaagt

SEQ ID NO: 438209 - DNA, 2131 bp, Homo sapiens
  misc_feature (425)..(425): n is a, c, g, or t
gctcaaactccctctttcaggaaacacgtatgaggtttctactctgtatcaggcatcgtgctggagcctggggatatgtagattaatcgtgtatggtcactgtttctgggagctcaggttccctaggatagtacacacacaaaacccaagaggtgtcatgaaggaagcaccaagaaggaagaagttctacttaagggtgataaccaaggttccatagaggaagtaactctccaagagatttgtaagctagtagaaggattctagatacagactttctataaactgatactctttgtttgctggctctaggttgctaacctagatgcatggttggtggaactgtatcactcatcgggtctttattaaatataggaacacagaagacactgctagaacttgaaggcaaaaatcattaaacaactganaacacaaaatgagcaggttggtggtggtgccagcctggtttttaatctcttcaaatccacacaaagaacagcaactaggccaggcgcggtggctcacgcctgtaatcccagcactttgggaggccgaggcgggcggatcacgaggtcagaagatcaagaccatcctggctgacacggtgaaactccgtctctactaaaaatacaaaaagttagccgggcatggtggtatgcgcctgtagtcccagctactcgggaggttgaggcagaagaatcgcttgaacccaggaggcggagtttgggaggttgctgtgagctgagatcatgccactgcactccagcctgggcgtctctgtctcaaacaaacaaacaaacaaacaaaaaacccagcaactgaatagcaaaaccaagggcccagacagtactttcaacaaagctaggtacaaggtaacttcatgagccccagaatacagtagttgaggcgaaatacctattgccacaagaacatttttgtaggaggaaaatgaaggaaggaaaagagatagtatatgagaggcctgagaacaggagaatccaaaataggcaacaggtgatcaatggagagttgggctgccaatcctaaaatgtcagctgaagctgggagaggctctccaacagtggatgagaacaaggacctaaggcaagaacgcctgaaagggctggagcactgtagcccttataaacagttgaggctgatcggctctcttttaggacaaggccccacaccagggaaaactcctggggctaaaactcctgggagcaggacagggacaagagaggaaagtaagagatggcccagactcaagaaaggataaagacagaggcaggaaatgccagaaagcaacttgcaatatgtttgaatccatacataagagaagagggactgctctgagaaggttgaaaagcttgcctgaacatacactcattccaaaaagtcaggaaaacaaattttacataaaaataatataaaagtatcaagatcaaattctatacacagttattaagaaaaaaatgcgaagaaggagcagattaacatccttacagacaatgaaaacacaccagggagacaccataaaacagaccaagactaacttaaaaacaaatacatcagcctgggcatggtggttcacacctgtaatcccagcactttgggaggccaaggcaggctgatcacttgagcccaagagttcaagaccagcctgggcaatatgatgcaaccccatctctacaaaaaaaaaaaaaaaattagctgggcatggtggcatgtgcctatagtcccagctactcaggaagctgaggtggaaagatcacttgagcctggaaggtccaggctgcagtgagccatgtttgagcactgactccgggctggacaacagagtgagaccccatctcaaaaataataataataacagataaacagataatgatttaagagataaaagacagtgaaaaagaaagatatgtttaaataaaaaggaaatgaagagataaacaagatttgagggaaattgacaaatattgaaagcagcaaagatcaaacatacaggtaataggagttcctaaagaagaaaatcaagtaagggaggaacagaacaaatgccaaaagatataattcaagaaaacatttcagaaatttaaaaatgttgaaactacaattgaaagtataccaa

SEQ ID NO: 438210 - DNA, 6915 bp, Homo sapiens
agcaccggaagccgctcccctgtgaggctgcggaccgggagcagcggccgcaggtccgggcgccatggctgcggagcggacccggccgctgcaaggctctggcggtccgagcgtgcctagtagctgtgaacccggcgcgaggtcccgggccccggggcgctcgctcaggtaaatttttccataaccttatggagagaaaggactttgagacatggcttgataacatttctgttacatttctttctctgacggacttgcagaaaaatgaaactctggatcacctgattagtctgagtggggcagtccagctcaggcatctctccaataacctagagactctcctcaagcgggacttcctcaaactccttcccctggagctcagtttttatttgttaaaatggctcgatcctcagactttactcacatgctgcctcgtctctaaacagtggaataaggtgataagtgcctgtacagaggtgtggcagactgcatgtaaaaatttgggctggcagatagatgattctgttcaggacgctttgcactggaagaaggtttatttgaaggctattttgagaatgaagcaactggaggaccatgaagcctttgaaacctcgtcattaattggacacagtgccagagtgtatgcactttactacaaagatggacttctctgtacagggtcagatgacttgtctgcaaagctgtgggatgtgagcacagggcagtgcgtttatggcatccagacccacacttgtgcagcggtgaagtttgatgaacagaagcttgtgacaggctcctttgacaacactgtggcttgctgggaatggagttccggagccaggacccagcactttcgggggcacacgggggcggtatttagcgtggactacaatgatgaactggatatcttggtgagcggctctgcagacttcactgtgaaagtatgggctttatctgctgggacatgcctgaacacactcaccgggcacacggaatgggtcaccaaggtagttttgcagaagtgcaaagtcaagtctctcttgcacagtcctggagactacatcctcttaagtgcagacaaatatgagattaagatttggccaattgggagagaaatcaactgtaagtgcttaaagacattgtctgtctctgaggatagaagtatctgcctgcagccaagacttcattttgatggcaaatacattgtctgtagttcagcacttggtctctaccagtgggactttgccagttatgatattctcagggtcatcaagactcctgagatagcaaacttggccttgcttggctttggagatatctttgccctgctgtttgacaaccgctacctgtacatcatggacttgcggacagagagcctgattagtcgctggcctctgccagagtacaggaaatcaaagagaggctcaagcttcctggcaggcgaagcatcctggctgaatggactggatgggcacaatgacacgggcttggtctttgccaccagcatgcctgaccacagtattcacctggtgttgtggaaggagcacggctgacaccatgagccaccaccgctgactgactttgggtgccggggctgcgggttttgggtgcaacctctgcggcagccgactgcatgaaccaaagttctcacctaatggtatcatcacgcagtgcacaatcatttatctatgttttgccaggggccagggctcggggtgggggagggcttgttttattgacatacaacgcagcatgctaatggggtacaccattgacttcatttgtacttagttatgttggtcagtgttagaggatgcattttgggttcatctttcttgagtggagtattggttttaagtaaagaaagttaaatgatccattaatctgctaattggttgcctatgaaatcacattgtctgttattaaagctttttaccatagcctttttttcttttgaagttgaagcaaaggtgctatgatgttgttacagcaactttcctcacacggggtttagctcttataagagccagtgttaaaacttccaccaaataccagtttataaacttccaccaaataccagtgctaaggaaagtctgtcttccagttcaaatccaattctgtaaattgaatgttagcaactcattctaaaccttatatcttggcagagtcaaggttggccatgtttaagatgtgagcgagttctgtagtttttgttgccatgtcggggaagctagtccccggcagcctggatgactgcacagcggtgccctggtatagcagaaaagagcagtgagctggaaggttagagaccgggcctcttaccctggaactctgcaccctctctgggtcccagcttccttgtctgtacagccaggtatgaagctcagtgatttctaagattctttctggtccttcacctactgaaatgtgtaaaagttgatcatgtatttttgtctgatccctgattcatggtttctttcaggtcggataatatttaaatgaaatgactgttacagagttttctataagaacatcaattatatgaaaaggatgaataaaagggaaatgtagaaaatatagctgattccacttagacagtttaagtaattggttgaagaaatgctgatagaagccatggtttaaatagggacacagtatgctatactagaaggatacctgaacccaacctaacttcctcctttgcctctaacttaatctgcagcctcaggcaagttaactttctcttctaagaccatcattttcttcatcttttaagtgagggaattgtcctagatgagggctcacaaacccaaatgcctaagggagccgtgcaggtaacataaatgagtaaaacattctggggaggattgtgctgtcccctggaaagttgatctaatagggcagttattcagctctgttttgtcattaggagaagcaagcccagggttggcaggtcttcacattgtttcaggaggagctagaaatccagatttttatttgaaatcctggatttttaaaacgttacaactgattaaagaaaatttgaaataaggtgagccaaacaaaacatgtccctgggttgccagattgtgtcctcctccctctctaaagttaggtaattttgtgattcagcagtggaaatgttagtggtcacaatcagggagagagtagagggagcaagcagtagaaaaatctcagccgctcttcagctgtctccccttgtattacaagggtggtggggagggatgtatttcattcacagaccaataggaaggtagtttgaagatgaacataagaattggaacctcagtgacagcttatgtctgggaacatgagttattccttcttgctgactccagtataaagcatatccattttacaggtgagaaaaagggttgctggcagagctgagaatgatgtgaactctagagtggggacctatctcttgcagaatctgcattagcatagagccagactctggacctctgagtgctgtgaagttgatagaaattaatggtgaatttcaaggacagatatcattaatatccatgttgaaactctgtggggtttaagcaaaagaacaatatcttcccccatcccacaaaatctgggtttaatctatctcacattgagttctgtgcatcagctctgcttagtactctagaaatagaaccggaatcacaactgaatctattttgcagaagccccaggagactttgggcactgatgatggtaaatgactttttactctattattatttctttttttttgagacagagtttcgctcttactgcgcaggctggagtgcaatggcacgatcttggctcactgcaacctccgcctcctgggttcaagtgattctcctgcctcagcctcctaagtagctgggattacaagcatctgccatgacacccaactaatttttatatttttagtagagacagggttccaccatgttggccaggctggtcttgaactcctgacctcaggtcatccacctgccttggcctcccaaagtgctgggattacaggcgtgagccaccacgcctggccgagtttttactttttatcgagcctgaacagataactattactgatctaatgaccatccccaccctacctcactttcagatctatccaatagcttcaaagggcaagtaattataatcatttgtgggaaaagttttattaaaaagtgacaaacttgaagctgtatatagtatgttctatttcagtttttagtggtgaatacagaagtcatcaaggtggtacttggtgccgctggaattttttttttttcctaggcagtcttgctctgtcatacaggctggagtacagtggcatcatcatgcagctggattttgacagcagaacttcaggcagtaattggagtcctaatgtcagttcttccttatggaggcctttatttggcctgagattttattcaactactttatagatgctgggtttattcatactatcgccagtttttataaaaatggaaaactagctcatcctttttgcaaaagaaagcaaagtggggagtcagaatgagaagtggataggggataactaaaactattctttactctcctttcattgcctttgagagctagctcttgcacacactgactttggcttccttagcgcataggtaagggaattgcctttccctcttttgtgaatattctcatttctgaaaaattctaagtcatgagaagataagccctatcctttcttacaaggattggatttcttgggtgacactgtggtgtggtggaagccagcggcttctttcaggttcataaaggccatcataacaacttcaggcttcatggtgtggacagggatccaggagagctgagtggatgtgtgaagtttctgatagattctgtcatcattccaaaggaatgtagtttcctccagctcaatcatttgaagtaatacacattgccaaatctgactgtaacctgacattttagacctattggagaaataggaagaaagcccctccagtggaaggactggacttggaagaagttctgcaggaaggtgcatgcaattggatagctgttcatgagtgaaacgtggggaacattgctatgaaattgtaaggtttgcacttcatttttcgtagtttaaaaattgctctgttctggctgttgaaaacacttggtgtgaggtttgaatgaggattatataatcattctagtattcataggaaaatgattactgctctctatttgtaaaacaaaagaaataactttcggaaacagtattttagacatgaggaaattgtttgtattaggcattttgatctaacagaatcagctaaggatagtggatcctggctttacacatttctttgaccaaacccagctggcaacttgaagttgttactgtgtggcttccagattgcctagaggtgaatcctaccaacatcactgttttttttgttttgttttgttttttttgtatgtttttgagacagagtcttgctctatccccaggctggagtgcagtggcgtgatctcggcttactgcaacctcagcctcctgggttcaagcgattctcctgcctcagcctcctgagtagctgagactacaggcgcgtgccaccacgcccagctatttttgtatttttagtagagacgaggtttcactatgttggccaggatggtcttgatttcttgacctcgtgttctgcccgcctctacctcccaaagtgccgggattacaggcgtgagctgctgtgcccggccccagcatcacttttatagctttctgtgcctcttcctctgggccttggtgtatgaagccacttgcctttctctgttgggaagcgagcagaatcagattgctactcatgatgcagtccgggcagggcatactgtcacctttgcctgtggacacagttgtcaggataggggagaagccctttaggtccgtcttcttgacacagccctcctacctggttacgctggtgctttcgcttggtttagacaaccaagacacttgagaattatgctgtcctcagaatgtctgatgaaaagaacagattcacttttttgacacaatgcccattagccatctttggcagtgtttctgatcaaaggttccccatgcctgctctaggaaagtaaacttttttcagaataaatcctcaaatggattactgagtagtctttgcaccattcccatcagcctaatcagactgaatggtcacgctcagtgcaaaaagctgttttgctgttaggatgtttcagtgtttcttgtctttcctggaacagttcagttgtttaaatttagtaattcaatcctgaccagtgtaaacccacttaattattgcagcctaaagaattcagctacttctactcttcataaatgtgcccaagtaaatatgtgtttttaatattcaaccctggaaaattagtaattcagatgataaaagctcatgttttggtgtctttgtactcagattgtgaacaggcatatttcactgatttagacttagtatacttgatgagaatgctcaggttgaagagatagttctgtcagcaatccaacatctatagcaatgtggaaaaagtaatcaactcatatttcacgaatttgatgtatgttgtgatttagagggcatgagataaagtttatatttgaactgtgtggggtagggggaagaagaggttgcttaagcaaatagtggggtgattgtggaacaagatgtctctaagatgagaagttattttcttgcatcatagaagcactctttttacccgtgagtgattgtgttaactataaatcatttatatctgtacattaaagcagattccctcaattaggcaaatttggttagccaagcccaagttattgtttgtacttgaaagtaataaagctgcatttccttaaaaata

SEQ ID NO: 438211 - DNA, 7177 bp, Homo sapiens
agcaccggaagccgctcccctgtgaggctgcggaccgggagcagcggccgcaggtccgggcgccatggctgcggagcggacccggccgctgcaaggctctggcggtccgagcgtgcctagtagctgtgaacccggcgcgaggtcccgggccccggggcgctcgctcaggtcagtgccgcgcggaacacgattccgagagcaagggacctgggagcaacgaatgggttgatgggatctggattttagagacgggaaaacagggttttggagttactgcctcctactgcctccatttccttagctgcgaaatgagttaacagtgatgtcccagggctaccaaacgtttgaaagacgatgaagtgtgatgaggtggtttatgaagtacaaagcgctatactgcgccataattgtgggtatgccatgaaaacaggtaaatttttccataaccttatggagagaaaggactttgagacatggcttgataacatttctgttacatttctttctctgacggacttgcagaaaaatgaaactctggatcacctgattagtctgagtggggcagtccagctcaggcatctctccaataacctagagactctcctcaagcgggacttcctcaaactccttcccctggagctcagtttttatttgttaaaatggctcgatcctcagactttactcacatgctgcctcgtctctaaacagtggaataaggtgataagtgcctgtacagaggtgtggcagactgcatgtaaaaatttgggctggcagatagatgattctgttcaggacgctttgcactggaagaaggtttatttgaaggctattttgagaatgaagcaactggaggaccatgaagcctttgaaacctcgtcattaattggacacagtgccagagtgtatgcactttactacaaagatggacttctctgtacagggtcagatgacttgtctgcaaagctgtgggatgtgagcacagggcagtgcgtttatggcatccagacccacacttgtgcagcggtgaagtttgatgaacagaagcttgtgacaggctcctttgacaacactgtggcttgctgggaatggagttccggagccaggacccagcactttcgggggcacacgggggcggtatttagcgtggactacaatgatgaactggatatcttggtgagcggctctgcagacttcactgtgaaagtatgggctttatctgctgggacatgcctgaacacactcaccgggcacacggaatgggtcaccaaggtagttttgcagaagtgcaaagtcaagtctctcttgcacagtcctggagactacatcctcttaagtgcagacaaatatgagattaagatttggccaattgggagagaaatcaactgtaagtgcttaaagacattgtctgtctctgaggatagaagtatctgcctgcagccaagacttcattttgatggcaaatacattgtctgtagttcagcacttggtctctaccagtgggactttgccagttatgatattctcagggtcatcaagactcctgagatagcaaacttggccttgcttggctttggagatatctttgccctgctgtttgacaaccgctacctgtacatcatggacttgcggacagagagcctgattagtcgctggcctctgccagagtacaggaaatcaaagagaggctcaagcttcctggcaggcgaagcatcctggctgaatggactggatgggcacaatgacacgggcttggtctttgccaccagcatgcctgaccacagtattcacctggtgttgtggaaggagcacggctgacaccatgagccaccaccgctgactgactttgggtgccggggctgcgggttttgggtgcaacctctgcggcagccgactgcatgaaccaaagttctcacctaatggtatcatcacgcagtgcacaatcatttatctatgttttgccaggggccagggctcggggtgggggagggcttgttttattgacatacaacgcagcatgctaatggggtacaccattgacttcatttgtacttagttatgttggtcagtgttagaggatgcattttgggttcatctttcttgagtggagtattggttttaagtaaagaaagttaaatgatccattaatctgctaattggttgcctatgaaatcacattgtctgttattaaagctttttaccatagcctttttttcttttgaagttgaagcaaaggtgctatgatgttgttacagcaactttcctcacacggggtttagctcttataagagccagtgttaaaacttccaccaaataccagtttataaacttccaccaaataccagtgctaaggaaagtctgtcttccagttcaaatccaattctgtaaattgaatgttagcaactcattctaaaccttatatcttggcagagtcaaggttggccatgtttaagatgtgagcgagttctgtagtttttgttgccatgtcggggaagctagtccccggcagcctggatgactgcacagcggtgccctggtatagcagaaaagagcagtgagctggaaggttagagaccgggcctcttaccctggaactctgcaccctctctgggtcccagcttccttgtctgtacagccaggtatgaagctcagtgatttctaagattctttctggtccttcacctactgaaatgtgtaaaagttgatcatgtatttttgtctgatccctgattcatggtttctttcaggtcggataatatttaaatgaaatgactgttacagagttttctataagaacatcaattatatgaaaaggatgaataaaagggaaatgtagaaaatatagctgattccacttagacagtttaagtaattggttgaagaaatgctgatagaagccatggtttaaatagggacacagtatgctatactagaaggatacctgaacccaacctaacttcctcctttgcctctaacttaatctgcagcctcaggcaagttaactttctcttctaagaccatcattttcttcatcttttaagtgagggaattgtcctagatgagggctcacaaacccaaatgcctaagggagccgtgcaggtaacataaatgagtaaaacattctggggaggattgtgctgtcccctggaaagttgatctaatagggcagttattcagctctgttttgtcattaggagaagcaagcccagggttggcaggtcttcacattgtttcaggaggagctagaaatccagatttttatttgaaatcctggatttttaaaacgttacaactgattaaagaaaatttgaaataaggtgagccaaacaaaacatgtccctgggttgccagattgtgtcctcctccctctctaaagttaggtaattttgtgattcagcagtggaaatgttagtggtcacaatcagggagagagtagagggagcaagcagtagaaaaatctcagccgctcttcagctgtctccccttgtattacaagggtggtggggagggatgtatttcattcacagaccaataggaaggtagtttgaagatgaacataagaattggaacctcagtgacagcttatgtctgggaacatgagttattccttcttgctgactccagtataaagcatatccattttacaggtgagaaaaagggttgctggcagagctgagaatgatgtgaactctagagtggggacctatctcttgcagaatctgcattagcatagagccagactctggacctctgagtgctgtgaagttgatagaaattaatggtgaatttcaaggacagatatcattaatatccatgttgaaactctgtggggtttaagcaaaagaacaatatcttcccccatcccacaaaatctgggtttaatctatctcacattgagttctgtgcatcagctctgcttagtactctagaaatagaaccggaatcacaactgaatctattttgcagaagccccaggagactttgggcactgatgatggtaaatgactttttactctattattatttctttttttttgagacagagtttcgctcttactgcgcaggctggagtgcaatggcacgatcttggctcactgcaacctccgcctcctgggttcaagtgattctcctgcctcagcctcctaagtagctgggattacaagcatctgccatgacacccaactaatttttatatttttagtagagacagggttccaccatgttggccaggctggtcttgaactcctgacctcaggtcatccacctgccttggcctcccaaagtgctgggattacaggcgtgagccaccacgcctggccgagtttttactttttatcgagcctgaacagataactattactgatctaatgaccatccccaccctacctcactttcagatctatccaatagcttcaaagggcaagtaattataatcatttgtgggaaaagttttattaaaaagtgacaaacttgaagctgtatatagtatgttctatttcagtttttagtggtgaatacagaagtcatcaaggtggtacttggtgccgctggaattttttttttttcctaggcagtcttgctctgtcatacaggctggagtacagtggcatcatcatgcagctggattttgacagcagaacttcaggcagtaattggagtcctaatgtcagttcttccttatggaggcctttatttggcctgagattttattcaactactttatagatgctgggtttattcatactatcgccagtttttataaaaatggaaaactagctcatcctttttgcaaaagaaagcaaagtggggagtcagaatgagaagtggataggggataactaaaactattctttactctcctttcattgcctttgagagctagctcttgcacacactgactttggcttccttagcgcataggtaagggaattgcctttccctcttttgtgaatattctcatttctgaaaaattctaagtcatgagaagataagccctatcctttcttacaaggattggatttcttgggtgacactgtggtgtggtggaagccagcggcttctttcaggttcataaaggccatcataacaacttcaggcttcatggtgtggacagggatccaggagagctgagtggatgtgtgaagtttctgatagattctgtcatcattccaaaggaatgtagtttcctccagctcaatcatttgaagtaatacacattgccaaatctgactgtaacctgacattttagacctattggagaaataggaagaaagcccctccagtggaaggactggacttggaagaagttctgcaggaaggtgcatgcaattggatagctgttcatgagtgaaacgtggggaacattgctatgaaattgtaaggtttgcacttcatttttcgtagtttaaaaattgctctgttctggctgttgaaaacacttggtgtgaggtttgaatgaggattatataatcattctagtattcataggaaaatgattactgctctctatttgtaaaacaaaagaaataactttcggaaacagtattttagacatgaggaaattgtttgtattaggcattttgatctaacagaatcagctaaggatagtggatcctggctttacacatttctttgaccaaacccagctggcaacttgaagttgttactgtgtggcttccagattgcctagaggtgaatcctaccaacatcactgttttttttgttttgttttgttttttttgtatgtttttgagacagagtcttgctctatccccaggctggagtgcagtggcgtgatctcggcttactgcaacctcagcctcctgggttcaagcgattctcctgcctcagcctcctgagtagctgagactacaggcgcgtgccaccacgcccagctatttttgtatttttagtagagacgaggtttcactatgttggccaggatggtcttgatttcttgacctcgtgttctgcccgcctctacctcccaaagtgccgggattacaggcgtgagctgctgtgcccggccccagcatcacttttatagctttctgtgcctcttcctctgggccttggtgtatgaagccacttgcctttctctgttgggaagcgagcagaatcagattgctactcatgatgcagtccgggcagggcatactgtcacctttgcctgtggacacagttgtcaggataggggagaagccctttaggtccgtcttcttgacacagccctcctacctggttacgctggtgctttcgcttggtttagacaaccaagacacttgagaattatgctgtcctcagaatgtctgatgaaaagaacagattcacttttttgacacaatgcccattagccatctttggcagtgtttctgatcaaaggttccccatgcctgctctaggaaagtaaacttttttcagaataaatcctcaaatggattactgagtagtctttgcaccattcccatcagcctaatcagactgaatggtcacgctcagtgcaaaaagctgttttgctgttaggatgtttcagtgtttcttgtctttcctggaacagttcagttgtttaaatttagtaattcaatcctgaccagtgtaaacccacttaattattgcagcctaaagaattcagctacttctactcttcataaatgtgcccaagtaaatatgtgtttttaatattcaaccctggaaaattagtaattcagatgataaaagctcatgttttggtgtctttgtactcagattgtgaacaggcatatttcactgatttagacttagtatacttgatgagaatgctcaggttgaagagatagttctgtcagcaatccaacatctatagcaatgtggaaaaagtaatcaactcatatttcacgaatttgatgtatgttgtgatttagagggcatgagataaagtttatatttgaactgtgtggggtagggggaagaagaggttgcttaagcaaatagtggggtgattgtggaacaagatgtctctaagatgagaagttattttcttgcatcatagaagcactctttttacccgtgagtgattgtgttaactataaatcatttatatctgtacattaaagcagattccctcaattaggcaaatttggttagccaagcccaagttattgtttgtacttgaaagtaataaagctgcatttccttaaaaata

SEQ ID NO: 438212 - DNA, 9529 bp, Homo sapiens
agcaccggaagccgctcccctgtgaggctgcggaccgggagcagcggccgcaggtccgggcgccatggctgcggagcggacccggccgctgcaaggctctggcggtccgagcgtgcctagtagctgtgaacccggcgcgaggtcccgggccccggggcgctcgctcaggtaaatttttccataaccttatggagagaaaggactttgagacatggcttgataacatttctgttacatttctttctctgacggacttgcagaaaaatgaaactctggatcacctgattagtctgagtggggcagtccagctcaggcatctctccaataacctagagactctcctcaagcgggacttcctcaaactccttcccctggagctcagtttttatttgttaaaatggctcgatcctcagactttactcacatgctgcctcgtctctaaacagtggaataaggtgataagtgcctgtacagaggtgtggcagactgcatgtaaaaatttgggctggcagatagatgattctgttcaggacgctttgcactggaagaaggtttatttgaaggctattttgagaatgaagcaactggaggaccatgaagcctttgaaacctcgtcattaattggacacagtgccagagtgtatgcactttactacaaagatggacttctctgtacagggtcagatgacttgtctgcaaagctgtgggatgtgagcacagggcagtgcgtttatggcatccagacccacacttgtgcagcggtgaagtttgatgaacagaagcttgtgacaggctcctttgacaacactgtggcttgctgggaatggagttccggagccaggacccagcactttcgggggcacacgggggcggtatttagcgtggactacaatgatgaactggatatcttggtgagcggctctgcagacttcactgtgaaagtatgggctttatctgctgggacatgcctgaacacactcaccgggcacacggaatgggtcaccaaggtagttttgcagaagtgcaaagtcaagtctctcttgcacagtcctggagactacatcctcttaagtgcagacaaatatgagattaagatttggccaattgggagagaaatcaactgtaagtgcttaaagacattgtctgtctctgaggatagaagtatctgcctgcagccaagacttcattttgatggcaaatacattgtctgtagttcagcacttggtctctaccagtgggactttgccagttatgatattctcagggtcatcaagactcctgagatagcaaacttggccttgcttggctttggagatatctttgccctgctgtttgacaaccgctacctgtacatcatggacttgcggacagagagcctgattagtcgctggcctctgccagagtacaggaaatcaaagagaggctcaagcttcctggcaggcgaagcatcctggctgaatggactggatgggcacaatgacacgggcttggtctttgccaccagcatgcctgaccacagtattcacctggtgttgtggaaggagcacggctgacaccatgagccaccaccgctgactgactttgggtgccggggctgcgggttttgggtgcaacctctgcggcagccgactgcatgaaccaaagttctcacctaatggtatcatcacgcagtgcacaatcatttatctatgttttgccaggggccagggctcggggtgggggagggcttgttttattgacatacaacgcagcatgctaatggggtacaccattgacttcatttgtacttagttatgttggtcagtgttagaggatgcattttgggttcatctttcttgagtggagtattggttttaagtaaagaaagttaaatgatccattaatctgctaattggttgcctatgaaatcacattgtctgttattaaagctttttaccatagcctttttttcttttgaagttgaagcaaaggtgctatgatgttgttacagcaactttcctcacacggggtttagctcttataagagccagtgttaaaacttccaccaaataccagtttataaacttccaccaaataccagtgctaaggaaagtctgtcttccagttcaaatccaattctgtaaattgaatgttagcaactcattctaaaccttatatcttggcagagtcaaggttggccatgtttaagatgtgagcgagttctgtagtttttgttgccatgtcggggaagctagtccccggcagcctggatgactgcacagcggtgccctggtatagcagaaaagagcagtgagctggaaggttagagaccgggcctcttaccctggaactctgcaccctctctgggtcccagcttccttgtctgtacagccaggtatgaagctcagtgatttctaagattctttctggtccttcacctactgaaatgtgtaaaagttgatcatgtatttttgtctgatccctgattcatggtttctttcaggtcggataatatttaaatgaaatgactgttacagagttttctataagaacatcaattatatgaaaaggatgaataaaagggaaatgtagaaaatatagctgattccacttagacagtttaagtaattggttgaagaaatgctgatagaagccatggtttaaatagggacacagtatgctatactagaaggatacctgaacccaacctaacttcctcctttgcctctaacttaatctgcagcctcaggcaagttaactttctcttctaagaccatcattttcttcatcttttaagtgagggaattgtcctagatgagggctcacaaacccaaatgcctaagggagccgtgcaggtaacataaatgagtaaaacattctggggaggattgtgctgtcccctggaaagttgatctaatagggcagttattcagctctgttttgtcattaggagaagcaagcccagggttggcaggtcttcacattgtttcaggaggagctagaaatccagatttttatttgaaatcctggatttttaaaacgttacaactgattaaagaaaatttgaaataaggtgagccaaacaaaacatgtccctgggttgccagattgtgtcctcctccctctctaaagttaggtaattttgtgattcagcagtggaaatgttagtggtcacaatcagggagagagtagagggagcaagcagtagaaaaatctcagccgctcttcagctgtctccccttgtattacaagggtggtggggagggatgtatttcattcacagaccaataggaaggtagtttgaagatgaacataagaattggaacctcagtgacagcttatgtctgggaacatgagttattccttcttgctgactccagtataaagcatatccattttacaggtgagaaaaagggttgctggcagagctgagaatgatgtgaactctagagtggggacctatctcttgcagaatctgcattagcatagagccagactctggacctctgagtgctgtgaagttgatagaaattaatggtgaatttcaaggacagatatcattaatatccatgttgaaactctgtggggtttaagcaaaagaacaatatcttcccccatcccacaaaatctgggtttaatctatctcacattgagttctgtgcatcagctctgcttagtactctagaaatagaaccggaatcacaactgaatctattttgcagaagccccaggagactttgggcactgatgatggtaaatgactttttactctattattatttctttttttttgagacagagtttcgctcttactgcgcaggctggagtgcaatggcacgatcttggctcactgcaacctccgcctcctgggttcaagtgattctcctgcctcagcctcctaagtagctgggattacaagcatctgccatgacacccaactaatttttatatttttagtagagacagggttccaccatgttggccaggctggtcttgaactcctgacctcaggtcatccacctgccttggcctcccaaagtgctgggattacaggcgtgagccaccacgcctggccgagtttttactttttatcgagcctgaacagataactattactgatctaatgaccatccccaccctacctcactttcagatctatccaatagcttcaaagggcaagtaattataatcatttgtgggaaaagttttattaaaaagtgacaaacttgaagctgtatatagtatgttctatttcagtttttagtggtgaatacagaagtcatcaaggtggtacttggtgccgctggaattttttttttttcctaggcagtcttgctctgtcatacaggctggagtacagtggcatcatcatgcagctggattttgacagcagaacttcaggcagtaattggagtcctaatgtcagttcttccttatggaggcctttatttggcctgagattttattcaactactttatagatgctgggtttattcatactatcgccagtttttataaaaatggaaaactagctcatcctttttgcaaaagaaagcaaagtggggagtcagaatgagaagtggataggggataactaaaactattctttactctcctttcattgcctttgagagctagctcttgcacacactgactttggcttccttagcgcataggtaagggaattgcctttccctcttttgtgaatattctcatttctgaaaaattctaagtcatgagaagataagccctatcctttcttacaaggattggatttcttgggtgacactgtggtgtggtggaagccagcggcttctttcaggttcataaaggccatcataacaacttcaggcttcatggtgtggacagggatccaggagagctgagtggatgtgtgaagtttctgatagattctgtcatcattccaaaggaatgtagtttcctccagctcaatcatttgaagtaatacacattgccaaatctgactgtaacctgacattttagacctattggagaaataggaagaaagcccctccagtggaaggactggacttggaagaagttctgcaggaaggtgcatgcaattggatagctgttcatgagtgaaacgtggggaacattgctatgaaattgtaaggtttgcacttcatttttcgtagtttaaaaattgctctgttctggctgttgaaaacacttggtgtgaggtttgaatgaggattatataatcattctagtattcataggaaaatgattactgctctctatttgtaaaacaaaagaaataactttcggaaacagtattttagacatgaggaaattgtttgtattaggcattttgatctaacagaatcagctaaggatagtggatcctggctttacacatttctttgaccaaacccagctggcaacttgaagttgttactgtgtggcttccagattgcctagaggtgaatcctaccaacatcactgttttttttgttttgttttgttttttttgtatgtttttgagacagagtcttgctctatccccaggctggagtgcagtggcgtgatctcggcttactgcaacctcagcctcctgggttcaagcgattctcctgcctcagcctcctgagtagctgagactacaggcgcgtgccaccacgcccagctatttttgtatttttagtagagacgaggtttcactatgttggccaggatggtcttgatttcttgacctcgtgttctgcccgcctctacctcccaaagtgccgggattacaggcgtgagctgctgtgcccggccccagcatcacttttatagctttctgtgcctcttcctctgggccttggtgtatgaagccacttgcctttctctgttgggaagcgagcagaatcagattgctactcatgatgcagtccgggcagggcatactgtcacctttgcctgtggacacagttgtcaggataggggagaagccctttaggtccgtcttcttgacacagccctcctacctggttacgctggtgctttcgcttggtttagacaaccaagacacttgagaattatgctgtcctcagaatgtctgatgaaaagaacagattcacttttttgacacaatgcccattagccatctttggcagtgtttctgatcaaaggttccccatgcctgctctaggaaagtaaacttttttcagaataaatcctcaaatggattactgagtagtctttgcaccattcccatcagcctaatcagactgaatggtcacgctcagtgcaaaaagctgttttgctgttaggatgtttcagtgtttcttgtctttcctggaacagttcagttgtttaaatttagtaattcaatcctgaccagtgtaaacccacttaattattgcagcctaaagaattcagctacttctactcttcataaatgtgcccaagtaaatatgtgtttttaatattcaaccctggaaaattagtaattcagatgataaaagctcatgttttggtgtctttgtactcagattgtgaacaggcatatttcactgatttagacttagtatacttgatgagaatgctcaggttgaagagatagttctgtcagcaatccaacatctatagcaatgtggaaaaagtaatcaactcatatttcacgaatttgatgtatgttgtgatttagagggcatgagataaagtttatatttgaactgtgtggggtagggggaagaagaggttgcttaagcaaatagtggggtgattgtggaacaagatgtctctaagatgagaagttattttcttgcatcatagaagcactctttttacccgtgagtgattgtgttaactataaatcatttatatctgtacattaaagcagattccctcaattaggcaaatttggttagccaagcccaagttattgtttgtacttgaaagtaataaagctgcatttccttaaaaatatattctgtagttaagactttgtcttgctttccccccaaccacttcagacattttatccaaccaatgcagggacttttcaaaagtcagtgtgtttttgaaaatagaacaaccccttgagtgatctgaggtggctctgtttttttactgtttctgcatcttctagaaggtaaactcaacaatataaccatttctgaaggtgatccaaaaagcaaaacaataaaggtaaaacacaaggaaataattttggtgaatttcatgaatagttgcaaatgaagggatggggtgggtaaaagtcccattttgcttccagaccttggaatagtcttcctctcttttgcccaaggatgtgtctatccagcacatctttgcatgagttctttcttactaacttaaacttacggggcttcttgtcatttgagtaccacggccctgcacctttgatcccctgacagcatcattaagggcagattgtcattcctgttttacagatgagaaagctgtggcttggtaaagtgattcattgcctagaggagttatagtaagtggtgaggctgaagccctgattttcagcccccacacacctggattttttccatgttttcatgtttgtctgttctttctgtatttcaagtctcttcaaatcccgactgctgccttctgccttcaccacttgtgtgcactgttcaacctgtcttatgctttgcttccagggagtctccccaaccacttctttgagcacttacttgctcttgttcaatcttggtaactctccgttaccatcagggcacatctggattccttaacatcatggagccctagctaatttcttcgagcaaacagttcttgctcctctatttatttccacccttgcgctttgggtgttaatctcccatcctcgtggaaagttcttgatgttcctttccaccagtcctagggccaggctttaatcccattgatctcccactatctttaaagcctctgctgaccaccataccccactccagcctcactgagcatttttgtgtaaggttagtggtgcagttcatttagcaataaatactgttgtaccttttgcagtagacaactattaactttcatccttgattctcagttttttccaaaatacaagtgaatacctggtttccccagcaacattgtaagattgagagtaggaattcattgagattttaatgaattccatggattgtcttaagagctatctaaacttggaagaaaaataacttccagagcatctaaaattgaaaataaaagatcagaagcaaatgaaagatcaattccacacagcttttcctctcttagacgtccctcttctgccatatcctgtaaacatctgaagtgttctgagtacatttggagagaatatttaatgatcacactgtgattagacatgagtagtccctgccagtgggatgttcctgtcctttgcattttaaccacatgttctgtgctctctgtggtaaagataatctaacagtaataaaaacttatggagaaaattacccagagctcctttatcattacgatttttaatactctcttctaatccttatgcacatgtgtatggatttatgtactgcaaatcattgttttgtaatacattctcaaaaatgtgctttaggtttttacaactaccataatattttgtaattttccttcattactgtaatttgctaaaccatttctgttttggtagataattaggtagtttccagttctgctttttagaagatactacagagaacttctttgtgcatatttccttagaacaagttccagtagaagacttactcgcaaaagcagtggaattttttcttagtattttctgttacaggtacagaagagtgcatacaacacacagttttgtcgaatagttatgaagtgaacacttgtctaaccactgcccgagtcaagaaagaacatttctaaacatgtttgccaatttaatagatataaaggaagtatctcaaggttgctttaactgacatttctttaacacatgacaacatatttttatgggggaggggactagagagaaaatgacatatttttatgtgtgcttatttgtatctcttgaattctgtctgcatcttttacccattacactttcaaatacttgtgaaatcattggtcgagatgaattatggctataaataaaatttcactaatctaaaaaaaaaaaaaaaaaaaaaaaaaaaaaaaaaaaaaaaaaaaaaaaaaaaacaaaaaaaaaaaaaaaaaaaaaaaaaaaaaaaacaaaacaaacacacaacaaacaagaaaaaacaaaaaaaaaaaaaaaaaaagggggggggggcgacaaaatcatcacacggggggggagaaagtcagccccgctgttgtaagaggggcccgccaaggaagaggagcaacttaaaagagaaaccgacgcgggacgggcaaacaacaacagcaggaggcgaaagacaacacgcggtggagcaagggagaggaaacacccacccgggggggggaataaaaggacaacaaccaggataaaagccggacagaaaaaaaacaagagagatgagagcacacacagccggcggcgagaagaggcgagaatgaaaaaaac

SEQ ID NO: 438213 - DNA, 7627 bp, Homo sapiens
agcaccggaagccgctcccctgtgaggctgcggaccgggagcagcggccgcaggtccgggcgccatggctgcggagcggacccggccgctgcaaggctctggcggtccgagcgtgcctagtagctgtgaacccggcgcgaggtcccgggccccggggcgctcgctcaggtaaatttttccataaccttatggagagaaaggactttgagacatggcttgataacatttctgttacatttctttctctgacggacttgcagaaaaatgaaactctggatcacctgattagtctgagtggggcagtccagctcaggcatctctccaataacctagagactctcctcaagcgggacttcctcaaactccttcccctggagctcagtttttatttgttaaaatggctcgatcctcagactttactcacatgctgcctcgtctctaaacagtggaataaggtgataagtgcctgtacagaggtgtggcagactgcatgtaaaaatttgggctggcagatagatgattctgttcaggacgctttgcactggaagaaggtttatttgaaggctattttgagaatgaagcaactggaggaccatgaagcctttgaaacctcgtcattaattggacacagtgccagagtgtatgcactttactacaaagatggacttctctgtacagggtcagatgacttgtctgcaaagctgtgggatgtgagcacagggcagtgcgtttatggcatccagacccacacttgtgcagcggtgaagtttgatgaacagaagcttgtgacaggctcctttgacaacactgtggcttgctgggaatggagttccggagccaggacccagcactttcgggggcacacgggggcggtatttagcgtggactacaatgatgaactggatatcttggtgagcggctctgcagacttcactgtgaaagtatgggctttatctgctgggacatgcctgaacacactcaccgggcacacggaatgggtcaccaaggtagttttgcagaagtgcaaagtcaagtctctcttgcacagtcctggagactacatcctcttaagtgcagacaaatatgagattaagatttggccaattgggagagaaatcaactgtaagtgcttaaagacattgtctgtctctgaggatagaagtatctgcctgcagccaagacttcattttgatggcaaatacattgtctgtagttcagcacttggtctctaccagtgggactttgccagttatgatattctcagggtcatcaagactcctgagatagcaaacttggccttgcttggctttggagatatctttgccctgctgtttgacaaccgctacctgtacatcatggacttgcggacagagagcctgattagtcgctggcctctgccagagtacaggaaatcaaagagaggctcaagcttcctggcaggcgaagcatcctggctgaatggactggatgggcacaatgacacgggcttggtctttgccaccagcatgcctgaccacagtattcacctggtgttgtggaaggagcacggctgacaccatgagccaccaccgctgactgactttgggtgccggggctgcgggttttgggtgcaacctctgcggcagccgactgcatgaaccaaagttctcacctaatggtatcatcacgcagtgcacaatcatttatctatgttttgccaggggccagggctcggggtgggggagggcttgttttattgacatacaacgcagcatgctaatggggtacaccattgacttcatttgtacttagttatgttggtcagtgttagaggatgcattttgggttcatctttcttgagtggagtattggttttaagtaaagaaagttaaatgatccattaatctgctaattggttgcctatgaaatcacattgtctgttattaaagctttttaccatagcctttttttcttttgaagttgaagcaaaggtgctatgatgttgttacagcaactttcctcacacggggtttagctcttataagagccagtgttaaaacttccaccaaataccagtttataaacttccaccaaataccagtgctaaggaaagtctgtcttccagttcaaatccaattctgtaaattgaatgttagcaactcattctaaaccttatatcttggcagagtcaaggttggccatgtttaagatgtgagcgagttctgtagtttttgttgccatgtcggggaagctagtccccggcagcctggatgactgcacagcggtgccctggtatagcagaaaagagcagtgagctggaaggttagagaccgggcctcttaccctggaactctgcaccctctctgggtcccagcttccttgtctgtacagccaggtatgaagctcagtgatttctaagattctttctggtccttcacctactgaaatgtgtaaaagttgatcatgtatttttgtctgatccctgattcatggtttctttcaggtcggataatatttaaatgaaatgactgttacagagttttctataagaacatcaattatatgaaaaggatgaataaaagggaaatgtagaaaatatagctgattccacttagacagtttaagtaattggttgaagaaatgctgatagaagccatggtttaaatagggacacagtatgctatactagaaggatacctgaacccaacctaacttcctcctttgcctctaacttaatctgcagcctcaggcaagttaactttctcttctaagaccatcattttcttcatcttttaagtgagggaattgtcctagatgagggctcacaaacccaaatgcctaagggagccgtgcaggtaacataaatgagtaaaacattctggggaggattgtgctgtcccctggaaagttgatctaatagggcagttattcagctctgttttgtcattaggagaagcaagcccagggttggcaggtcttcacattgtttcaggaggagctagaaatccagatttttatttgaaatcctggatttttaaaacgttacaactgattaaagaaaatttgaaataaggtgagccaaacaaaacatgtccctgggttgccagattgtgtcctcctccctctctaaagttaggtaattttgtgattcagcagtggaaatgttagtggtcacaatcagggagagagtagagggagcaagcagtagaaaaatctcagccgctcttcagctgtctccccttgtattacaagggtggtggggagggatgtatttcattcacagaccaataggaaggtagtttgaagatgaacataagaattggaacctcagtgacagcttatgtctgggaacatgagttattccttcttgctgactccagtataaagcatatccattttacaggtgagaaaaagggttgctggcagagctgagaatgatgtgaactctagagtggggacctatctcttgcagaatctgcattagcatagagccagactctggacctctgagtgctgtgaagttgatagaaattaatggtgaatttcaaggacagatatcattaatatccatgttgaaactctgtggggtttaagcaaaagaacaatatcttcccccatcccacaaaatctgggtttaatctatctcacattgagttctgtgcatcagctctgcttagtactctagaaatagaaccggaatcacaactgaatctattttgcagaagccccaggagactttgggcactgatgatggtaaatgactttttactctattattatttctttttttttgagacagagtttcgctcttactgcgcaggctggagtgcaatggcacgatcttggctcactgcaacctccgcctcctgggttcaagtgattctcctgcctcagcctcctaagtagctgggattacaagcatctgccatgacacccaactaatttttatatttttagtagagacagggttccaccatgttggccaggctggtcttgaactcctgacctcaggtcatccacctgccttggcctcccaaagtgctgggattacaggcgtgagccaccacgcctggccgagtttttactttttatcgagcctgaacagataactattactgatctaatgaccatccccaccctacctcactttcagatctatccaatagcttcaaagggcaagtaattataatcatttgtgggaaaagttttattaaaaagtgacaaacttgaagctgtatatagtatgttctatttcagtttttagtggtgaatacagaagtcatcaaggtggtacttggtgccgctggaattttttttttttcctaggcagtcttgctctgtcatacaggctggagtacagtggcatcatcatgcagctggattttgacagcagaacttcaggcagtaattggagtcctaatgtcagttcttccttatggaggcctttatttggcctgagattttattcaactactttatagatgctgggtttattcatactatcgccagtttttataaaaatggaaaactagctcatcctttttgcaaaagaaagcaaagtggggagtcagaatgagaagtggataggggataactaaaactattctttactctcctttcattgcctttgagagctagctcttgcacacactgactttggcttccttagcgcataggtaagggaattgcctttccctcttttgtgaatattctcatttctgaaaaattctaagtcatgagaagataagccctatcctttcttacaaggattggatttcttgggtgacactgtggtgtggtggaagccagcggcttctttcaggttcataaaggccatcataacaacttcaggcttcatggtgtggacagggatccaggagagctgagtggatgtgtgaagtttctgatagattctgtcatcattccaaaggaatgtagtttcctccagctcaatcatttgaagtaatacacattgccaaatctgactgtaacctgacattttagacctattggagaaataggaagaaagcccctccagtggaaggactggacttggaagaagttctgcaggaaggtgcatgcaattggatagctgttcatgagtgaaacgtggggaacattgctatgaaattgtaaggtttgcacttcatttttcgtagtttaaaaattgctctgttctggctgttgaaaacacttggtgtgaggtttgaatgaggattatataatcattctagtattcataggaaaatgattactgctctctatttgtaaaacaaaagaaataactttcggaaacagtattttagacatgaggaaattgtttgtattaggcattttgatctaacagaatcagctaaggatagtggatcctggctttacacatttctttgaccaaacccagctggcaacttgaagttgttactgtgtggcttccagattgcctagaggtgaatcctaccaacatcactgttttttttgttttgttttgttttttttgtatgtttttgagacagagtcttgctctatccccaggctggagtgcagtggcgtgatctcggcttactgcaacctcagcctcctgggttcaagcgattctcctgcctcagcctcctgagtagctgagactacaggcgcgtgccaccacgcccagctatttttgtatttttagtagagacgaggtttcactatgttggccaggatggtcttgatttcttgacctcgtgttctgcccgcctctacctcccaaagtgccgggattacaggcgtgagctgctgtgcccggccccagcatcacttttatagctttctgtgcctcttcctctgggccttggtgtatgaagccacttgcctttctctgttgggaagcgagcagaatcagattgctactcatgatgcagtccgggcagggcatactgtcacctttgcctgtggacacagttgtcaggataggggagaagccctttaggtccgtcttcttgacacagccctcctacctggttacgctggtgctttcgcttggtttagacaaccaagacacttgagaattatgctgtcctcagaatgtctgatgaaaagaacagattcacttttttgacacaatgcccattagccatctttggcagtgtttctgatcaaaggttccccatgcctgctctaggaaagtaaacttttttcagaataaatcctcaaatggattactgagtagtctttgcaccattcccatcagcctaatcagactgaatggtcacgctcagtgcaaaaagctgttttgctgttaggatgtttcagtgtttcttgtctttcctggaacagttcagttgtttaaatttagtaattcaatcctgaccagtgtaaacccacttaattattgcagcctaaagaattcagctacttctactcttcataaatgtgcccaagtaaatatgtgtttttaatattcaaccctggaaaattagtaattcagatgataaaagctcatgttttggtgtctttgtactcagattgtgaacaggcatatttcactgatttagacttagtatacttgatgagaatgctcaggttgaagagatagttctgtcagcaatccaacatctatagcaatgtggaaaaagtaatcaactcatatttcacgaatttgatgtatgttgtgatttagagggcatgagataaagtttatatttgaactgtgtggggtagggggaagaagaggttgcttaagcaaatagtggggtgattgtggaacaagatgtctctaagatgagaagttattttcttgcatcatagaagcactctttttacccgtgagtgattgtgttaactataaatcatttatatctgtacattaaagcagattccctcaattaggcaaatttggttagccaagcccaagttattgtttgtacttgaaagtaataaagctgcatttccttaaaaatatattctgtagttaagactttgtcttgctttccccccaaccacttcagacattttatccaaccaatgcagggacttttcaaaagtcagtgtgtttttgaaaatagaacaaccccttgagtgatctgaggtggctctgtttttttactgtttctgcatcttctagaaggtaaactcaacaatataaccatttctgaaggtgatccaaaaagcaaaacaataaaggtaaaacacaaggaaataattttggtgaatttcatgaatagttgcaaatgaagggatggggtgggtaaaagtcccattttgcttccagaccttggaatagtcttcctctcttttgcccaaggatgtgtctatccagcacatctttgcatgagttctttcttactaacttaaacttacggggcttcttgtcatttgagtaccacggccctgcacctttgatcccctgacagcatcattaagggcagattgtcattcctgttttacagatgagaaagctgtggcttggtaaagtgattcattgcctagaggagttatagtaagtggtgaggctgaagccctgattttcagcccccacacacctggattttttccatgttttcatgtttgtctgttctttctgtatttcaagtctcttcaaatcccgactgctgcacattcactgccagcagatctcgtcgtgcaacatgataaatgacaggggcacctcctc

SEQ ID NO: 438214 - DNA, 6081 bp, Homo sapiens
tgcttctgccgtctacggccataccaccctgaacgcgcccgatctcgtctgatctcggaagctagagcagggtcttggtgagcggctctgcagacttcactgtgaaagtatgggctttatctgctgggacatgcctgaacacactcaccgggcacacggaatgggtcaccaaggtagttttgcagaagtgcaaagtcaagtctctcttgcacagtcctggagactacatcctcttaagtgcagacaaatatgagattaagatttggccaattgggagagaaatcaactgtaagtgcttaaagacattgtctgtctctgaggatagaagtatctgcctgcagccaagacttcattttgatggcaaatacattgtctgtagttcagcacttggtctctaccagtgggactttgccagttatgatattctcagggtcatcaagactcctgagatagcaaacttggccttgcttggctttggagatatctttgccctgctgtttgacaaccgctacctgtacatcatggacttgcggacagagagcctgattagtcgctggcctctgccagagtacaggaaatcaaagagaggctcaagcttcctggcaggcgaagcatcctggctgaatggactggatgggcacaatgacacgggcttggtctttgccaccagcatgcctgaccacagtattcacctggtgttgtggaaggagcacggctgacaccatgagccaccaccgctgactgactttgggtgccggggctgcgggttttgggtgcaacctctgcggcagccgactgcatgaaccaaagttctcacctaatggtatcatcacgcagtgcacaatcatttatctatgttttgccaggggccagggctcggggtgggggagggcttgttttattgacatacaacgcagcatgctaatggggtacaccattgacttcatttgtacttagttatgttggtcagtgttagaggatgcattttgggttcatctttcttgagtggagtattggttttaagtaaagaaagttaaatgatccattaatctgctaattggttgcctatgaaatcacattgtctgttattaaagctttttaccatagcctttttttcttttgaagttgaagcaaaggtgctatgatgttgttacagcaactttcctcacacggggtttagctcttataagagccagtgttaaaacttccaccaaataccagtttataaacttccaccaaataccagtgctaaggaaagtctgtcttccagttcaaatccaattctgtaaattgaatgttagcaactcattctaaaccttatatcttggcagagtcaaggttggccatgtttaagatgtgagcgagttctgtagtttttgttgccatgtcggggaagctagtccccggcagcctggatgactgcacagcggtgccctggtatagcagaaaagagcagtgagctggaaggttagagaccgggcctcttaccctggaactctgcaccctctctgggtcccagcttccttgtctgtacagccaggtatgaagctcagtgatttctaagattctttctggtccttcacctactgaaatgtgtaaaagttgatcatgtatttttgtctgatccctgattcatggtttctttcaggtcggataatatttaaatgaaatgactgttacagagttttctataagaacatcaattatatgaaaaggatgaataaaagggaaatgtagaaaatatagctgattccacttagacagtttaagtaattggttgaagaaatgctgatagaagccatggtttaaatagggacacagtatgctatactagaaggatacctgaacccaacctaacttcctcctttgcctctaacttaatctgcagcctcaggcaagttaactttctcttctaagaccatcattttcttcatcttttaagtgagggaattgtcctagatgagggctcacaaacccaaatgcctaagggagccgtgcaggtaacataaatgagtaaaacattctggggaggattgtgctgtcccctggaaagttgatctaatagggcagttattcagctctgttttgtcattaggagaagcaagcccagggttggcaggtcttcacattgtttcaggaggagctagaaatccagatttttatttgaaatcctggatttttaaaacgttacaactgattaaagaaaatttgaaataaggtgagccaaacaaaacatgtccctgggttgccagattgtgtcctcctccctctctaaagttaggtaattttgtgattcagcagtggaaatgttagtggtcacaatcagggagagagtagagggagcaagcagtagaaaaatctcagccgctcttcagctgtctccccttgtattacaagggtggtggggagggatgtatttcattcacagaccaataggaaggtagtttgaagatgaacataagaattggaacctcagtgacagcttatgtctgggaacatgagttattccttcttgctgactccagtataaagcatatccattttacaggtgagaaaaagggttgctggcagagctgagaatgatgtgaactctagagtggggacctatctcttgcagaatctgcattagcatagagccagactctggacctctgagtgctgtgaagttgatagaaattaatggtgaatttcaaggacagatatcattaatatccatgttgaaactctgtggggtttaagcaaaagaacaatatcttcccccatcccacaaaatctgggtttaatctatctcacattgagttctgtgcatcagctctgcttagtactctagaaatagaaccggaatcacaactgaatctattttgcagaagccccaggagactttgggcactgatgatggtaaatgactttttactctattattatttctttttttttgagacagagtttcgctcttactgcgcaggctggagtgcaatggcacgatcttggctcactgcaacctccgcctcctgggttcaagtgattctcctgcctcagcctcctaagtagctgggattacaagcatctgccatgacacccaactaatttttatatttttagtagagacagggttccaccatgttggccaggctggtcttgaactcctgacctcaggtcatccacctgccttggcctcccaaagtgctgggattacaggcgtgagccaccacgcctggccgagtttttactttttatcgagcctgaacagataactattactgatctaatgaccatccccaccctacctcactttcagatctatccaatagcttcaaagggcaagtaattataatcatttgtgggaaaagttttattaaaaagtgacaaacttgaagctgtatatagtatgttctatttcagtttttagtggtgaatacagaagtcatcaaggtggtacttggtgccgctggaattttttttttttcctaggcagtcttgctctgtcatacaggctggagtacagtggcatcatcatgcagctggattttgacagcagaacttcaggcagtaattggagtcctaatgtcagttcttccttatggaggcctttatttggcctgagattttattcaactactttatagatgctgggtttattcatactatcgccagtttttataaaaatggaaaactagctcatcctttttgcaaaagaaagcaaagtggggagtcagaatgagaagtggataggggataactaaaactattctttactctcctttcattgcctttgagagctagctcttgcacacactgactttggcttccttagcgcataggtaagggaattgcctttccctcttttgtgaatattctcatttctgaaaaattctaagtcatgagaagataagccctatcctttcttacaaggattggatttcttgggtgacactgtggtgtggtggaagccagcggcttctttcaggttcataaaggccatcataacaacttcaggcttcatggtgtggacagggatccaggagagctgagtggatgtgtgaagtttctgatagattctgtcatcattccaaaggaatgtagtttcctccagctcaatcatttgaagtaatacacattgccaaatctgactgtaacctgacattttagacctattggagaaataggaagaaagcccctccagtggaaggactggacttggaagaagttctgcaggaaggtgcatgcaattggatagctgttcatgagtgaaacgtggggaacattgctatgaaattgtaaggtttgcacttcatttttcgtagtttaaaaattgctctgttctggctgttgaaaacacttggtgtgaggtttgaatgaggattatataatcattctagtattcataggaaaatgattactgctctctatttgtaaaacaaaagaaataactttcggaaacagtattttagacatgaggaaattgtttgtattaggcattttgatctaacagaatcagctaaggatagtggatcctggctttacacatttctttgaccaaacccagctggcaacttgaagttgttactgtgtggcttccagattgcctagaggtgaatcctaccaacatcactgttttttttgttttgttttgttttttttgtatgtttttgagacagagtcttgctctatccccaggctggagtgcagtggcgtgatctcggcttactgcaacctcagcctcctgggttcaagcgattctcctgcctcagcctcctgagtagctgagactacaggcgcgtgccaccacgcccagctatttttgtatttttagtagagacgaggtttcactatgttggccaggatggtcttgatttcttgacctcgtgttctgcccgcctctacctcccaaagtgccgggattacaggcgtgagctgctgtgcccggccccagcatcacttttatagctttctgtgcctcttcctctgggccttggtgtatgaagccacttgcctttctctgttgggaagcgagcagaatcagattgctactcatgatgcagtccgggcagggcatactgtcacctttgcctgtggacacagttgtcaggataggggagaagccctttaggtccgtcttcttgacacagccctcctacctggttacgctggtgctttcgcttggtttagacaaccaagacacttgagaattatgctgtcctcagaatgtctgatgaaaagaacagattcacttttttgacacaatgcccattagccatctttggcagtgtttctgatcaaaggttccccatgcctgctctaggaaagtaaacttttttcagaataaatcctcaaatggattactgagtagtctttgcaccattcccatcagcctaatcagactgaatggtcacgctcagtgcaaaaagctgttttgctgttaggatgtttcagtgtttcttgtctttcctggaacagttcagttgtttaaatttagtaattcaatcctgaccagtgtaaacccacttaattattgcagcctaaagaattcagctacttctactcttcataaatgtgcccaagtaaatatgtgtttttaatattcaaccctggaaaattagtaattcagatgataaaagctcatgttttggtgtctttgtactcagattgtgaacaggcatatttcactgatttagacttagtatacttgatgagaatgctcaggttgaagagatagttctgtcagcaatccaacatctatagcaatgtggaaaaagtaatcaactcatatttcacgaatttgatgtatgttgtgatttagagggcatgagataaagtttatatttgaactgtgtggggtagggggaagaagaggttgcttaagcaaatagtggggtgattgtggaacaagatgtctctaagatgagaagttattttcttgcatcatagaagcactctttttacccgtgagtgattgtgttaactataaatcatttatatctgtacattaaagcagattccctcaattaggcaaatttggttagccaagcccaagttattgtttgtacttgaaagtaataaagctgcatttccttaaaaata

SEQ ID NO: 438215 - DNA, 5897 bp, Homo sapiens
ttcaaactatattacaaggctaccgtaaccaaaacagcatggtactggtacaaaaatagacacatatgagattaagatttggccaattgggagagaaatcaactgtaagtgcttaaagacattgtctgtctctgaggatagaagtatctgcctgcagccaagacttcattttgatggcaaatacattgtctgtagttcagcacttggtctctaccagtgggactttgccagttatgatattctcagggtcatcaagactcctgagatagcaaacttggccttgcttggctttggagatatctttgccctgctgtttgacaaccgctacctgtacatcatggacttgcggacagagagcctgattagtcgctggcctctgccagagtacaggaaatcaaagagaggctcaagcttcctggcaggcgaagcatcctggctgaatggactggatgggcacaatgacacgggcttggtctttgccaccagcatgcctgaccacagtattcacctggtgttgtggaaggagcacggctgacaccatgagccaccaccgctgactgactttgggtgccggggctgcgggttttgggtgcaacctctgcggcagccgactgcatgaaccaaagttctcacctaatggtatcatcacgcagtgcacaatcatttatctatgttttgccaggggccagggctcggggtgggggagggcttgttttattgacatacaacgcagcatgctaatggggtacaccattgacttcatttgtacttagttatgttggtcagtgttagaggatgcattttgggttcatctttcttgagtggagtattggttttaagtaaagaaagttaaatgatccattaatctgctaattggttgcctatgaaatcacattgtctgttattaaagctttttaccatagcctttttttcttttgaagttgaagcaaaggtgctatgatgttgttacagcaactttcctcacacggggtttagctcttataagagccagtgttaaaacttccaccaaataccagtttataaacttccaccaaataccagtgctaaggaaagtctgtcttccagttcaaatccaattctgtaaattgaatgttagcaactcattctaaaccttatatcttggcagagtcaaggttggccatgtttaagatgtgagcgagttctgtagtttttgttgccatgtcggggaagctagtccccggcagcctggatgactgcacagcggtgccctggtatagcagaaaagagcagtgagctggaaggttagagaccgggcctcttaccctggaactctgcaccctctctgggtcccagcttccttgtctgtacagccaggtatgaagctcagtgatttctaagattctttctggtccttcacctactgaaatgtgtaaaagttgatcatgtatttttgtctgatccctgattcatggtttctttcaggtcggataatatttaaatgaaatgactgttacagagttttctataagaacatcaattatatgaaaaggatgaataaaagggaaatgtagaaaatatagctgattccacttagacagtttaagtaattggttgaagaaatgctgatagaagccatggtttaaatagggacacagtatgctatactagaaggatacctgaacccaacctaacttcctcctttgcctctaacttaatctgcagcctcaggcaagttaactttctcttctaagaccatcattttcttcatcttttaagtgagggaattgtcctagatgagggctcacaaacccaaatgcctaagggagccgtgcaggtaacataaatgagtaaaacattctggggaggattgtgctgtcccctggaaagttgatctaatagggcagttattcagctctgttttgtcattaggagaagcaagcccagggttggcaggtcttcacattgtttcaggaggagctagaaatccagatttttatttgaaatcctggatttttaaaacgttacaactgattaaagaaaatttgaaataaggtgagccaaacaaaacatgtccctgggttgccagattgtgtcctcctccctctctaaagttaggtaattttgtgattcagcagtggaaatgttagtggtcacaatcagggagagagtagagggagcaagcagtagaaaaatctcagccgctcttcagctgtctccccttgtattacaagggtggtggggagggatgtatttcattcacagaccaataggaaggtagtttgaagatgaacataagaattggaacctcagtgacagcttatgtctgggaacatgagttattccttcttgctgactccagtataaagcatatccattttacaggtgagaaaaagggttgctggcagagctgagaatgatgtgaactctagagtggggacctatctcttgcagaatctgcattagcatagagccagactctggacctctgagtgctgtgaagttgatagaaattaatggtgaatttcaaggacagatatcattaatatccatgttgaaactctgtggggtttaagcaaaagaacaatatcttcccccatcccacaaaatctgggtttaatctatctcacattgagttctgtgcatcagctctgcttagtactctagaaatagaaccggaatcacaactgaatctattttgcagaagccccaggagactttgggcactgatgatggtaaatgactttttactctattattatttctttttttttgagacagagtttcgctcttactgcgcaggctggagtgcaatggcacgatcttggctcactgcaacctccgcctcctgggttcaagtgattctcctgcctcagcctcctaagtagctgggattacaagcatctgccatgacacccaactaatttttatatttttagtagagacagggttccaccatgttggccaggctggtcttgaactcctgacctcaggtcatccacctgccttggcctcccaaagtgctgggattacaggcgtgagccaccacgcctggccgagtttttactttttatcgagcctgaacagataactattactgatctaatgaccatccccaccctacctcactttcagatctatccaatagcttcaaagggcaagtaattataatcatttgtgggaaaagttttattaaaaagtgacaaacttgaagctgtatatagtatgttctatttcagtttttagtggtgaatacagaagtcatcaaggtggtacttggtgccgctggaattttttttttttcctaggcagtcttgctctgtcatacaggctggagtacagtggcatcatcatgcagctggattttgacagcagaacttcaggcagtaattggagtcctaatgtcagttcttccttatggaggcctttatttggcctgagattttattcaactactttatagatgctgggtttattcatactatcgccagtttttataaaaatggaaaactagctcatcctttttgcaaaagaaagcaaagtggggagtcagaatgagaagtggataggggataactaaaactattctttactctcctttcattgcctttgagagctagctcttgcacacactgactttggcttccttagcgcataggtaagggaattgcctttccctcttttgtgaatattctcatttctgaaaaattctaagtcatgagaagataagccctatcctttcttacaaggattggatttcttgggtgacactgtggtgtggtggaagccagcggcttctttcaggttcataaaggccatcataacaacttcaggcttcatggtgtggacagggatccaggagagctgagtggatgtgtgaagtttctgatagattctgtcatcattccaaaggaatgtagtttcctccagctcaatcatttgaagtaatacacattgccaaatctgactgtaacctgacattttagacctattggagaaataggaagaaagcccctccagtggaaggactggacttggaagaagttctgcaggaaggtgcatgcaattggatagctgttcatgagtgaaacgtggggaacattgctatgaaattgtaaggtttgcacttcatttttcgtagtttaaaaattgctctgttctggctgttgaaaacacttggtgtgaggtttgaatgaggattatataatcattctagtattcataggaaaatgattactgctctctatttgtaaaacaaaagaaataactttcggaaacagtattttagacatgaggaaattgtttgtattaggcattttgatctaacagaatcagctaaggatagtggatcctggctttacacatttctttgaccaaacccagctggcaacttgaagttgttactgtgtggcttccagattgcctagaggtgaatcctaccaacatcactgttttttttgttttgttttgttttttttgtatgtttttgagacagagtcttgctctatccccaggctggagtgcagtggcgtgatctcggcttactgcaacctcagcctcctgggttcaagcgattctcctgcctcagcctcctgagtagctgagactacaggcgcgtgccaccacgcccagctatttttgtatttttagtagagacgaggtttcactatgttggccaggatggtcttgatttcttgacctcgtgttctgcccgcctctacctcccaaagtgccgggattacaggcgtgagctgctgtgcccggccccagcatcacttttatagctttctgtgcctcttcctctgggccttggtgtatgaagccacttgcctttctctgttgggaagcgagcagaatcagattgctactcatgatgcagtccgggcagggcatactgtcacctttgcctgtggacacagttgtcaggataggggagaagccctttaggtccgtcttcttgacacagccctcctacctggttacgctggtgctttcgcttggtttagacaaccaagacacttgagaattatgctgtcctcagaatgtctgatgaaaagaacagattcacttttttgacacaatgcccattagccatctttggcagtgtttctgatcaaaggttccccatgcctgctctaggaaagtaaacttttttcagaataaatcctcaaatggattactgagtagtctttgcaccattcccatcagcctaatcagactgaatggtcacgctcagtgcaaaaagctgttttgctgttaggatgtttcagtgtttcttgtctttcctggaacagttcagttgtttaaatttagtaattcaatcctgaccagtgtaaacccacttaattattgcagcctaaagaattcagctacttctactcttcataaatgtgcccaagtaaatatgtgtttttaatattcaaccctggaaaattagtaattcagatgataaaagctcatgttttggtgtctttgtactcagattgtgaacaggcatatttcactgatttagacttagtatacttgatgagaatgctcaggttgaagagatagttctgtcagcaatccaacatctatagcaatgtggaaaaagtaatcaactcatatttcacgaatttgatgtatgttgtgatttagagggcatgagataaagtttatatttgaactgtgtggggtagggggaagaagaggttgcttaagcaaatagtggggtgattgtggaacaagatgtctctaagatgagaagttattttcttgcatcatagaagcactctttttacccgtgagtgattgtgttaactataaatcatttatatctgtacattaaagcagattccctcaattaggcaaatttggttagccaagcccaagttattgtttgtacttgaaagtaataaagctgcatttccttaaaaata

SEQ ID NO: 438216 - DNA, 5600 bp, Homo sapiens
agcaccggaagccgctcccctgtgaggctgcggaccgggagcagcggccgcaggtccgggcgccatggctgcggagcggacccggccgctgcaaggctctggcggtccgagcgtgcctagtagctgtgaacccggcgcgaggtcccgggccccggggcgctcgctcaggtaaatttttccataaccttatggagagaaaggactttgagacatggcttgataacatttctgttacatttctttctctgacggacttgcagaaaaatgaaactctggatcacctgattagtctgagtggggcagtccagctcaggcatctctccaataacctagagactctcctcaagcgggacttcctcaaactccttcccctggagctcagtttttatttgttaaaatggctcgatcctcagactttactcacatgctgcctcgtctctaaacagtggaataaggtgataagtgcctgtacagaggtgtggcagactgcatgtaaaaatttgggctggcagatagatgattctgttcaggacgctttgcactggaagaaggtttatttgaaggctattttgagaatgaagcaactggaggaccatgaagcctttgaaacctcgtcattaattggacacagtgccagagtgtatgcactttactacaaagatggacttctctgtacagggtcagatgacttgtctgcaaagctgtgggatgtgagcacagggcagtgcgtttatggcatccagacccacacttgtgcagcggtgaagtttgatgaacagaagcttgtgacaggctcctttgacaacactgtggcttgctgggaatggagttccggagccaggacccagcactttcgggggcacacgggggcggtatttagcgtggactacaatgatgaactggatatcttggtgagcggctctgcagacttcactgtgaaagtatgggctttatctgctgggacatgcctgaacacactcaccgggcacacggaatgggtcaccaaggtagttttgcagaagtgcaaagtcaagtctctcttgcacagtcctggagactacatcctcttaagtgcagacaaatatgagattaagatttggccaattgggagagaaatcaactgtaagtgcttaaagacattgtctgtctctgaggatagaagtatctgcctgcagccaagacttcattttgatggcaaatacattgtctgtagttcagcacttggtctctaccagtgggactttgccagttatgatattctcagggtcatcaagactcctgagatagcaaacttggccttgcttggctttggagatatctttgccctgctgtttgacaaccgctacctgtacatcatggacttgcggacagagagcctgattagtcgctggcctctgccagagtacaggaaatcaaagagaggctcaagcttcctggcaggcgaagcatcctggctgaatggactggatgggcacaatgacacgggcttggtctttgccaccagcatgcctgaccacagtattcacctggtgttgtggaaggagcacggctgacaccatgagccaccaccgctgactgactttgggtgccggggctgcgggttttgggtgcaacctctgcggcagccgactgcatgaaccaaagttctcacctaatggtatcatcacgcagtgcacaatcatttatctatgttttgccaggggccagggctcggggtgggggagggcttgttttattgacatacaacgcagcatgctaatggggtacaccattgacttcatttgtacttagttatgttggtcagtgttagaggatgcattttgggttcatctttcttgagtggagtattggttttaagtaaagaaagttaaatgatccattaatctgctaattggttgcctatgaaatcacattgtctgttattaaagctttttaccatagcctttttttcttttgaagttgaagcaaaggtgctatgatgttgttacagcaactttcctcacacggggtttagctcttataagagccagtgttaaaacttccaccaaataccagtttataaacttccaccaaataccagtgctaaggaaagtctgtcttccagttcaaatccaattctgtaaattgaatgttagcaactcattctaaaccttatatcttggcagagtcaaggttggccatgtttaagatgtgagcgagttctgtagtttttgttgccatgtcggggaagctagtccccggcagcctggatgactgcacagcggtgccctggtatagcagaaaagagcagtgagctggaaggttagagaccgggcctcttaccctggaactctgcaccctctctgggtcccagcttccttgtctgtacagccaggtatgaagctcagtgatttctaagattctttctggtccttcacctactgaaatgtgtaaaagttgatcatgtatttttgtctgatccctgattcatggtttctttcaggtcggataatatttaaatgaaatgactgttacagagttttctataagaacatcaattatatgaaaaggatgaataaaagggaaatgtagaaaatatagctgattccacttagacagtttaagtaattggttgaagaaatgctgatagaagccatggtttaaatagggacacagtatgctatactagaaggatacctgaacccaacctaacttcctcctttgcctctaacttaatctgcagcctcaggcaagttaactttctcttctaagaccatcattttcttcatcttttaagtgagggaattgtcctagatgagggctcacaaacccaaatgcctaagggagccgtgcaggtaacataaatgagtaaaacattctggggaggattgtgctgtcccctggaaagttgatctaatagggcagttattcagctctgttttgtcattaggagaagcaagcccagggttggcaggtcttcacattgtttcaggaggagctagaaatccagatttttatttgaaatcctggatttttaaaacgttacaactgattaaagaaaatttgaaataaggtgagccaaacaaaacatgtccctgggttgccagattgtgtcctcctccctctctaaagttaggtaattttgtgattcagcagtggaaatgttagtggtcacaatcagggagagagtagagggagcaagcagtagaaaaatctcagccgctcttcagctgtctccccttgtattacaagggtggtggggagggatgtatttcattcacagaccaataggaaggtagtttgaagatgaacataagaattggaacctcagtgacagcttatgtctgggaacatgagttattccttcttgctgactccagtataaagcatatccattttacaggtgagaaaaagggttgctggcagagctgagaatgatgtgaactctagagtggggacctatctcttgcagaatctgcattagcatagagccagactctggacctctgagtgctgtgaagttgatagaaattaatggtgaatttcaaggacagatatcattaatatccatgttgaaactctgtggggtttaagcaaaagaacaatatcttcccccatcccacaaaatctgggtttaatctatctcacattgagttctgtgcatcagctctgcttagtactctagaaatagaaccggaatcacaactgaatctattttgcagaagccccaggagactttgggcactgatgatggtaaatgactttttactctattattatttctttttttttgagacagagtttcgctcttactgcgcaggctggagtgcaatggcacgatcttggctcactgcaacctccgcctcctgggttcaagtgattctcctgcctcagcctcctaagtagctgggattacaagcatctgccatgacacccaactaatttttatatttttagtagagacagggttccaccatgttggccaggctggtcttgaactcctgacctcaggtcatccacctgccttggcctcccaaagtgctgggattacaggcgtgagccaccacgcctggccgagtttttactttttatcgagcctgaacagataactattactgatctaatgaccatccccaccctacctcactttcagatctatccaatagcttcaaagggcaagtaattataatcatttgtgggaaaagttttattaaaaagtgacaaacttgaagctgtatatagtatgttctatttcagtttttagtggtgaatacagaagtcatcaaggtggtacttggtgccgctggaattttttttttttcctaggcagtcttgctctgtcatacaggctggagtacagtggcatcatcatgcagctggattttgacagcagaacttcaggcagtaattggagtcctaatgtcagttcttccttatggaggcctttatttggcctgagattttattcaactactttatagatgctgggtttattcatactatcgccagtttttataaaaatggaaaactagctcatcctttttgcaaaagaaagcaaagtggggagtcagaatgagaagtggataggggataactaaaactattctttactctcctttcattgcctttgagagctagctcttgcacacactgactttggcttccttagcgcataggtaagggaattgcctttccctcttttgtgaatattctcatttctgaaaaattctaagtcatgagaagataagccctatcctttcttacaaggattggatttcttgggtgacactgtggtgtggtggaagccagcggcttctttcaggttcataaaggccatcataacaacttcaggcttcatggtgtggacagggatccaggagagctgagtggatgtgtgaagtttctgatagattctgtcatcattccaaaggaatgtagtttcctccagctcaatcatttgaagtaatacacattgccaaatctgactgtaacctgacattttagacctattggagaaataggaagaaagcccctccagtggaaggactggacttggaagaagttctgcaggaaggtgcatgcaattggatagctgttcatgagtgaaacgtggggaacattgctatgaaattgtaaggtttgcacttcatttttcgtagtttaaaaattgctctgttctggctgttgaaaacacttggtgtgaggtttgaatgaggattatataatcattctagtattcataggaaaatgattactgctctctatttgtaaaacaaaagaaataactttcggaaacagtattttagacatgaggaaattgtttgtattaggcattttgatctaacagaatcagctaaggatagtggatcctggctttacacatttctttgaccaaacccagctggcaacttgaagttgttactgtgtggcttccagattgcctagaggtgaatcctaccaacatcactgttttttttgttttgttttgttttttttgtatgtttttgagacagagagaatcgcttgaacccaggaggcggaggttgcagtgagcggagattaagccacctgcactccagcctgggcgacagagtgagactccatctcaaaaaaaaaagaat

SEQ ID NO: 438217 - DNA, 1690 bp, Homo sapiens
agcaccggaagccgctcccctgtgaggctgcggaccgggagcagcggccgcaggtccgggcgccatggctgcggagcggacccggccgctgcaaggctctggcggtccgagcgtgcctagtagctgtgaacccggcgcgaggtcccgggccccggggcgctcgctcaggtaaatttttccataaccttatggagagaaaggactttgagacatggcttgataacatttctgttacatttctttctctgacggacttgcagaaaaatgaaactctggatcacctgattagtctgagtggggcagtccagctcaggcatctctccaataacctagagactctcctcaagcgggacttcctcaaactccttcccctggagctcagtttttatttgttaaaatggctcgatcctcagactttactcacatgctgcctcgtctctaaacagtggaataaggtgataagtgcctgtacagaggtgtggcagactgcatgtaaaaatttgggctggcagatagatgattctgttcaggacgctttgcactggaagaaggtttatttgaaggctattttgagaatgaagcaactggaggaccatgaagcctttgaaacctcgtcattaattggacacagtgccagagtgtatgcactttactacaaagatggacttctctgtacagggtcagatgacttgtctgcaaagctgtgggatgtgagcacagggcagtgcgtttatggcatccagacccacacttgtgcagcggtgaagtttgatgaacagaagcttgtgacaggctcctttgacaacactgtggcttgctgggaatggagttccggagccaggacccagcactttcgggggcacacgggggcggtatttagcgtggactacaatgatgaactggatatcttggtgagcggctctgcagacttcactgtgaaagtatgggctttatctgctgggacatgcctgaacacactcaccgggcacacggaatgggtcaccaaggtagttttgcagaagtgcaaagtcaagtctctcttgcacagtcctggagactacatcctcttaagtgcagacaaatatgagattaagatttggccaattgggagagaaatcaactgtaagtgcttaaagacattgtctgtctctgaggatagaagtatctgcctgcagccaagacttcattttgatggcaaatacattgtctgtagttcagcacttggtctctaccagtgggactttgccagttatgatattctcagggtcatcaagactcctgagatagcaaacttggccttgcttggctttggagatatctttgccctgctgtttgacaaccgctacctgtacatcatggacttgcggacagagagcctgattagtcgctggcctctgccagagtacaggaaatcaaagagaggctcaagcttcctggcaggcgaagcatcctggctgaatggactggatgggcacaatgacacgggcttggtctttgccaccagcatgcctgaccacagtattcacctggtgttgtggaaggagcacggctgacaccatgagccaccaccgctgactgactttgggtgccggggctgcgggttttgggtgcaacctctgcggcagccgactgcatgaaccaaagttctcacctaatggtatcatcaccagacgcgcttaagtaccgccga

SEQ ID NO: 438218 - DNA, 966 bp, Homo sapiens
agcaccggaagccgctcccctgtgaggctgcggaccgggagcagcggccgcaggtccgggtctgtatgcgaggcggggccggtcggggaggggactcttaggcgcccgcggctctgctgacccgccgcgccttggctgtttttctttccctgcaggcgccatggctgcggagcggacccggccgctgcaaggctctggcggtccgagcgtgcctagtagctgtgaacccggcgcgaggtcccgggccccggggcgctcgctcaggtaaatttttccataaccttatggagagaaaggactttgagacatggcttgataacatttctgttacatttctttctctgacggacttgcagaaaaatgaaactctggatcacctgattagtctgagtggggcagtccagctcaggcatctctccaataacctagagactctcctcaagcgggacttcctcaaactccttcccctggagctcagtttttatttgttaaaatggctcgatcctcagactttactcacatgctgcctcgtctctaaacagtggaataaggtgataagtgcctgtacagaggtgtggcagactgcatgtaaaaatttgggctggcagatagatgattctgttcaggacgctttgcactggaagaaggtttatttgaaggctattttgagaatgaagcaactggaggaccatgaagcctttgaaacctcgtcattaattggacacagtgccagagtgtatgcactttactacaaagatggacttctctgtacaggtaagagatgttgaaactgttttttgggttttgttttgtatttcatagggtgtaatcttgaaccagtcttgagctttgagaatgacaagtgttgattatatgagatatgtacagtgactttttttctctaatcctgagtggttccccccccttatcctcttccttctctctagagaacacaatcatttttat

SEQ ID NO: 438219 - DNA, 769 bp, Homo sapiens
gcgggctcatgtctcaggcctcaagggaaccacgcttcctaactgctgcttctcagggaatccgacaccagccaaccattttaagcctctaaaagacctcgggcaagtctcacagaaactgagctgcagacggggagtagctttgtggaaactgatttgatggacactgcaccagcttccttcaggttctagattcttgctacttagggcgggctggtttggacctaacatctcgcacgtgactccctcagcctcagagccttgggatgcagagcagctggcagggttcctctcaatcctgcaaccccagctgtcccaccggtggatgcagaggggaatccgaggccatcaaccttggtgacagcagcgcagtgccaatgctgatcacactgcatgggagattttgttaacgtctgccacccccactctcacccccaagctctaagcccccgggaggcctggactgtcttcctcatctctgtagcaccaagcctgatagatctgtatatggtaaacaggggtttaaccacatgtggttaacatggattaatgtgggaatttggcttcaagaacacaaccttaggaccttgggccccaaaagctggtggtgaaatgagaggagccaatttaagaagacccttatggagacctgaggctgcagaaactggtaggtttcatcaggtggttaaagtcgtcaaagttgtaagtgactaaccaagattatttcattttaaaaccacagaataaaaatgacacctgagcttctcta

SEQ ID NO: 438220 - DNA, 2722 bp, Homo sapiens
ggctgtactggtccgggattttgggatccgcggggaccatggagccggtgccgctgcaggacttcgtgcgcgccttggaccccgcctccctcccgcgcgtgctgcgggtctgctcgggggtctacttcgagggctccatctatgagatctctgggaatgagtgctgcctctccacgggggacctgatcaaggtcacccaggtccgcctccagaaggtggtctgtgagaacccgaagaccagccagaccatggagctcgcccccaacttccagggctacttcacccccctcaacaccccacagagctatgaaaccctggaggagctggtctctgccacaactcagagctccaagcagctgcccacttgcttcatgtcgacccacaggattgtcacagagggcagggtggtgactgaggaccagctcctcatgcttgaggctgtggtgatgcacctcgggatccgctctgcccgctgtgtcctgggcatggagggtcagcaggtcatcctgcacctgcccctatcccagaaggggcccttctggacatgggagcctagtgcccctcgaactctgctccaggtcctacaggatccagccctgaaagacctcgtcctcacctgccccaccctgccctggcattccctgatcctgcggccccagtatgagatccaagccatcatgcacatgcgcaggaccattgtcaagatcccttctaccctggaggtcgacgtggaggacgtcaccgcctcctcccggcacgtccactttatcaaaccgctgctgctgagcgaggtcctggcctgggaaggccctttccccctgtccatggagatcctggaggttcctgagggccgccccatcttcctcagcccgtgggtgggctccttgcaaaaaggccagaggctttgcgtctatggcctagcctcaccaccctggcgggtcctggcctcaagcaagggccgcaaggtgcccaggcacttcctggtgtcagggggctaccaaggcaagctgcggcggcggccaagggagttccccacggcctatgacctcctaggtgctttccagccaggccggccactccgggtggtggccacaaaggactgtgagggcgagagggaggagaatcccgagttcacgtccctggctgtgggtgaccggctggaggtgctggggcctggccaggcccatggggcccagggcagtgacgtggatgtcttggtttgtcagcggctgagtgaccaggctggggaggatgaggaggaagagtgcaaagaggaggcagagagcccagagcgggtcctgctgcccttccacttccctggcagtttcgtggaggagatgagtgacagccggcgctacagcctggcagatctgactgcccagttttcactgccttgtgaggtcaaggtggtggccaaggacaccagccaccccactgaccctctgacctccttcctgggcctgcggctggaggagaagatcacagagccattcttggtggtgagcctggactctgagcctgggatgtgctttgagatccctccccggtggctggacctgactgtcgtggaggccaaggggcagccagacttgccagaggggtctctccccatagccacagtggaggagctgacagacaccttctattatcgtcttcggaagttaccagcctgtgagatccaagcccccccacccaggccccctaaaaatcagggcctcagcaagcagaggagacacagcagtgagggaggcgtcaagtcttctcaagtcttaggattgcagcaacacgctcggctgcccaaacccaaggcgaagaccttgccagagttcatcaaggatggctccagtacgtacagcaagattcctgcccacaggaagggccacaggcccgctaagccccaaaggcaggatctagatgatgatgaacatgattatgaagaaatacttgagcaatttcagaaaaccatctaagtgctggaggaaccacgcttcctaactgctgcttctcagggaatccgacaccagccaaccattttaagcctctaaaagacctcgggcaagtctcacagaaactgagctgcagacggggagtagctttgtggaaactgatttgatggacactgcaccagcttccttcaggttctagattcttgctacttagggcgggctggtttggacctaacatctcgcacgtgactccctcagcctcagagccttgggatgcagagcagctggcagggttcctctcaatcctgcaaccccagctgtcccaccggtggatgcagaggggaatccgaggccatcaaccttggtgacagcagcgcagtgccaatgctgatcacactgcatgggagattttgttaacgtctgccacccccactctcacccccaagctctaagcccccgggaggcctggactgtcttcctcatctctgtagcaccaagcctgatagatctgtatatggtaaacaggggtttaaccacatgtggttaacatggattaatgtgggaatttggcttcaagaacacaaccttaggaccttgggccccaaaagctggtggtgaaatgagaggagccaatttaagaagacccttatggagacctgaggctgcagaaactggtaggtttcatcaggtggttaaagtcgtcaaagttgtaagtgactaaccaagattatttcattttaaaaccacagaataaaaatgacacctgagcttctcta

SEQ ID NO: 438221 - DNA, 2783 bp, Homo sapiens
tgccaggaggggcaaggacagctgaggacgactgaacctgtgggcatgaggcaggaacgacagagcagggcatgccaggcagcaggcaccatgtgcaaaggcatggcagagcagagcttgttgggcaccagggcacaggctgcccagcacttggcccttgtccaatggggaaatggagtccttgtctccgcaggctccatctatgagatctctgggaatgagtgctgcctctccacgggggacctgatcaaggtcacccaggtccgcctccagaaggtggtctgtgagaacccgaagaccagccagaccatggagctcgcccccaacttccagggctacttcacccccctcaacaccccacagagctatgaaaccctggaggagctggtctctgccacaactcagagctccaagcagctgcccacttgcttcatgtcgacccacaggattgtcacagagggcagggtggtgactgaggaccagctcctcatgcttgaggctgtggtgatgcacctcgggatccgctctgcccgctgtgtcctgggcatggagggtcagcaggtcatcctgcacctgcccctatcccagaaggggcccttctggacatgggagcctagtgcccctcgaactctgctccaggtcctacaggatccagccctgaaagacctcgtcctcacctgccccaccctgccctggcattccctgatcctgcggccccagtatgagatccaagccatcatgcacatgcgcaggaccattgtcaagatcccttctaccctggaggtcgacgtggaggacgtcaccgcctcctcccggcacgtccactttatcaaaccgctgctgctgagcgaggtcctggcctgggaaggccctttccccctgtccatggagatcctggaggttcctgagggccgccccatcttcctcagcccgtgggtgggctccttgcaaaaaggccagaggctttgcgtctatggcctagcctcaccaccctggcgggtcctggcctcaagcaagggccgcaaggtgcccaggcacttcctggtgtcagggggctaccaaggcaagctgcggcggcggccaagggagttccccacggcctatgacctcctaggtgctttccagccaggccggccactccgggtggtggccacaaaggactgtgagggcgagagggaggagaatcccgagttcacgtccctggctgtgggtgaccggctggaggtgctggggcctggccaggcccatggggcccagggcagtgacgtggatgtcttggtttgtcagcggctgagtgaccaggctggggaggatgaggaggaagagtgcaaagaggaggcagagagcccagagcgggtcctgctgcccttccacttccctggcagtttcgtggaggagatgagtgacagccggcgctacagcctggcagatctgactgcccagttttcactgccttgtgaggtcaaggtggtggccaaggacaccagccaccccactgaccctctgacctccttcctgggcctgcggctggaggagaagatcacagagccattcttggtggtgagcctggactctgagcctgggatgtgctttgagatccctccccggtggctggacctgactgtcgtggaggccaaggggcagccagacttgccagaggggtctctccccatagccacagtggaggagctgacagacaccttctattatcgtcttcggaagttaccagcctgtgagatccaagcccccccacccaggccccctaaaaatcagggcctcagcaagcagaggagacacagcagtgagggaggcgtcaagtcttctcaagtcttaggattgcagcaacacgctcggctgcccaaacccaaggcgaagaccttgccagagttcatcaaggatggctccagtacgtacagcaagattcctgcccacaggaagggccacaggcccgctaagccccaaaggcaggatctagatgatgatgaacatgattatgaagaaatacttgagcaatttcagaaaaccatctaagtgctggaggaaccacgcttcctaactgctgcttctcagggaatccgacaccagccaaccattttaagcctctaaaagacctcgggcaagtctcacagaaactgagctgcagacggggagtagctttgtggaaactgatttgatggacactgcaccagcttccttcaggttctagattcttgctacttagggcgggctggtttggacctaacatctcgcacgtgactccctcagcctcagagccttgggatgcagagcagctggcagggttcctctcaatcctgcaaccccagctgtcccaccggtggatgcagaggggaatccgaggccatcaaccttggtgacagcagcgcagtgccaatgctgatcacactgcatgggagattttgttaacgtctgccacccccactctcacccccaagctctaagcccccgggaggcctggactgtcttcctcatctctgtagcaccaagcctgatagatctgtatatggtaaacaggggtttaaccacatgtggttaacatggattaatgtgggaatttggcttcaagaacacaaccttaggaccttgggccccaaaagctggtggtgaaatgagaggagccaatttaagaagacccttatggagacctgaggctgcagaaactggtaggtttcatcaggtggttaaagtcgtcaaagttgtaagtgactaaccaagattatttcattttaaaaccacagaataaaaatgacacctgagcttctcta

SEQ ID NO: 438222 - DNA, 2287 bp, Homo sapiens
ggctgtactggtccgggattttgggatccgcggggaccatggagccggtgccgctgcaggacttcgtgcgcgccttggaccccgcctccctcccgcgcgtgctgcgggtctgctcgggggtctacttcgagggctccatctatgagatctctgggaatgagtgctgcctctccacgggggacctgatcaaggtcacccaggtccgcctccagaaggtggtctgtgagaacccgaagaccagccagaccatggagctcgcccccaacttccagggctacttcacccccctcaacaccccacagagctatgaaaccctggaggagctggtctctgccacaactcagagctccaagcagctgcccacttgcttcatgtcgacccacaggattgtcacagagggcagggtggtgactgaggaccagctcctcatgcttgaggctgtggtgatgcacctcgggatccgctctgcccgctgtgtcctgggcatggagggtcagcaggtcatcctgcacctgcccctatcccagaaggggcccttctggacatgggagcctagtgcccctcgaactctgctccaggtcctacaggatccagccctgaaagacctcgtcctcacctgccccaccctgccctggcattccctgatcctgcggccccagtatgagatccaagccatcatgcacatgcgcaggaccattgtcaagatcccttctaccctggaggtcgacgtggaggacgtcaccgcctcctcccggcacgtccactttatcaaaccgctgctgctgagcgagcggctgagtgaccaggctggggaggatgaggaggaagagtgcaaagaggaggcagagagcccagagcgggtcctgctgcccttccacttccctggcagtttcgtggaggagatgagtgacagccggcgctacagcctggcagatctgactgcccagttttcactgccttgtgaggtcaaggtggtggccaaggacaccagccaccccactgaccctctgacctccttcctgggcctgcggctggaggagaagatcacagagccattcttggtggtgagcctggactctgagcctgggatgtgctttgagatccctccccggtggctggacctgactgtcgtggaggccaaggggcagccagacttgccagaggggtctctccccatagccacagtggaggagctgacagacaccttctattatcgtcttcggaagttaccagcctgtgagatccaagcccccccacccaggccccctaaaaatcagggcctcagcaagcagaggagacacagcagtgagggaggcgtcaagtcttctcaagtcttaggattgcagcaacacgctcggctgcccaaacccaaggcgaagaccttgccagagttcatcaaggatggctccagtacgtacagcaagattcctgcccacaggaagggccacaggcccgctaagccccaaaggcaggatctagatgatgatgaacatgattatgaagaaatacttgagcaatttcagaaaaccatctaagtgctggaggaaccacgcttcctaactgctgcttctcagggaatccgacaccagccaaccattttaagcctctaaaagacctcgggcaagtctcacagaaactgagctgcagacggggagtagctttgtggaaactgatttgatggacactgcaccagcttccttcaggttctagattcttgctacttagggcgggctggtttggacctaacatctcgcacgtgactccctcagcctcagagccttgggatgcagagcagctggcagggttcctctcaatcctgcaaccccagctgtcccaccggtggatgcagaggggaatccgaggccatcaaccttggtgacagcagcgcagtgccaatgctgatcacactgcatgggagattttgttaacgtctgccacccccactctcacccccaagctctaagcccccgggaggcctggactgtcttcctcatctctgtagcaccaagcctgatagatctgtatatggtaaacaggggtttaaccacatgtggttaacatggattaatgtgggaatttggcttcaagaacacaaccttaggaccttgggccccaaaagctggtggtgaaatgagaggagccaatttaagaagacccttatggagacctgaggctgcagaaactggtaggtttcatcaggtggttaaagtcgtcaaagttgtaagtgactaaccaagattatttcattttaaaaccacagaataaaaatgacacctgagcttctcta

SEQ ID NO: 438223 - DNA, 1238 bp, Homo sapiens
ggctgtactggtccgggattttgggatccgcggggaccatggagccggtgccgctgcaggacttcgtgcgcgccttggaccccgcctccctcccgcgcgtgctgcgggtctgctcgggggtctacttcgagggctccatctatgagatctctgggaatgagtgctgcctctccacgggggacctgatcaaggtcacccaggtccgcctccagaaggtggtctgtgagaacccgaagaccagccagaccatggagctcgcccccaacttccaggtcttctcaagtcttaggattgcagcaacacgctcggctgcccaaacccaaggcgaagaccttgccagagttcatcaaggatggctccagtacgtacagcaagattcctgcccacaggaagggccacaggcccgctaagccccaaaggcaggatctagatgatgatgaacatgattatgaagaaatacttgagcaatttcagaaaaccatctaagtgctggaggaaccacgcttcctaactgctgcttctcagggaatccgacaccagccaaccattttaagcctctaaaagacctcgggcaagtctcacagaaactgagctgcagacggggagtagctttgtggaaactgatttgatggacactgcaccagcttccttcaggttctagattcttgctacttagggcgggctggtttggacctaacatctcgcacgtgactccctcagcctcagagccttgggatgcagagcagctggcagggttcctctcaatcctgcaaccccagctgtcccaccggtggatgcagaggggaatccgaggccatcaaccttggtgacagcagcgcagtgccaatgctgatcacactgcatgggagattttgttaacgtctgccacccccactctcacccccaagctctaagcccccgggaggcctggactgtcttcctcatctctgtagcaccaagcctgatagatctgtatatggtaaacaggggtttaaccacatgtggttaacatggattaatgtgggaatttggcttcaagaacacaaccttaggaccttgggccccaaaagctggtggtgaaatgagaggagccaatttaagaagacccttatggagacctgaggctgcagaaactggtaggtttcatcaggtggttaaagtcgtcaaagttgtaagtgactaaccaagattatttcattttaaaaccacagaataaaaatgacacctgagcttctcta

SEQ ID NO: 438224 - DNA, 2311 bp, Homo sapiens
ggctgtactggtccgggattttgggatccgcggggaccatggagccggtgccgctgcaggacttcgtgcgcgccttggaccccgcctccctcccgcgcgtgctgcgggtctgctcgggggtctacttcgagggctccatctatgagatctctgggaatgagtgctgcctctccacgggggacctgatcaaggtcacccaggtccgcctccagaaggtggtctgtgagaacccgaagaccagccagaccatggagctcgcccccaacttccaggtgcgcaggaccattgtcaagatcccttctaccctggaggtcgacgtggaggacgtcaccgcctcctcccggcacgtccactttatcaaaccgctgctgctgagcgaggtcctggcctgggaaggccctttccccctgtccatggagatcctggaggttcctgagggccgccccatcttcctcagcccgtgggtgggctccttgcaaaaaggccagaggctttgcgtctatggcctagcctcaccaccctggcgggtcctggcctcaagcaagggccgcaaggtgcccaggcacttcctggtgtcagggggctaccaaggcaagctgcggcggcggccaagggagttccccacggcctatgacctcctaggtgctttccagccaggccggccactccgggtggtggccacaaaggactgtgagggcgagagggaggagaatcccgagttcacgtccctggctgtgggtgaccggctggaggtgctggggcctggccaggcccatggggcccagggcagtgacgtggatgtcttggtttgtcagcggctgagtgaccaggctggggaggatgaggaggaagagtgcaaagaggaggcagagagcccagagcgggtcctgctgcccttccacttccctggcagtttcgtggaggagatgagtgacagccggcgctacagcctggcagatctgactgcccagttttcactgccttgtgaggtcaaggtggtggccaaggacaccagccaccccactgaccctctgacctccttcctgggcctgcggctggaggagaagatcacagagccattcttggtggtgagcctggactctgagcctgggatgtgctttgagatccctccccggtggctggacctgactgtcgtggaggccaaggggcagccagacttgccagaggggtctctccccatagccacagtggaggagctgacagacaccttctattatcgtcttcggaagttaccagcctgtgagatccaagcccccccacccaggccccctaaaaatcagggcctcagcaagcagaggagacacagcagtgagggaggcgtcaagtcttctcaagtcttaggattgcagcaacacgctcggctgcccaaacccaaggcgaagaccttgccagagttcatcaaggatggctccagtacgtacagcaagattcctgcccacaggaagggccacaggcccgctaagccccaaaggcaggatctagatgatgatgaacatgattatgaagaaatacttgagcaatttcagaaaaccatctaagtgctggaggaaccacgcttcctaactgctgcttctcagggaatccgacaccagccaaccattttaagcctctaaaagacctcgggcaagtctcacagaaactgagctgcagacggggagtagctttgtggaaactgatttgatggacactgcaccagcttccttcaggttctagattcttgctacttagggcgggctggtttggacctaacatctcgcacgtgactccctcagcctcagagccttgggatgcagagcagctggcagggttcctctcaatcctgcaaccccagctgtcccaccggtggatgcagaggggaatccgaggccatcaaccttggtgacagcagcgcagtgccaatgctgatcacactgcatgggagattttgttaacgtctgccacccccactctcacccccaagctctaagcccccgggaggcctggactgtcttcctcatctctgtagcaccaagcctgatagatctgtatatggtaaacaggggtttaaccacatgtggttaacatggattaatgtgggaatttggcttcaagaacacaaccttaggaccttgggccccaaaagctggtggtgaaatgagaggagccaatttaagaagacccttatggagacctgaggctgcagaaactggtaggtttcatcaggtggttaaagtcgtcaaagttgtaagtgactaaccaagattatttcattttaaaaccacagaataaaaatgacacctgagcttctcta

SEQ ID NO: 438225 - DNA, 2649 bp, Homo sapiens
ggctgtactggtccgggattttgggatccgcggggaccatggagccggtgccgctgcaggacttcgtgcgcgccttggaccccgcctccctcccgcgcgtgctgcgggtctgctcgggggtctacttcgagggctccatctatgagatctctgggaatgagtgctgcctctccacgggggacctgatcaaggtcacccaggtccgcctccagaaggtggtctgtgagaacccgaagaccagccagaccatggagctcgcccccaacttccagggctacttcacccccctcaacaccccacagagctatgaaaccctggaggagctggtctctgccacaactcagagctccaagcagctgcccacttgcttcatgtcgacccacaggattgtcacagagggcagggtggtgactgaggaccagctcctcatgcttgaggctgtggtgatgcacctcgggatccgctctgcccgctgtgtcctgggcatggagggtcagcaggtcatcctgcacctgcccctatcccagaaggggcccttctggacatgggagcctagtgcccctcgaactctgctccaggtcctacaggatccagccctgaaagacctcgtcctcacctgccccaccctgccctggcattccctgatcctgcggccccagtatgagatccaagccatcatgcacatgcgcaggaccattgtcaagatcccttctaccctggaggtcgacgtggaggacgtcaccgcctcctcccggcacgtccactttatcaaaccgctgctgctgagcgaggtcctggcctgggaaggccctttccccctgtccatggagatcctggaggttcctgagggccgccccatcttcctcagcccgtgggtgggctccttgcaaaaaggccagaggctttgcgtctatggcctagcctcaccaccctggcgggtcctggcctcaagcaagggccgcaaggtgcccaggcacttcctggtgtcagggggctaccaaggcaagctgcggcggcggccaagggagttccccacggcctatgacctcctaggtgctttccagccaggccggccactccgggtggtggccacaaaggactgtgagggcgagagggaggagaatcccgagttcacgtccctggctgtgggtgaccggctggaggtgctggggcctggccaggcccatggggcccagggcagtgacgtggatgtcttggtttgtcagcggctgagtgaccaggctggggaggatgaggaggaagagtgcaaagaggaggcagagagcccagagcgggtcctgctgcccttccacttccctggcagtttcgtggaggagatgagtgacagccggcgctacagcctggcagatctgactgcccagttttcactgccttgtgaggtcaaggtggtggccaaggacaccagccaccccactgaccctctgacctccttcctgggcctgcggctggaggagaagatcacagagccattcttggtggtgagcctggactctgagcctgggatgtgctttgagatccctccccggtggctggacctgactgtcgtggaggccaaggggcagccagacttgccagaggggtctctccccatagccacagtggaggagctgacagacaccttctattatcgtcttcggaagttaccagcctgtgagatccaagcccccccacccaggccccctaaaaatcagggcctcagcaagcagaggagacacagcagtgagggaggcgtcaagtcttctcaagtcttaggattgcagcaacacgctcggctgcccaaacccaaggcgaagaccttgccagagttcatcaaggatggctccagtacgtacagcaagattcctgcccacaggaagggccacaggcccgctaagccccaaaggcaggatctagatgatgatgaacatgattatgaagaaatacttgagcaatttcagaaaaccatctaagtgctggaggaaccacgcttcctaactgctgcttctcagggaatccgacaccagccaaccattttaagcctctaaaagacctcgggcaagtctcacagaaactgagctgcagacggggagtagctttgtggaaactaacatctcgcacgtgactccctcagcctcagagccttgggatgcagagcagctggcagggttcctctcaatcctgcaaccccagctgtcccaccggtggatgcagaggggaatccgaggccatcaaccttggtgacagcagcgcagtgccaatgctgatcacactgcatgggagattttgttaacgtctgccacccccactctcacccccaagctctaagcccccgggaggcctggactgtcttcctcatctctgtagcaccaagcctgatagatctgtatatggtaaacaggggtttaaccacatgtggttaacatggattaatgtgggaatttggcttcaagaacacaaccttaggaccttgggccccaaaagctggtggtgaaatgagaggagccaatttaagaagacccttatggagacctgaggctgcagaaactggtaggtttcatcaggtggttaaagtcgtcaaagttgtaagtgactaaccaagattatttcattttaaaaccacagaataaaaatgacacctgagcttctcta

SEQ ID NO: 438226 - DNA, 1628 bp, Homo sapiens
ggctgtactggtccgggattttgggatccgcggggaccatggagccggtgccgctgcaggacttcgtgcgcgccttggaccccgcctccctcccgcgcgtgctgcgggtctgctcgggggtctacttcgaggcggctgagtgaccaggctggggaggatgaggaggaagagtgcaaagaggaggcagagagcccagagcgggtcctgctgcccttccacttccctggcagtttcgtggaggagatgagtgacagccggcgctacagcctggcagatctgactgcccagttttcactgccttgtgaggtcaaggtggtggccaaggacaccagccaccccactgaccctctgacctccttcctgggcctgcggctggaggagaagatcacagagccattcttggtggtgagcctggactctgagcctgggatgtgctttgagatccctccccggtggctggacctgactgtcgtggaggccaaggggcagccagacttgccagaggggtctctccccatagccacagtggaggagctgacagacaccttctattatcgtcttcggaagttaccagcctgtgagatccaagcccccccacccaggccccctaaaaatcagggcctcagcaagcagaggagacacagcagtgagggaggcgtcaagtcttctcaagtcttaggattgcagcaacacgctcggctgcccaaacccaaggcgaagaccttgccagagttcatcaaggatggctccagtacgtacagcaagattcctgcccacaggaagggccacaggcccgctaagccccaaaggcaggatctagatgatgatgaacatgattatgaagaaatacttgagcaatttcagaaaaccatctaagtgctggaggaaccacgcttcctaactgctgcttctcagggaatccgacaccagccaaccattttaagcctctaaaagacctcgggcaagtctcacagaaactgagctgcagacggggagtagctttgtggaaactgatttgatggacactgcaccagcttccttcaggttctagattcttgctacttagggcgggctggtttggacctaacatctcgcacgtgactccctcagcctcagagccttgggatgcagagcagctggcagggttcctctcaatcctgcaaccccagctgtcccaccggtggatgcagaggggaatccgaggccatcaaccttggtgacagcagcgcagtgccaatgctgatcacactgcatgggagattttgttaacgtctgccacccccactctcacccccaagctctaagcccccgggaggcctggactgtcttcctcatctctgtagcaccaagcctgatagatctgtatatggtaaacaggggtttaaccacatgtggttaacatggattaatgtgggaatttggcttcaagaacacaaccttaggaccttgggccccaaaagctggtggtgaaatgagaggagccaatttaagaagacccttatggagacctgaggctgcagaaactggtaggtttcatcaggtggttaaagtcgtcaaagttgtaagtgactaaccaagattatttcattttaaaaccacagaataaaaatgacacctgagcttctcta

SEQ ID NO: 438227 - DNA, 1674 bp, Homo sapiens
ggctgtactggtccgggattttgggatccgcggggaccatggagccggtgccgctgcaggacttcgtgcgcgccttggaccccgcctccctcccgcgcgtgctgcgggtctgctcgggggtctacttcgagggctccatctatgagatctctgggaatgagtgctgcctctccacgggggacctgatcaaggtcacccaggtccgcctccagaaggtggtctgtgagaacccgaagaccagccagaccatggagctcgcccccaacttccagggctacttcacccccctcaacaccccacagagctatgaaaccctggaggagctggtctctgccacaactcagagctccaagcagctgcccacttgcttcatgtcgacccacaggattgtcacagagggcagggtggtgactgaggaccagctcctcatgcttgaggctgtggtgatgcacctcgggatccgctctgcccgctgtgtcctgggcatggagggtcagcaggtcatcctgcacctgcccctatcccagaaggggcccttctggacatgggagcctagtgcccctcgaactctgctccaggtcctacaggatccagccctgaaagacctcgtcctcacctgccccaccctgccctggcattccctgatcctgcggccccagtatgagatccaagccatcatgcacatcttctcaagtcttaggattgcagcaacacgctcggctgcccaaacccaaggcgaagaccttgccagagttcatcaaggatggctccagtacgtacagcaagattcctgcccacaggaagggccacaggcccgctaagccccaaaggcaggatctagatgatgatgaacatgattatgaagaaatacttgagcaatttcagaaaaccatctaagtgctggaggaaccacgcttcctaactgctgcttctcagggaatccgacaccagccaaccattttaagcctctaaaagacctcgggcaagtctcacagaaactgagctgcagacggggagtagctttgtggaaactgatttgatggacactgcaccagcttccttcaggttctagattcttgctacttagggcgggctggtttggacctaacatctcgcacgtgactccctcagcctcagagccttgggatgcagagcagctggcagggttcctctcaatcctgcaaccccagctgtcccaccggtggatgcagaggggaatccgaggccatcaaccttggtgacagcagcgcagtgccaatgctgatcacactgcatgggagattttgttaacgtctgccacccccactctcacccccaagctctaagcccccgggaggcctggactgtcttcctcatctctgtagcaccaagcctgatagatctgtatatggtaaacaggggtttaaccacatgtggttaacatggattaatgtgggaatttggcttcaagaacacaaccttaggaccttgggccccaaaagctggtggtgaaatgagaggagccaatttaagaagacccttatggagacctgaggctgcagaaactggtaggtttcatcaggtggttaaagtcgtcaaagttgtaagtgactaaccaagattatttcattttaaaaccacagaataaaaatgacacctgagcttctctaaaaaaaaaaaaaaccaacccaaaaa

SEQ ID NO: 438228 - DNA, 572 bp, Homo sapiens
tgccaggaggggcaaggacagctgaggacgactgaacctgtgggcatgaggcaggaacgacagagcagggcatgccaggcagcaggcaccatgtgcaaaggcatggcagagcagagcttgttgggcaccagggcacaggctgcccagcacttggcccttgtccaatggggaaatggagtccttgtctccgcaggctccatctatgagatctctgggaatgagtgctgcctctccacgggggacctgatcaaggtcacccaggtccgcctccagaaggtggtctgtgagaacccgaagaccagccagaccatggagctcgcccccaacttccagggtaaggtgggcacctctgcctccccatgtgccctggcactctcctggcacacccgcaggctgctcgtgggcttgccacgtccagcagtcactccctcccctcggggtttgctcccgaggccctcacattcaccacaacccagcctcaagggtggggatgtcctcagagggtcggcaatgccctggactcagagaggttgcaccctctccctctcagtctctggtcacacctgcctctg

SEQ ID NO: 438229 - DNA, 343 bp, Homo sapiens
cctaagtggaaaatcccaggaacaccctgtctccaacccccaaccctatcctcattttctaccctgatccctttctcccttgccagagaatatttcacatgcatgtagcaaaaacaccaggggtcttgagaggtcatagcctgaaaaggaagtagagagagaagcagaggaagtgacacttaacgtgaatgaccgtttttcatggactctgcttccccatttcttgagaccctgatgatttctgctttttctcccaaagtcttctcaagtcttaggattgcagcaacacgctcggctgcccaaacccaaggcgaagaccttgccagagttcatcaaggatggc

SEQ ID NO: 438230 - DNA, 2581 bp, Homo sapiens
ggctgtactggtccgggattttgggatccgcggggaccatggagccggtgccgctgcaggacttcgtgcgcgccttggaccccgcctccctcccgcgcgtgctgcgggtctgctcgggggtctacttcgagggctacttcacccccctcaacaccccacagagctatgaaaccctggaggagctggtctctgccacaactcagagctccaagcagctgcccacttgcttcatgtcgacccacaggattgtcacagagggcagggtggtgactgaggaccagctcctcatgcttgaggctgtggtgatgcacctcgggatccgctctgcccgctgtgtcctgggcatggagggtcagcaggtcatcctgcacctgcccctatcccagaaggggcccttctggacatgggagcctagtgcccctcgaactctgctccaggtcctacaggatccagccctgaaagacctcgtcctcacctgccccaccctgccctggcattccctgatcctgcggccccagtatgagatccaagccatcatgcacatgcgcaggaccattgtcaagatcccttctaccctggaggtcgacgtggaggacgtcaccgcctcctcccggcacgtccactttatcaaaccgctgctgctgagcgaggtcctggcctgggaaggccctttccccctgtccatggagatcctggaggttcctgagggccgccccatcttcctcagcccgtgggtgggctccttgcaaaaaggccagaggctttgcgtctatggcctagcctcaccaccctggcgggtcctggcctcaagcaagggccgcaaggtgcccaggcacttcctggtgtcagggggctaccaaggcaagctgcggcggcggccaagggagttccccacggcctatgacctcctaggtgctttccagccaggccggccactccgggtggtggccacaaaggactgtgagggcgagagggaggagaatcccgagttcacgtccctggctgtgggtgaccggctggaggtgctggggcctggccaggcccatggggcccagggcagtgacgtggatgtcttggtttgtcagcggctgagtgaccaggctggggaggatgaggaggaagagtgcaaagaggaggcagagagcccagagcgggtcctgctgcccttccacttccctggcagtttcgtggaggagatgagtgacagccggcgctacagcctggcagatctgactgcccagttttcactgccttgtgaggtcaaggtggtggccaaggacaccagccaccccactgaccctctgacctccttcctgggcctgcggctggaggagaagatcacagagccattcttggtggtgagcctggactctgagcctgggatgtgctttgagatccctccccggtggctggacctgactgtcgtggaggccaaggggcagccagacttgccagaggggtctctccccatagccacagtggaggagctgacagacaccttctattatcgtcttcggaagttaccagcctgtgagatccaagcccccccacccaggccccctaaaaatcagggcctcagcaagcagaggagacacagcagtgagggaggcgtcaagtcttctcaagtcttaggattgcagcaacacgctcggctgcccaaacccaaggcgaagaccttgccagagttcatcaaggatggctccagtacgtacagcaagattcctgcccacaggaagggccacaggcccgctaagccccaaaggcaggatctagatgatgatgaacatgattatgaagaaatacttgagcaatttcagaaaaccatctaagtgctggaggaaccacgcttcctaactgctgcttctcagggaatccgacaccagccaaccattttaagcctctaaaagacctcgggcaagtctcacagaaactgagctgcagacggggagtagctttgtggaaactgatttgatggacactgcaccagcttccttcaggttctagattcttgctacttagggcgggctggtttggacctaacatctcgcacgtgactccctcagcctcagagccttgggatgcagagcagctggcagggttcctctcaatcctgcaaccccagctgtcccaccggtggatgcagaggggaatccgaggccatcaaccttggtgacagcagcgcagtgccaatgctgatcacactgcatgggagattttgttaacgtctgccacccccactctcacccccaagctctaagcccccgggaggcctggactgtcttcctcatctctgtagcaccaagcctgatagatctgtatatggtaaacaggggtttaaccacatgtggttaacatggattaatgtgggaatttggcttcaagaacacaaccttaggaccttgggccccaaaagctggtggtgaaatgagaggagccaatttaagaagacccttatggagacctgaggctgcagaaactggtaggtttcatcaggtggttaaagtcgtcaaagttgtaagtgactaaccaagattatttcattttaaaaccacagaataaaaatgacacctgagcttctcta

SEQ ID NO: 438231 - DNA, 1649 bp, Homo sapiens
ggctgtactggtccgggattttgggatccgcggggaccatggagccggtgccgctgcaggacttcgtgcgcgccttggaccccgcctccctcccgcgcgtgctgcgggtctgctcgggggtctacttcgagggctccatctatgagatctctgggaatgagtgctgcctctccacgggggacctgatcaaggtcacccaggtccgcctccagaaggtggtctgtgagaacccgaagaccagccagaccatggagctcgcccccaacttccagggctacttcacccccctcaacaccccacagagctatgaaaccctggaggagctggtctctgccacaactcagagctccaagcagctgcccacttgcttcatgtcgacccacaggattgtcacagagggcagggtggtgactgaggaccagctcctcatgcttgaggctgtggtgatgcacctcgggatccgctctgcccgctgtgtcctgggcatggagggtcagcaggtcatcctgcacctgcccctatcccagaaggggcccttctggacatgggagcctagtgcccctcgaactctgctccaggtcctacaggatccagccctgaaagacctcgtcctcacctgccccaccctgccctggcattccctgatcctgcggccccagtatgagatccaagccatcatgcacatcttctcaagtcttaggattgcagcaacacgctcggctgcccaaacccaaggcgaagaccttgccagagttcatcaaggatggctccagtacgtacagcaagattcctgcccacaggaagggccacaggcccgctaagccccaaaggcaggatctagatgatgatgaacatgattatgaagaaatacttgagcaatttcagaaaaccatctaagtgctggaggaaccacgcttcctaactgctgcttctcagggaatccgacaccagccaaccattttaagcctctaaaagacctcgggcaagtctcacagaaactgagctgcagacggggagtagctttgtggaaactgatttgatggacactgcaccagcttccttcaggttctagattcttgctacttagggcgggctggtttggacctaacatctcgcacgtgactccctcagcctcagagccttgggatgcagagcagctggcagggttcctctcaatcctgcaaccccagctgtcccaccggtggatgcagaggggaatccgaggccatcaaccttggtgacagcagcgcagtgccaatgctgatcacactgcatgggagattttgttaacgtctgccacccccactctcacccccaagctctaagcccccgggaggcctggactgtcttcctcatctctgtagcaccaagcctgatagatctgtatatggtaaacaggggtttaaccacatgtggttaacatggattaatgtgggaatttggcttcaagaacacaaccttaggaccttgggccccaaaagctggtggtgaaatgagaggagccaatttaagaagacccttatggagacctgaggctgcagaaactggtaggtttcatcaggtggttaaagtcgtcaaagttgtaagtgactaaccaagattatttcattttaaaaccacagaataaaaatgacacctgagcttctcta

SEQ ID NO: 438232 - DNA, 2155 bp, Homo sapiens
ggctgtactggtccgggattttgggatccgcggggaccatggagccggtgccgctgcaggacttcgtgcgcgccttggaccccgcctccctcccgcgcgtgctgcgggctccatctatgagatctctgggaatgagtgctgcctctccacgggggacctgatcaaggtcacccaggtccgcctccagaaggtggtctgtgagaacccgaagaccagccagaccatggagctcgcccccaacttccagggctacttcacccccctcaacaccccacagagctatgaaaccctggaggagctggtctctgccacaactcagagctccaagcagctgcccacttgcttcatgtcgacccacaggattgtcacagagggcagggtggtgactgaggaccagctcctcatgcttgaggctgtggtgatgcacctcgggatccgctctgcccgctgtgtcctgggcatggagggtcagcaggtcatcctgcacctgcccctatcccagaaggggcccttctggacatgggagcctagtgcccctcgaactctgctccaggtcctacaggatccagccctgaaagacctcgtcctcacctgccccaccctgccctggcattccctgatcctgcggccccagtatgagatccaagccatcatgcacacggctgagtgaccaggctggggaggatgaggaggaagagtgcaaagaggaggcagagagcccagagcgggtcctgctgcccttccacttccctggcagtttcgtggaggagatgagtgacagccggcgctacagcctggcagatctgactgcccagttttcactgccttgtgaggtcaaggtggtggccaaggacaccagccaccccactgaccctctgacctccttcctgggcctgcggctggaggagaagatcacagagccattcttggtggtgagcctggactctgagcctgggatgtgctttgagatccctccccggtggctggacctgactgtcgtggaggccaaggggcagccagacttgccagaggggtctctccccatagccacagtggaggagctgacagacaccttctattatcgtcttcggaagttaccagcctgtgagatccaagcccccccacccaggccccctaaaaatcagggcctcagcaagcagaggagacacagcagtgagggaggcgtcaagtcttctcaagtcttaggattgcagcaacacgctcggctgcccaaacccaaggcgaagaccttgccagagttcatcaaggatggctccagtacgtacagcaagattcctgcccacaggaagggccacaggcccgctaagccccaaaggcaggatctagatgatgatgaacatgattatgaagaaatacttgagcaatttcagaaaaccatctaagtgctggaggaaccacgcttcctaactgctgcttctcagggaatccgacaccagccaaccattttaagcctctaaaagacctcgggcaagtctcacagaaactgagctgcagacggggagtagctttgtggaaactgatttgatggacactgcaccagcttccttcaggttctagattcttgctacttagggcgggctggtttggacctaacatctcgcacgtgactccctcagcctcagagccttgggatgcagagcagctggcagggttcctctcaatcctgcaaccccagctgtcccaccggtggatgcagaggggaatccgaggccatcaaccttggtgacagcagcgcagtgccaatgctgatcacactgcatgggagattttgttaacgtctgccacccccactctcacccccaagctctaagcccccgggaggcctggactgtcttcctcatctctgtagcaccaagcctgatagatctgtatatggtaaacaggggtttaaccacatgtggttaacatggattaatgtgggaatttggcttcaagaacacaaccttaggaccttgggccccaaaagctggtggtgaaatgagaggagccaatttaagaagacccttatggagacctgaggctgcagaaactggtaggtttcatcaggtggttaaagtcgtcaaagttgtaagtgactaaccaagattatttcattttaaaaccacagaataaaaatgacacctgagcttctcta

SEQ ID NO: 438233 - DNA, 1830 bp, Homo sapiens
tgccaggaggggcaaggacagctgaggacgactgaacctgtgggcatgaggcaggaacgacagagcagggcatgccaggcagcaggcaccatgtgcaaaggcatggcagagcagagcttgttgggcaccagggcacaggctgcccagcacttggcccttgtccaatggggaaatggagtccttgtctccgcaggctccatctatgagatctctgggaatgagtgctgcctctccacgggggacctgatcaaggtcacccaggtccgcctccagaaggtggtctgtgagaacccgaagaccagccagaccatggagctcgcccccaacttccaggcggctgagtgaccaggctggggaggatgaggaggaagagtgcaaagaggaggcagagagcccagagcgggtcctgctgcccttccacttccctggcagtttcgtggaggagatgagtgacagccggcgctacagcctggcagatctgactgcccagttttcactgccttgtgaggtcaaggtggtggccaaggacaccagccaccccactgaccctctgacctccttcctgggcctgcggctggaggagaagatcacagagccattcttggtggtgagcctggactctgagcctgggatgtgctttgagatccctccccggtggctggacctgactgtcgtggaggccaaggggcagccagacttgccagaggggtctctccccatagccacagtggaggagctgacagacaccttctattatcgtcttcggaagttaccagcctgtgagatccaagcccccccacccaggccccctaaaaatcagggcctcagcaagcagaggagacacagcagtgagggaggcgtcaagtcttctcaagtcttaggattgcagcaacacgctcggctgcccaaacccaaggcgaagaccttgccagagttcatcaaggatggctccagtacgtacagcaagattcctgcccacaggaagggccacaggcccgctaagccccaaaggcaggatctagatgatgatgaacatgattatgaagaaatacttgagcaatttcagaaaaccatctaagtgctggaggaaccacgcttcctaactgctgcttctcagggaatccgacaccagccaaccattttaagcctctaaaagacctcgggcaagtctcacagaaactgagctgcagacggggagtagctttgtggaaactgatttgatggacactgcaccagcttccttcaggttctagattcttgctacttagggcgggctggtttggacctaacatctcgcacgtgactccctcagcctcagagccttgggatgcagagcagctggcagggttcctctcaatcctgcaaccccagctgtcccaccggtggatgcagaggggaatccgaggccatcaaccttggtgacagcagcgcagtgccaatgctgatcacactgcatgggagattttgttaacgtctgccacccccactctcacccccaagctctaagcccccgggaggcctggactgtcttcctcatctctgtagcaccaagcctgatagatctgtatatggtaaacaggggtttaaccacatgtggttaacatggattaatgtgggaatttggcttcaagaacacaaccttaggaccttgggccccaaaagctggtggtgaaatgagaggagccaatttaagaagacccttatggagacctgaggctgcagaaactggtaggtttcatcaggtggttaaagtcgtcaaagttgtaagtgactaaccaagattatttcattttaaaaccacagaataaaaatgacacctgagcttctcta

SEQ ID NO: 438234 - DNA, 1643 bp, Homo sapiens
  misc_feature (42)..(42): n is a, c, g, or t
gcccactctataggatcccccgccctcacagtcctttgtggncaccacccggagtggccggcctggctggaaagcacctaggaggtgctggggcctggccaggcccatggggcccagggcagtgacgtggatgtcttggtttgtcagcggctgagtgaccaggctggggaggatgaggaggaagagtgcaaagaggaggcagagagcccagagcgggtcctgctgcccttccacttccctggcagtttcgtggaggagatgagtgacagccggcgctacagcctggcagatctgactgcccagttttcactgccttgtgaggtcaaggtggtggccaaggacaccagccaccccactgaccctctgacctccttcctgggcctgcggctggaggagaagatcacagagccattcttggtggtgagcctggactctgagcctgggatgtgctttgagatccctccccggtggctggacctgactgtcgtggaggccaaggggcagccagacttgccagaggggtctctccccatagccacagtggaggagctgacagacaccttctattatcgtcttcggaagttaccagcctgtgagatccaagcccccccacccaggccccctaaaaatcagggcctcagcaagcagaggagacacagcagtgagggaggcgtcaagtcttctcaagtcttaggattgcagcaacacgctcggctgcccaaacccaaggcgaagaccttgccagagttcatcaaggatggctccagtacgtacagcaagattcctgcccacaggaagggccacaggcccgctaagccccaaaggcaggatctagatgatgatgaacatgattatgaagaaatacttgagcaatttcagaaaaccatctaagtgctggaggaaccacgcttcctaactgctgcttctcagggaatccgacaccagccaaccattttaagcctctaaaagacctcgggcaagtctcacagaaactgagctgcagacggggagtagctttgtggaaactgatttgatggacactgcaccagcttccttcaggttctagattcttgctacttagggcgggctggtttggacctaacatctcgcacgtgactccctcagcctcagagccttgggatgcagagcagctggcagggttcctctcaatcctgcaaccccagctgtcccaccggtggatgcagaggggaatccgaggccatcaaccttggtgacagcagcgcagtgccaatgctgatcacactgcatgggagattttgttaacgtctgccacccccactctcacccccaagctctaagcccccgggaggcctggactgtcttcctcatctctgtagcaccaagcctgatagatctgtatatggtaaacaggggtttaaccacatgtggttaacatggattaatgtgggaatttggcttcaagaacacaaccttaggaccttgggccccaaaagctggtggtgaaatgagaggagccaatttaagaagacccttatggagacctgaggctgcagaaactggtaggtttcatcaggtggttaaagtcgtcaaagttgtaagtgactaaccaagattatttcattttaaaaccacagaataaaaatgacacctgagcttctcta

SEQ ID NO: 438235 - DNA, 2479 bp, Homo sapiens
ggctgtactggtccgggattttgggatccgcggggaccatggagccggtgccgctgcaggacttcgtgcgcgccttggaccccgcctccctcccgcgcgtgctgcgggtctgctcgggggtctacttcgagggctccatctatgagatctctgggaatgagtgctgcctctccacgggggacctgatcaaggtcacccaggtccgcctccagaaggtggtctgtgagaacccgaagaccagccagaccatggagctcgcccccaacttccagggctacttcacccccctcaacaccccacagagctatgaaaccctggaggagctggtctctgccacaactcagagctccaagcagctgcccacttgcttcatgtcgacccacaggattgtcacagagggcagggtggtgactgaggaccagctcctcatgcttgaggctgtggtgatgcacctcgggatccgctctgcccgctgtgtcctgggcatggagggtcagcaggtcatcctgcacctgcccctatcccagaaggggcccttctggacatgggagcctagtgcccctcgaactctgctccaggtcctacaggatccagccctgaaagacctcgtcctcacctgccccaccctgccctggcattccctgatcctgcggccccagtatgagatccaagccatcatgcacatgcgcaggaccattgtcaagatcccttctaccctggaggtcgacgtggaggacgtcaccgcctcctcccggcacgtccactttatcaaaccgctgctgctgagcgaggtcctggcctgggaaggccctttccccctgtccatggagatcctggaggttcctgagggccgccccatcttcctcagcccgtgggtgggctccttgcaaaaaggccagaggctttgcgtctatggcctagcctcaccaccctggcgggtcctggcctcaagcaagggccgcaaggtgcccaggcacttcctggtgtcagggggctaccaaggcaagctgcggcggcggccaagggagttccccacggcctatgacctcctaggtgctttccagccaggccggccactccgggtggtggccacaaaggactgtgagggcgagagggaggagaatcccgagttcacgtccctggctgtgggtgaccggctggaggtgctggggcctggccaggcccatggggcccagggcagtgacgtggatgtcttggtttgtcagcggctgagtgaccaggctggggaggatgaggaggaagagtgcaaagaggaggcagagagcccagagcgggtcctgctgcccttccacttccctggcagtttcgtggaggagatgagtgacagccggcgctacagcctggcagatctgactgcccagttttcactgccttgtgaggtcaaggtggtggccaaggacaccagccaccccactgaccctctgacctccttcctgggcctgcggctggaggagaagatcacagagccattcttggtggtgagcctggactctgagcctgggatgtgctttgagatccctccccggtggctggacctgactgtcgtggaggccaaggggcagccagacttgccagaggggtctctccccatagccacagtggaggagctgacagacaccttctattatcgtcttcggaagttaccagcctgtgagatccaagcccccccacccaggccccctaaaaatcagggcctcagcaagcagaggagacacagcagtgagggaggcgtcaagtcttctcaagtcttaggattgcagcaacacgctcggctgcccaaacccaaggcgaagaccttgccagagttcatcaaggatggctccagtacgtacagcaagattcctgcccacaggaagggccacaggcccgctaagccccaaaggcaggatctagatgatgatgaacatgattatgaagaaatacttgagcaatttcagaaaaccatctaagtgctggaggaaccacgcttcctaactgctgcttctcagggaatccgacaccagccaaccattttaagcctctaaaagacctcgggcaagtctcacagaaactgagctgcagacggggagtagctttgtggaaactgatttgatggacactgcaccagcttccttcaggttctagattcttgctacttagggcgggctggtttggacctaacatctcgcacgtgactccctcagcctcagagccttgggatgcagagcagctggcagggttcctctcaatcctgcaaccccagctgtcccaccggtggatgcagaggggaatccgaggccatcaaccttggtgacagcagcgcagtgccaatgctgatcacactgcatgggagattttgttaacgtctgccacccccactctcacccccaagctctaagcccccgggaggcctggactgtcttcctcatcgcgtccggcaccaacccccatacattcacacaggaaaacacatatgacc

SEQ ID NO: 438236 - DNA, 4964 bp, Homo sapiens
atgcggggcgtgtggccgcccccggtgtccgccctgctgtcggcgctggggatgtcgacgtacaagcgggccacgctggacgaggaggacctggtggactcgctctccgagggcgacgcataccccaacggcctgcaggtgaacttccacagcccccggagtggccagaggtgctgggctgcacggacccaggtggagaagcggctggtggtgttggtggtacttctggcggcaggactggtggcctgcttggcagcactgggcatccagtaccagacaagatccccctctgtgtgcctgagcgaagcttgtgtctcagtgaccagctccatcttgagctccatggaccccacagtggacccctgccatgacttcttcagctacgcctgtgggggctggatcaaggccaacccagtccctgatggccactcacgctgggggaccttcagcaacctctgggaacacaaccaagcaatcatcaagcacctcctcgaaaactccacggccagcgtgagcgaggcagagagaaaggcgcaagtatactaccgtgcgtgcatgaacgagaccaggatcgaggagctcagggccaaacctctaatggagttgattgagaggctcgggggctggaacatcacaggtccctgggccaaggacaacttccaggacaccctgcaggtggtcaccgcccactaccgcacctcacccttcttctctgtctatgtcagtgccgattccaagaactccaacagcaacgtgatccaggtggaccagtctggcctgggcttgccctcgagagactattacctgaacaaaactgaaaacgagaaggtgctgaccggatatctgaactacatggtccagctggggaagctgctgggcggcggggacgaggaggccatccggccccagatgcagcagatcttggactttgagacggcactggccaacatcaccatcccacaggagaagcgccgtgatgaggagctcatctaccacaaagtgacggcagccgagctgcagaccttggcacccgccatcaactggttgccttttctcaacaccatcttctaccccgtggagatcaatgaatccgagcctattgtggtctatgacaaggaataccttgagcagatctccactctcatcaacaccaccgacagatgcctgctcaacaactacatgatctggaacctggtgcggaaaacaagctccttccttgaccagcgctttcaggacgccgatgagaagttcatggaagtcatgtacgggaccaagaagacctgtcttcctcgctggaagttttgcgtgagtgacacagaaaacaacctgggctttgcgttgggccccatgtttgtcaaagcaaccttcgccgaggacagcaagagcatagccaccgagatcatcctggagattaagaaggcatttgaggaaagcctgagcaccctgaagtggatggatgaggaaacccgaaaatcagccaaggaaaaggccgatgccatctacaacatgataggataccccaacttcatcatggatcccaaggagctggacaaagtgtttaatgactacactgcagttccagacctctactttgaaaatgccatgcggtttttcaacttctcatggagggtcactgccgatcagctcaggaaagcccccaacagagatcagtggagcatgaccccgcccatggtgaacgcctactactcgcccaccaagaatgagattgtgtttccggccgggatcctgcaggcaccattctacacacgctcctcacccaaggccttaaactttggtggcataggtgtcgtcgtgggccatgagctgactcatgcttttgatgatcaaggacgggagtatgacaaggacgggaacctccggccatggtggaagaactcatccgtggaggccttcaagcgtcagaccgagtgcatggtagagcagtacagcaactacagcgtgaacggggagccggtgaacgggcggcacaccctgggggagaacatcgccgacaacgggggtctcaaggcggcctatcgggcttaccagaactgggtgaagaagaacggggctgagcactcgctccccaccctgggcctcaccaataaccagctcttcttcctgggctttgcacaggtctggtgctccgtccgcacacctgagagctcccacgaaggcctcatcaccgatccccacagcccctctcgcttccgggtcatcggctccctctccaattccaaggagttctcagaacacttccgctgcccacctggctcacccatgaacccgcctcacaagtgcgaagtctggtaaggacgaagcggagagagccaagacggaggaggggaaggggctgaggacgagacccccatccagcctccagggcattgctcagcccgcttggccacccggggccctgcttcctcacactggcgggttttcagccggaaccgagcccatggtgttggctctcaacgtgacccgcagtctgatcccctgtgaagagccggacatcccaggcacacgtgtgcgccaccttcagcaggcattcgggtgctgggctggtggctcatcaggcctgggccccacactgacaagcgccagatacgccacaaataccactgtgtcaaatgctttcaagatatatttttggggaaactattttttaaacactgtggaatacactggaaatcttcagggaaaaacacatttaaacacttttttttttaaggaaagaattggtatatttattatgttctgtttttctaaataacctgtggacaagggaagccccactgatttactccctctcttccccactccctgtgaggctgggctgaggcacggatccctgggccacagagcaagtctccaaatcagacagctgcctcagcccctgggatgtgtgatttcagctcctgtcacctcatgcaagggcgtggagaccagtagaggtgtggaggccaggcagagagaggagcctgctctgcggggggcccagctcatgggcactgccccttcagctagcctgcctccgtcccctgagtccaacagtgggagccctagctgggaagttctgatccccaaagccacagcaggggactgatggctatagcagaatgaggtcgggtcaggaccctcaaacaccatctgggaacaccaagcaccctgaatcgagactgcaggagccctgcggggtgagactgtgtcagagatacactgctggccacaagtgtcccctctcagtcccaccttttcgggctgtcccatgtctatctcaggggcccgttacctctctgcagcagtcccccatcccagccacaccagggtctgtccggccaaccctcttccccagggaaaggagaaaagaggaggtgggcggatcacctgaggtcaggagtttgagaccagcctggccaacgtggtgaaaccccatctctactaaaaaaaattacaaaaattagccgggagtggtggtgggcacctgtaatcccagttactcgggaggctgaggcaagagaatctcttgagctcaggaggcagaggttgcagtgagctgagattgcgccactgcactccagcctgggtgacagagggagactccgtcccaaaaaaaagaaaagagaaacagctgtcacctcccgcaggacccaaatcctctctctgagcaccgtcatccaccacatggctgggcctggctcccaggaccagtccagtcctctagtgccttatctgaggctgcagccgccagtctccaccccaaggagacagcccctgctcctagatgcccttggcctccgcagtgcagcccccaggtgtcctgactgaagcacaggccatagccccatttccccggtgcctgcagggctaacctccacgggagcccaggagctctggccggcaggtccatggcacagggcatcggaagactgcaaaactgctggacttaccctgggctgcagtccattgtcggcccctgggttgaatcaagatagtacttgcagctagatggatgcttttagccaggggacattgtgaggggaagattcctccacccagtctggcctgtggtgtctgtctcctccctgagaccacagcttctccagtagcagactcatgggcgccaccaagtggaagcacctggagcggcctctgccatccagtggggaagccaggccccgagacggaggtgggggcagcacgtgccctccacagccaccgctttcccgcctcagcagcccaggcctcctggcccagccctgcctggacagtgctctcccctcacccgggaagctggaatcctcctgcccgagaggaagcagacggcacagggacacccctgccaccttgggatctgcctccaagctggtgcagggtatcgagagtggattccagatggaggtcctggtcccagcacgcagcagtcctggtagctctgcagaggagacaggaacccgagaagtagctgaagcagaagccagccgcagtccccttgccacatagaggcgggcttctcccagccatggtgtcccctctgcctcccctcccccgaccctcctgccttccgcgtggagggtggtggtcctgtagtgtcagcaccagcaccatgggcttggaccccctccctggacacaggcaggtgtcctagggctgggggtgcagcccgagggaatggagaccacactcatggctcaggtctgccggggccggcagggggttggggaagaagagggctcaggcccagcaggggtggaagcccctgccactgccactacccgctccagagctttaaggaaaatgaagtgagacccctccccttaggcctggggagccatagggctggcttctctgtgggtgcgtggacgtggggttgggagctgggaatctattttttgtattatgttttgagctactgtagttttggcgtggcactattgtaatggaaataaaatacttgtacggag

SEQ ID NO: 438237 - DNA, 5041 bp, Homo sapiens
cctggattagggctgaatctgtgggaaccagaccacccctgagacaggaggcagccctgatgcctctccagggcctgggcctgcagcggaaccccttcctccaagggaagcggggcccggggctcacgtcttccccgcccctcctgcctccttccctgcaggtgaacttccacagcccccggagtggccagaggtgctgggctgcacggacccaggtggagaagcggctggtggtgttggtggtacttctggcggcaggactggtggcctgcttggcagcactgggcatccagtaccagacaagatccccctctgtgtgcctgagcgaagcttgtgtctcagtgaccagctccatcttgagctccatggaccccacagtggacccctgccatgacttcttcagctacgcctgtgggggctggatcaaggccaacccagtccctgatggccactcacgctgggggaccttcagcaacctctgggaacacaaccaagcaatcatcaagcacctcctcgaaaactccacggccagcgtgagcgaggcagagagaaaggcgcaagtatactaccgtgcgtgcatgaacgagaccaggatcgaggagctcagggccaaacctctaatggagttgattgagaggctcgggggctggaacatcacaggtccctgggccaaggacaacttccaggacaccctgcaggtggtcaccgcccactaccgcacctcacccttcttctctgtctatgtcagtgccgattccaagaactccaacagcaacgtgatccaggtggaccagtctggcctgggcttgccctcgagagactattacctgaacaaaactgaaaacgagaaggtgctgaccggatatctgaactacatggtccagctggggaagctgctgggcggcggggacgaggaggccatccggccccagatgcagcagatcttggactttgagacggcactggccaacatcaccatcccacaggagaagcgccgtgatgaggagctcatctaccacaaagtgacggcagccgagctgcagaccttggcacccgccatcaactggttgccttttctcaacaccatcttctaccccgtggagatcaatgaatccgagcctattgtggtctatgacaaggaataccttgagcagatctccactctcatcaacaccaccgacagatgcctgctcaacaactacatgatctggaacctggtgcggaaaacaagctccttccttgaccagcgctttcaggacgccgatgagaagttcatggaagtcatgtacgggaccaagaagacctgtcttcctcgctggaagttttgcgtgagtgacacagaaaacaacctgggctttgcgttgggccccatgtttgtcaaagcaaccttcgccgaggacagcaagagcatagccaccgagatcatcctggagattaagaaggcatttgaggaaagcctgagcaccctgaagtggatggatgaggaaacccgaaaatcagccaaggaaaaggccgatgccatctacaacatgataggataccccaacttcatcatggatcccaaggagctggacaaagtgtttaatgactacactgcagttccagacctctactttgaaaatgccatgcggtttttcaacttctcatggagggtcactgccgatcagctcaggaaagcccccaacagagatcagtggagcatgaccccgcccatggtgaacgcctactactcgcccaccaagaatgagattgtgtttccggccgggatcctgcaggcaccattctacacacgctcctcacccaaggccttaaactttggtggcataggtgtcgtcgtgggccatgagctgactcatgcttttgatgatcaaggacgggagtatgacaaggacgggaacctccggccatggtggaagaactcatccgtggaggccttcaagcgtcagaccgagtgcatggtagagcagtacagcaactacagcgtgaacggggagccggtgaacgggcggcacaccctgggggagaacatcgccgacaacgggggtctcaaggcggcctatcgggcttaccagaactgggtgaagaagaacggggctgagcactcgctccccaccctgggcctcaccaataaccagctcttcttcctgggctttgcacaggtctggtgctccgtccgcacacctgagagctcccacgaaggcctcatcaccgatccccacagcccctctcgcttccgggtcatcggctccctctccaattccaaggagttctcagaacacttccgctgcccacctggctcacccatgaacccgcctcacaagtgcgaagtctggtaaggacgaagcggagagagccaagacggaggaggggaaggggctgaggacgagacccccatccagcctccagggcattgctcagcccgcttggccacccggggccctgcttcctcacactggcgggttttcagccggaaccgagcccatggtgttggctctcaacgtgacccgcagtctgatcccctgtgaagagccggacatcccaggcacacgtgtgcgccaccttcagcaggcattcgggtgctgggctggtggctcatcaggcctgggccccacactgacaagcgccagatacgccacaaataccactgtgtcaaatgctttcaagatatatttttggggaaactattttttaaacactgtggaatacactggaaatcttcagggaaaaacacatttaaacacttttttttttaaggaaagaattggtatatttattatgttctgtttttctaaataacctgtggacaagggaagccccactgatttactccctctcttccccactccctgtgaggctgggctgaggcacggatccctgggccacagagcaagtctccaaatcagacagctgcctcagcccctgggatgtgtgatttcagctcctgtcacctcatgcaagggcgtggagaccagtagaggtgtggaggccaggcagagagaggagcctgctctgcggggggcccagctcatgggcactgccccttcagctagcctgcctccgtcccctgagtccaacagtgggagccctagctgggaagttctgatccccaaagccacagcaggggactgatggctatagcagaatgaggtcgggtcaggaccctcaaacaccatctgggaacaccaagcaccctgaatcgagactgcaggagccctgcggggtgagactgtgtcagagatacactgctggccacaagtgtcccctctcagtcccaccttttcgggctgtcccatgtctatctcaggggcccgttacctctctgcagcagtcccccatcccagccacaccagggtctgtccggccaaccctcttccccagggaaaggagaaaagagaaaacaggctgggcccggtggctcactcctgtaatcccagcactttgggaggttgaggtgggcggatcacctgaggtcaggagtttgagaccagcctggccaacgtggtgaaaccccatctctactaaaaaaaattacaaaaattagccgggagtggtggtgggcacctgtaatcccagttactcgggaggctgaggcaagagaatctcttgagctcaggaggcagaggttgcagtgagctgagattgcgccactgcactccagcctgggtgacagagggagactccgtcccaaaaaaaagaaaagagaaacagctgtcacctcccgcaggacccaaatcctctctctgagcaccgtcatccaccacatggctgggcctggctcccaggaccagtccagtcctctagtgccttatctgaggctgcagccgccagtctccaccccaaggagacagcccctgctcctagatgcccttggcctccgcagtgcagcccccaggtgtcctgactgaagcacaggccatagccccatttccccggtgcctgcagggctaacctccacgggagcccaggagctctggccggcaggtccatggcacagggcatcggaagactgcaaaactgctggacttaccctgggctgcagtccattgtcggcccctgggttgaatcaagatagtacttgcagctagatggatgcttttagccaggggacattgtgaggggaagattcctccacccagtctggcctgtggtgtctgtctcctccctgagaccacagcttctccagtagcagactcatgggcgccaccaagtggaagcacctggagcggcctctgccatccagtggggaagccaggccccgagacggaggtgggggcagcacgtgccctccacagccaccgctttcccgcctcagcagcccaggcctcctggcccagccctgcctggacagtgctctcccctcacccgggaagctggaatcctcctgcccgagaggaagcagacggcacagggacacccctgccaccttgggatctgcctccaagctggtgcagggtatcgagagtggattccagatggaggtcctggtcccagcacgcagcagtcctggtagctctgcagaggagacaggaacccgagaagtagctgaagcagaagccagccgcagtccccttgccacatagaggcgggcttctcccagccatggtgtcccctctgcctcccctcccccgaccctcctgccttccgcgtggagggtggtggtcctgtagtgtcagcaccagcaccatgggcttggaccccctccctggacacaggcaggtgtcctagggctgggggtgcagcccgagggaatggagaccacactcatggctcaggtctgccggggccggcagggggttggggaagaagagggctcaggcccagcaggggtggaagcccctgccactgccactacccgctccagagctttaaggaaaatgaagtgagacccctccccttaggcctggggagccatagggctggcttctctgtgggtgcgtggacgtggggttgggagctgggaatctattttttgtattatgttttgagctactgtagttttggcgtggcactattgtaatggaaataaaatacttgtacggag

SEQ ID NO: 438238 - DNA, 5252 bp, Homo sapiens
cgcgccaagggttaagggcccgcgcgggcgcggggagtgcagcctcaggccgtgattggctgcgccacccaggcccccgcgccctgccattggccccgcggcggccccgcccctccggcactcggcgccgaagccgcgagctcgcccgctggagctgagcgcgccgcctgggccaggcagccgagccgtccgagcagctgggctgggagcagggaacccggagctgggaatcgggagccgggcgcggggagctgcgcgaagccggggcggagcacgcgagctatgatgtcgacgtacaagcgggccacgctggacgaggaggacctggtggactcgctctccgagggcgacgcataccccaacggcctgcaggtgaacttccacagcccccggagtggccagaggtgctgggctgcacggacccaggtggagaagcggctggtggtgttggtggtacttctggcggcaggactggtggcctgcttggcagcactgggcatccagtaccagacaagatccccctctgtgtgcctgagcgaagcttgtgtctcagtgaccagctccatcttgagctccatggaccccacagtggacccctgccatgacttcttcagctacgcctgtgggggctggatcaaggccaacccagtccctgatggccactcacgctgggggaccttcagcaacctctgggaacacaaccaagcaatcatcaagcacctcctcgaaaactccacggccagcgtgagcgaggcagagagaaaggcgcaagtatactaccgtgcgtgcatgaacgagaccaggatcgaggagctcagggccaaacctctaatggagttgattgagaggctcgggggctggaacatcacaggtccctgggccaaggacaacttccaggacaccctgcaggtggtcaccgcccactaccgcacctcacccttcttctctgtctatgtcagtgccgattccaagaactccaacagcaacgtgatccaggtggaccagtctggcctgggcttgccctcgagagactattacctgaacaaaactgaaaacgagaaggtgctgaccggatatctgaactacatggtccagctggggaagctgctgggcggcggggacgaggaggccatccggccccagatgcagcagatcttggactttgagacggcactggccaacatcaccatcccacaggagaagcgccgtgatgaggagctcatctaccacaaagtgacggcagccgagctgcagaccttggcacccgccatcaactggttgccttttctcaacaccatcttctaccccgtggagatcaatgaatccgagcctattgtggtctatgacaaggaataccttgagcagatctccactctcatcaacaccaccgacagatgcctgctcaacaactacatgatctggaacctggtgcggaaaacaagctccttccttgaccagcgctttcaggacgccgatgagaagttcatggaagtcatgtacgggaccaagaagacctgtcttcctcgctggaagttttgcgtgagtgacacagaaaacaacctgggctttgcgttgggccccatgtttgtcaaagcaaccttcgccgaggacagcaagagcatagccaccgagatcatcctggagattaagaaggcatttgaggaaagcctgagcaccctgaagtggatggatgaggaaacccgaaaatcagccaaggaaaaggccgatgccatctacaacatgataggataccccaacttcatcatggatcccaaggagctggacaaagtgtttaatgactacactgcagttccagacctctactttgaaaatgccatgcggtttttcaacttctcatggagggtcactgccgatcagctcaggaaagcccccaacagagatcagtggagcatgaccccgcccatggtgaacgcctactactcgcccaccaagaatgagattgtgtttccggccgggatcctgcaggcaccattctacacacgctcctcacccaaggccttaaactttggtggcataggtgtcgtcgtgggccatgagctgactcatgcttttgatgatcaaggacgggagtatgacaaggacgggaacctccggccatggtggaagaactcatccgtggaggccttcaagcgtcagaccgagtgcatggtagagcagtacagcaactacagcgtgaacggggagccggtgaacgggcggcacaccctgggggagaacatcgccgacaacgggggtctcaaggcggcctatcgggcttaccagaactgggtgaagaagaacggggctgagcactcgctccccaccctgggcctcaccaataaccagctcttcttcctgggctttgcacaggtctggtgctccgtccgcacacctgagagctcccacgaaggcctcatcaccgatccccacagcccctctcgcttccgggtcatcggctccctctccaattccaaggagttctcagaacacttccgctgcccacctggctcacccatgaacccgcctcacaagtgcgaagtctggtaaggacgaagcggagagagccaagacggaggaggggaaggggctgaggacgagacccccatccagcctccagggcattgctcagcccgcttggccacccggggccctgcttcctcacactggcgggttttcagccggaaccgagcccatggtgttggctctcaacgtgacccgcagtctgatcccctgtgaagagccggacatcccaggcacacgtgtgcgccaccttcagcaggcattcgggtgctgggctggtggctcatcaggcctgggccccacactgacaagcgccagatacgccacaaataccactgtgtcaaatgctttcaagatatatttttggggaaactattttttaaacactgtggaatacactggaaatcttcagggaaaaacacatttaaacacttttttttttaaggaaagaattggtatatttattatgttctgtttttctaaataacctgtggacaagggaagccccactgatttactccctctcttccccactccctgtgaggctgggctgaggcacggatccctgggccacagagcaagtctccaaatcagacagctgcctcagcccctgggatgtgtgatttcagctcctgtcacctcatgcaagggcgtggagaccagtagaggtgtggaggccaggcagagagaggagcctgctctgcggggggcccagctcatgggcactgccccttcagctagcctgcctccgtcccctgagtccaacagtgggagccctagctgggaagttctgatccccaaagccacagcaggggactgatggctatagcagaatgaggtcgggtcaggaccctcaaacaccatctgggaacaccaagcaccctgaatcgagactgcaggagccctgcggggtgagactgtgtcagagatacactgctggccacaagtgtcccctctcagtcccaccttttcgggctgtcccatgtctatctcaggggcccgttacctctctgcagcagtcccccatcccagccacaccagggtctgtccggccaaccctcttccccagggaaaggagaaaagagaaaacaggctgggcccggtggctcactcctgtaatcccagcactttgggaggttgaggtgggcggatcacctgaggtcaggagtttgagaccagcctggccaacgtggtgaaaccccatctctactaaaaaaaattacaaaaattagccgggagtggtggtgggcacctgtaatcccagttactcgggaggctgaggcaagagaatctcttgagctcaggaggcagaggttgcagtgagctgagattgcgccactgcactccagcctgggtgacagagggagactccgtcccaaaaaaaagaaaagagaaacagctgtcacctcccgcaggacccaaatcctctctctgagcaccgtcatccaccacatggctgggcctggctcccaggaccagtccagtcctctagtgccttatctgaggctgcagccgccagtctccaccccaaggagacagcccctgctcctagatgcccttggcctccgcagtgcagcccccaggtgtcctgactgaagcacaggccatagccccatttccccggtgcctgcagggctaacctccacgggagcccaggagctctggccggcaggtccatggcacagggcatcggaagactgcaaaactgctggacttaccctgggctgcagtccattgtcggcccctgggttgaatcaagatagtacttgcagctagatggatgcttttagccaggggacattgtgaggggaagattcctccacccagtctggcctgtggtgtctgtctcctccctgagaccacagcttctccagtagcagactcatgggcgccaccaagtggaagcacctggagcggcctctgccatccagtggggaagccaggccccgagacggaggtgggggcagcacgtgccctccacagccaccgctttcccgcctcagcagcccaggcctcctggcccagccctgcctggacagtgctctcccctcacccgggaagctggaatcctcctgcccgagaggaagcagacggcacagggacacccctgccaccttgggatctgcctccaagctggtgcagggtatcgagagtggattccagatggaggtcctggtcccagcacgcagcagtcctggtagctctgcagaggagacaggaacccgagaagtagctgaagcagaagccagccgcagtccccttgccacatagaggcgggcttctcccagccatggtgtcccctctgcctcccctcccccgaccctcctgccttccgcgtggagggtggtggtcctgtagtgtcagcaccagcaccatgggcttggaccccctccctggacacaggcaggtgtcctagggctgggggtgcagcccgagggaatggagaccacactcatggctcaggtctgccggggccggcagggggttggggaagaagagggctcaggcccagcaggggtggaagcccctgccactgccactacccgctccagagctttaaggaaaatgaagtgagacccctccccttaggcctggggagccatagggctggcttctctgtgggtgcgtggacgtggggttgggagctgggaatctattttttgtattatgttttgagctactgtagttttggcgtggcactattgtaatggaaataaaatacttgtacggag

SEQ ID NO: 438239 - DNA, 5024 bp, Homo sapiens
tcgggcgcgagagccatggaggcgctgagggagtccgtgctgcatttggccttgcagatgtcgacgtacaagcgggccacgctggacgaggaggacctggtggactcgctctccgagggcgacgcataccccaacggcctgcaggtgaacttccacagcccccggagtggccagaggtgctgggctgcacggacccaggtggagaagcggctggtggtgttggtggtacttctggcggcaggactggtggcctgcttggcagcactgggcatccagtaccagacaagatccccctctgtgtgcctgagcgaagcttgtgtctcagtgaccagctccatcttgagctccatggaccccacagtggacccctgccatgacttcttcagctacgcctgtgggggctggatcaaggccaacccagtccctgatggccactcacgctgggggaccttcagcaacctctgggaacacaaccaagcaatcatcaagcacctcctcgaaaactccacggccagcgtgagcgaggcagagagaaaggcgcaagtatactaccgtgcgtgcatgaacgagaccaggatcgaggagctcagggccaaacctctaatggagttgattgagaggctcgggggctggaacatcacaggtccctgggccaaggacaacttccaggacaccctgcaggtggtcaccgcccactaccgcacctcacccttcttctctgtctatgtcagtgccgattccaagaactccaacagcaacgtgatccaggtggaccagtctggcctgggcttgccctcgagagactattacctgaacaaaactgaaaacgagaaggtgctgaccggatatctgaactacatggtccagctggggaagctgctgggcggcggggacgaggaggccatccggccccagatgcagcagatcttggactttgagacggcactggccaacatcaccatcccacaggagaagcgccgtgatgaggagctcatctaccacaaagtgacggcagccgagctgcagaccttggcacccgccatcaactggttgccttttctcaacaccatcttctaccccgtggagatcaatgaatccgagcctattgtggtctatgacaaggaataccttgagcagatctccactctcatcaacaccaccgacagatgcctgctcaacaactacatgatctggaacctggtgcggaaaacaagctccttccttgaccagcgctttcaggacgccgatgagaagttcatggaagtcatgtacgggaccaagaagacctgtcttcctcgctggaagttttgcgtgagtgacacagaaaacaacctgggctttgcgttgggccccatgtttgtcaaagcaaccttcgccgaggacagcaagagcatagccaccgagatcatcctggagattaagaaggcatttgaggaaagcctgagcaccctgaagtggatggatgaggaaacccgaaaatcagccaaggaaaaggccgatgccatctacaacatgataggataccccaacttcatcatggatcccaaggagctggacaaagtgtttaatgactacactgcagttccagacctctactttgaaaatgccatgcggtttttcaacttctcatggagggtcactgccgatcagctcaggaaagcccccaacagagatcagtggagcatgaccccgcccatggtgaacgcctactactcgcccaccaagaatgagattgtgtttccggccgggatcctgcaggcaccattctacacacgctcctcacccaaggccttaaactttggtggcataggtgtcgtcgtgggccatgagctgactcatgcttttgatgatcaaggacgggagtatgacaaggacgggaacctccggccatggtggaagaactcatccgtggaggccttcaagcgtcagaccgagtgcatggtagagcagtacagcaactacagcgtgaacggggagccggtgaacgggcggcacaccctgggggagaacatcgccgacaacgggggtctcaaggcggcctatcgggcttaccagaactgggtgaagaagaacggggctgagcactcgctccccaccctgggcctcaccaataaccagctcttcttcctgggctttgcacaggtctggtgctccgtccgcacacctgagagctcccacgaaggcctcatcaccgatccccacagcccctctcgcttccgggtcatcggctccctctccaattccaaggagttctcagaacacttccgctgcccacctggctcacccatgaacccgcctcacaagtgcgaagtctggtaaggacgaagcggagagagccaagacggaggaggggaaggggctgaggacgagacccccatccagcctccagggcattgctcagcccgcttggccacccggggccctgcttcctcacactggcgggttttcagccggaaccgagcccatggtgttggctctcaacgtgacccgcagtctgatcccctgtgaagagccggacatcccaggcacacgtgtgcgccaccttcagcaggcattcgggtgctgggctggtggctcatcaggcctgggccccacactgacaagcgccagatacgccacaaataccactgtgtcaaatgctttcaagatatatttttggggaaactattttttaaacactgtggaatacactggaaatcttcagggaaaaacacatttaaacacttttttttttaaggaaagaattggtatatttattatgttctgtttttctaaataacctgtggacaagggaagccccactgatttactccctctcttccccactccctgtgaggctgggctgaggcacggatccctgggccacagagcaagtctccaaatcagacagctgcctcagcccctgggatgtgtgatttcagctcctgtcacctcatgcaagggcgtggagaccagtagaggtgtggaggccaggcagagagaggagcctgctctgcggggggcccagctcatgggcactgccccttcagctagcctgcctccgtcccctgagtccaacagtgggagccctagctgggaagttctgatccccaaagccacagcaggggactgatggctatagcagaatgaggtcgggtcaggaccctcaaacaccatctgggaacaccaagcaccctgaatcgagactgcaggagccctgcggggtgagactgtgtcagagatacactgctggccacaagtgtcccctctcagtcccaccttttcgggctgtcccatgtctatctcaggggcccgttacctctctgcagcagtcccccatcccagccacaccagggtctgtccggccaaccctcttccccagggaaaggagaaaagagaaaacaggctgggcccggtggctcactcctgtaatcccagcactttgggaggttgaggtgggcggatcacctgaggtcaggagtttgagaccagcctggccaacgtggtgaaaccccatctctactaaaaaaaattacaaaaattagccgggagtggtggtgggcacctgtaatcccagttactcgggaggctgaggcaagagaatctcttgagctcaggaggcagaggttgcagtgagctgagattgcgccactgcactccagcctgggtgacagagggagactccgtcccaaaaaaaagaaaagagaaacagctgtcacctcccgcaggacccaaatcctctctctgagcaccgtcatccaccacatggctgggcctggctcccaggaccagtccagtcctctagtgccttatctgaggctgcagccgccagtctccaccccaaggagacagcccctgctcctagatgcccttggcctccgcagtgcagcccccaggtgtcctgactgaagcacaggccatagccccatttccccggtgcctgcagggctaacctccacgggagcccaggagctctggccggcaggtccatggcacagggcatcggaagactgcaaaactgctggacttaccctgggctgcagtccattgtcggcccctgggttgaatcaagatagtacttgcagctagatggatgcttttagccaggggacattgtgaggggaagattcctccacccagtctggcctgtggtgtctgtctcctccctgagaccacagcttctccagtagcagactcatgggcgccaccaagtggaagcacctggagcggcctctgccatccagtggggaagccaggccccgagacggaggtgggggcagcacgtgccctccacagccaccgctttcccgcctcagcagcccaggcctcctggcccagccctgcctggacagtgctctcccctcacccgggaagctggaatcctcctgcccgagaggaagcagacggcacagggacacccctgccaccttgggatctgcctccaagctggtgcagggtatcgagagtggattccagatggaggtcctggtcccagcacgcagcagtcctggtagctctgcagaggagacaggaacccgagaagtagctgaagcagaagccagccgcagtccccttgccacatagaggcgggcttctcccagccatggtgtcccctctgcctcccctcccccgaccctcctgccttccgcgtggagggtggtggtcctgtagtgtcagcaccagcaccatgggcttggaccccctccctggacacaggcaggtgtcctagggctgggggtgcagcccgagggaatggagaccacactcatggctcaggtctgccggggccggcagggggttggggaagaagagggctcaggcccagcaggggtggaagcccctgccactgccactacccgctccagagctttaaggaaaatgaagtgagacccctccccttaggcctggggagccatagggctggcttctctgtgggtgcgtggacgtggggttgggagctgggaatctattttttgtattatgttttgagctactgtagttttggcgtggcactattgtaatggaaataaaatacttgtacggag

SEQ ID NO: 438240 - DNA, 5230 bp, Homo sapiens
cccagatttctcctccacggctgcacagtgccaggaagggaactgagaagaccaaagtggaggttctttaccttccccaacacactcggggccaggcgtggcacccacaactgcaaatgagacaattagggagaataagtgctggctgccctgtcagcccagagcctcagtctgcccagggcacccagactctgtgaggttcccacctgaagaagcagttccatcttccacaaggagcacaggaccaagagtccaggacccagatgtcgacgtacaagcgggccacgctggacgaggaggacctggtggactcgctctccgagggcgacgcataccccaacggcctgcaggtgaacttccacagcccccggagtggccagaggtgctgggctgcacggacccaggtggagaagcggctggtggtgttggtggtacttctggcggcaggactggtggcctgcttggcagcactgggcatccagtaccagacaagatccccctctgtgtgcctgagcgaagcttgtgtctcagtgaccagctccatcttgagctccatggaccccacagtggacccctgccatgacttcttcagctacgcctgtgggggctggatcaaggccaacccagtccctgatggccactcacgctgggggaccttcagcaacctctgggaacacaaccaagcaatcatcaagcacctcctcgaaaactccacggccagcgtgagcgaggcagagagaaaggcgcaagtatactaccgtgcgtgcatgaacgagaccaggatcgaggagctcagggccaaacctctaatggagttgattgagaggctcgggggctggaacatcacaggtccctgggccaaggacaacttccaggacaccctgcaggtggtcaccgcccactaccgcacctcacccttcttctctgtctatgtcagtgccgattccaagaactccaacagcaacgtgatccaggtggaccagtctggcctgggcttgccctcgagagactattacctgaacaaaactgaaaacgagaaggtgctgaccggatatctgaactacatggtccagctggggaagctgctgggcggcggggacgaggaggccatccggccccagatgcagcagatcttggactttgagacggcactggccaacatcaccatcccacaggagaagcgccgtgatgaggagctcatctaccacaaagtgacggcagccgagctgcagaccttggcacccgccatcaactggttgccttttctcaacaccatcttctaccccgtggagatcaatgaatccgagcctattgtggtctatgacaaggaataccttgagcagatctccactctcatcaacaccaccgacagatgcctgctcaacaactacatgatctggaacctggtgcggaaaacaagctccttccttgaccagcgctttcaggacgccgatgagaagttcatggaagtcatgtacgggaccaagaagacctgtcttcctcgctggaagttttgcgtgagtgacacagaaaacaacctgggctttgcgttgggccccatgtttgtcaaagcaaccttcgccgaggacagcaagagcatagccaccgagatcatcctggagattaagaaggcatttgaggaaagcctgagcaccctgaagtggatggatgaggaaacccgaaaatcagccaaggaaaaggccgatgccatctacaacatgataggataccccaacttcatcatggatcccaaggagctggacaaagtgtttaatgactacactgcagttccagacctctactttgaaaatgccatgcggtttttcaacttctcatggagggtcactgccgatcagctcaggaaagcccccaacagagatcagtggagcatgaccccgcccatggtgaacgcctactactcgcccaccaagaatgagattgtgtttccggccgggatcctgcaggcaccattctacacacgctcctcacccaaggccttaaactttggtggcataggtgtcgtcgtgggccatgagctgactcatgcttttgatgatcaaggacgggagtatgacaaggacgggaacctccggccatggtggaagaactcatccgtggaggccttcaagcgtcagaccgagtgcatggtagagcagtacagcaactacagcgtgaacggggagccggtgaacgggcggcacaccctgggggagaacatcgccgacaacgggggtctcaaggcggcctatcgggcttaccagaactgggtgaagaagaacggggctgagcactcgctccccaccctgggcctcaccaataaccagctcttcttcctgggctttgcacaggtctggtgctccgtccgcacacctgagagctcccacgaaggcctcatcaccgatccccacagcccctctcgcttccgggtcatcggctccctctccaattccaaggagttctcagaacacttccgctgcccacctggctcacccatgaacccgcctcacaagtgcgaagtctggtaaggacgaagcggagagagccaagacggaggaggggaaggggctgaggacgagacccccatccagcctccagggcattgctcagcccgcttggccacccggggccctgcttcctcacactggcgggttttcagccggaaccgagcccatggtgttggctctcaacgtgacccgcagtctgatcccctgtgaagagccggacatcccaggcacacgtgtgcgccaccttcagcaggcattcgggtgctgggctggtggctcatcaggcctgggccccacactgacaagcgccagatacgccacaaataccactgtgtcaaatgctttcaagatatatttttggggaaactattttttaaacactgtggaatacactggaaatcttcagggaaaaacacatttaaacacttttttttttaaggaaagaattggtatatttattatgttctgtttttctaaataacctgtggacaagggaagccccactgatttactccctctcttccccactccctgtgaggctgggctgaggcacggatccctgggccacagagcaagtctccaaatcagacagctgcctcagcccctgggatgtgtgatttcagctcctgtcacctcatgcaagggcgtggagaccagtagaggtgtggaggccaggcagagagaggagcctgctctgcggggggcccagctcatgggcactgccccttcagctagcctgcctccgtcccctgagtccaacagtgggagccctagctgggaagttctgatccccaaagccacagcaggggactgatggctatagcagaatgaggtcgggtcaggaccctcaaacaccatctgggaacaccaagcaccctgaatcgagactgcaggagccctgcggggtgagactgtgtcagagatacactgctggccacaagtgtcccctctcagtcccaccttttcgggctgtcccatgtctatctcaggggcccgttacctctctgcagcagtcccccatcccagccacaccagggtctgtccggccaaccctcttccccagggaaaggagaaaagagaaaacaggctgggcccggtggctcactcctgtaatcccagcactttgggaggttgaggtgggcggatcacctgaggtcaggagtttgagaccagcctggccaacgtggtgaaaccccatctctactaaaaaaaattacaaaaattagccgggagtggtggtgggcacctgtaatcccagttactcgggaggctgaggcaagagaatctcttgagctcaggaggcagaggttgcagtgagctgagattgcgccactgcactccagcctgggtgacagagggagactccgtcccaaaaaaaagaaaagagaaacagctgtcacctcccgcaggacccaaatcctctctctgagcaccgtcatccaccacatggctgggcctggctcccaggaccagtccagtcctctagtgccttatctgaggctgcagccgccagtctccaccccaaggagacagcccctgctcctagatgcccttggcctccgcagtgcagcccccaggtgtcctgactgaagcacaggccatagccccatttccccggtgcctgcagggctaacctccacgggagcccaggagctctggccggcaggtccatggcacagggcatcggaagactgcaaaactgctggacttaccctgggctgcagtccattgtcggcccctgggttgaatcaagatagtacttgcagctagatggatgcttttagccaggggacattgtgaggggaagattcctccacccagtctggcctgtggtgtctgtctcctccctgagaccacagcttctccagtagcagactcatgggcgccaccaagtggaagcacctggagcggcctctgccatccagtggggaagccaggccccgagacggaggtgggggcagcacgtgccctccacagccaccgctttcccgcctcagcagcccaggcctcctggcccagccctgcctggacagtgctctcccctcacccgggaagctggaatcctcctgcccgagaggaagcagacggcacagggacacccctgccaccttgggatctgcctccaagctggtgcagggtatcgagagtggattccagatggaggtcctggtcccagcacgcagcagtcctggtagctctgcagaggagacaggaacccgagaagtagctgaagcagaagccagccgcagtccccttgccacatagaggcgggcttctcccagccatggtgtcccctctgcctcccctcccccgaccctcctgccttccgcgtggagggtggtggtcctgtagtgtcagcaccagcaccatgggcttggaccccctccctggacacaggcaggtgtcctagggctgggggtgcagcccgagggaatggagaccacactcatggctcaggtctgccggggccggcagggggttggggaagaagagggctcaggcccagcaggggtggaagcccctgccactgccactacccgctccagagctttaaggaaaatgaagtgagacccctccccttaggcctggggagccatagggctggcttctctgtgggtgcgtggacgtggggttgggagctgggaatctattttttgtattatgttttgagctactgtagttttggcgtggcactattgtaatggaaataaaatacttgtacggag

SEQ ID NO: 438241 - DNA, 4656 bp, Homo sapiens
atgcggggcgtgtggccgcccccggtgtccgccctgctgtcggcgctggggatgtcgacgtacaagcgggccacgctggacgaggaggacctggtggactcgctctccgagggcgacgcataccccaacggcctgcaggtgaacttccacagcccccggagtggccagaggtgctgggctgcacggacccaggtggagaagcggctggtggtgttggtggtacttctggcggcaggactggtggcctgcttggcagcactgggcatccagtaccagacaagatccccctctgtgtgcctgagcgaagcttgtgtctcagtgaccagctccatcttgagctccatggaccccacagtggacccctgccatgacttcttcagctacgcctgtgggggctggatcaaggccaacccagtccctgatggccactcacgctgggggaccttcagcaacctctgggaacacaaccaagcaatcatcaagcacctcctcgaaaactccacggccagcgtgagcgaggcagagagaaaggcgcaagtatactaccgtgcgtgcatgaacgagaccaggatcgaggagctcagggccaaacctctaatggagttgattgagaggctcgggggctggaacatcacaggtccctgggccaaggacaacttccaggacaccctgcaggtggtcaccgcccactaccgcacctcacccttcttctctgtctatgtcagtgccgattccaagaactccaacagcaacgtgatccaggtggaccagtctggcctgggcttgccctcgagagactattacctgaacaaaactgaaaacgagaaggtgctgaccggatatctgaactacatggtccagctggggaagctgctgggcggcggggacgaggaggccatccggccccagatgcagcagatcttggactttgagacggcactggccaacatcaccatcccacaggagaagcgccgtgatgaggagctcatctaccacaaagtgacggcagccgagctgcagaccttggcacccgccatcaactggttgccttttctcaacaccatcttctaccccgtggagatcaatgaatccgagcctattgtggtctatgacaaggaataccttgagcagatctccactctcatcaacaccaccgacagatgcctgctcaacaactacatgatctggaacctggtgcggaaaacaagctccttccttgaccagcgctttcaggacgccgatgagaagttcatggaagtcatgtacgggaccaagaagacctgtcttcctcgctggaagttttgcgtgagtgacacagaaaacaacctgggctttgcgttgggccccatgtttgtcaaagcaaccttcgccgaggacagcaagagcatagccaccgagatcatcctggagattaagaaggcatttgaggaaagcctgagcaccctgaagtggatggatgaggaaacccgaaaatcagccaaggaaaaggccgatgccatctacaacatgataggataccccaacttcatcatggatcccaaggagctggacaaagtgtttaatgactacactgcagttccagacctctactttgaaaatgccatgcggtttttcaacttctcatggagggtcactgccgatcagctcaggaaagcccccaacagagatcagtggagcatgaccccgcccatggtgaacgcctactactcgcccaccaagaatgagattgtgtttccggccgggatcctgcaggcaccattctacacacgctcctcacccaaggccttaaactttggtggcataggtgtcgtcgtgggccatgagctgactcatgcttttgatgatcaaggacgggagtatgacaaggacgggaacctccggccatggtggaagaactcatccgtggaggccttcaagcgtcagaccgagtgcatggtagagcagtacagcaactacagcgtgaacggggagccggtgaacgggcggcacaccctgggggagaacatcgccgacaacgggggtctcaaggcggcctatcgggcttaccagaactgggtgaagaagaacggggctgagcactcgctccccaccctgggcctcaccaataaccagctcttcttcctgggctttgcacaggtctggtgctccgtccgcacacctgagagctcccacgaaggcctcatcaccgatccccacagcccctctcgcttccgggtcatcggctccctctccaattccaaggagttctcagaacacttccgctgcccacctggctcacccatgaacccgcctcacaagtgcgaagtctggtaaggacgaagcggagagagccaagacggaggaggggaaggggctgaggacgagacccccatccagcctccagggcattgctcagcccgcttggccacccggggccctgcttcctcacactggcgggttttcagccggaaccgagcccatggtgttggctctcaacgtgacccgcagtctgatcccctgtgaagagccggacatcccaggcacacgtgtgcgccaccttcagcaggcattcgggtgctgggctggtggctcatcaggcctgggccccacactgacaagcgccagatacgccacaaataccactgtgtcaaatgctttcaagatatatttttggggaaactattttttaaacactgtggaatacactggaaatcttcagggaaaaacacatttaaacacttttttttttaaggaaagaattggtatatttattatgttctgtttttctaaataacctgtggacaagggaagccccactgatttactccctctcttccccactccctgtgaggctgggctgaggcacggatccctgggccacagagcaagtctccaaatcagacagctgcctcagcccctgggatgtgtgatttcagctcctgtcacctcatgcaagggcgtggagaccagtagaggtgtggaggccaggcagagagaggagcctgctctgcggggggcccagctcatgggcactgccccttcagctagcctgcctccgtcccctgagtccaacagtgggagccctagctgggaagttctgatccccaaagccacagcaggggactgatggctatagcagaatgaggtcgggtcaggaccctcaaacaccatctgggaacaccaagcaccctgaatcgagactgcaggagccctgcggggtgagactgtgtcagagatacactgctggccacaagtgtcccctctcagtcccaccttttcgggctgtcccatgtctatctcaggggcccgttacctctctgcagcagtcccccatcccagccacaccagggtctgtccggccaaccctcttccccagggaaaggagaaaagagaaaacaggctgggcccggtggctcactcctgtaatcccagcactttgggaggttgaggtgggcggatcacctgaggtcaggagtttgagaccagcctggccaacgtggtgaaaccccatctctactaaaaaaaattacaaaaattagccgggagtggtggtgggcacctgtaatcccagttactcgggaggctgaggcaagagaatctcttgagctcaggaggcagaggttgcagtgagctgagattgcgccactgcactccagcctgggtgacagagggagactccgtcccaaaaaaaagaaaagagaaacagctgtcacctcccgcaggacccaaatcctctctctgagcaccgtcatccaccacatggctgggcctggctcccaggaccagtccagtcctctagtgccttatctgaggctgcagccgccagtctccaccccaaggagacagcccctgctcctagatgcccttggcctccgcagtgcagcccccaggtgtcctgactgaagcacaggccatagccccatttccccggtgcctgcagggctaacctccacgggagcccaggagctctggccggcaggtccatggcacagggcatcggaagactgcaaaactgctggacttaccctgggctgcagtccattgtcggcccctgggttgaatcaagatagtacttgcagctagatggatgcttttagccaggggacattgtgaggggaagattcctccacccagtctggcctgtggtgtctgtctcctccctgagaccacagcttctccagtagcagactcatgggcgccaccaagtggaagcacctggagcggcctctgccatccagtggggaagccaggccccgagacggaggtgggggcagcacgtgccctccacagccaccgctttcccgcctcagcagcccaggcctcctggcccagccctgcctggacagtgctctcccctcacccgggaagctggaatcctcctgcccgagaggaagcagacggcacagggacacccctgccaccttgggatctgcctccaagctggtgcagggtatcgagagtggattccagatggaggtcctggtcccagcacgcagcagtcctggtagagggacgaccgaatagttgaggagcgccggggcctgccctagcggtcccccggtgtccgctgcccccgccccggtcgggggggggggcggtgtccccggtgtggccccgcgggggtggggggcggggggccccctcgcggggggagggcggggcccccgaccgcccggg

SEQ ID NO: 438242 - DNA, 4838 bp, Homo sapiens
atgcggggcgtgtggccgcccccggtgtccgccctgctgtcggcgctggggatgtcgacgtacaagcgggccacgctggacgaggaggacctggtggactcgctctccgagggcgacgcataccccaacggcctgcaggtgaacttccacagcccccggagtggccagaggtgctgggctgcacggacccaggtggagaagcggctggtggtgttggtggtacttctggcggcaggactggtggcctgcttggcagcactgggcatccagtaccagacaagatccccctctgtgtgcctgagcgaagcttgtgtctcagtgaccagctccatcttgagctccatggaccccacagtggacccctgccatgacttcttcagctacgcctgtgggggctggatcaaggccaacccagtccctgatggccactcacgctgggggaccttcagcaacctctgggaacacaaccaagcaatcatcaagcacctcctcgaaaactccacggccagcgtgagcgaggcagagagaaaggcgcaagtatactaccgtgcgtgcatgaacgagaccaggatcgaggagctcagggccaaacctctaatggagttgattgagaggctcgggggctggaacatcacaggtccctgggccaaggacaacttccaggacaccctgcaggtggtcaccgcccactaccgcacctcacccttcttctctgtctatgtcagtgccgattccaagaactccaacagcaacgtgatccaggtggaccagtctggcctgggcttgccctcgagagactattacctgaacaaaactgaaaacgagaaggtgctgaccggatatctgaactacatggtccagctggggaagctgctgggcggcggggacgaggaggccatccggccccagatgcagcagatcttggactttgagacggcactggccaacatcaccatcccacaggagaagcgccgtgatgaggagctcatctaccacaaagtgacggcagccgagctgcagaccttggcacccgccatcaactggttgccttttctcaacaccatcttctaccccgtggagatcaatgaatccgagcctattgtggtctatgacaaggaataccttgagcagatctccactctcatcaacaccaccgacagatgcctgctcaacaactacatgatctggaacctggtgcggaaaacaagctccttccttgaccagcgctttcaggacgccgatgagaagttcatggaagtcatgtacgggaccaagaagacctgtcttcctcgctggaagttttgcgtgagtgacacagaaaacaacctgggctttgcgttgggccccatgtttgtcaaagcaaccttcgccgaggacagcaagagcatagccaccgagatcatcctggagattaagaaggcatttgaggaaagcctgagcaccctgaagtggatggatgaggaaacccgaaaatcagccaaggaaaaggccgatgccatctacaacatgataggataccccaacttcatcatggatcccaaggagctggacaaagtgtttaatgactacactgcagttccagacctctactttgaaaatgccatgcggtttttcaacttctcatggagggtcactgccgatcagctcaggaaagcccccaacagagatcagtggagcatgaccccgcccatggtgaacgcctactactcgcccaccaagaatgagattgtgtttccggccgggatcctgcaggcaccattctacacacgctcctcacccaaggccttaaactttggtggcataggtgtcgtcgtgggccatgagctgactcatgcttttgatgatcaaggacgggagtatgacaaggacgggaacctccggccatggtggaagaactcatccgtggaggccttcaagcgtcagaccgagtgcatggtagagcagtacagcaactacagcgtgaacggggagccggtgaacgggcggcacaccctgggggagaacatcgccgacaacgggggtctcaaggcggcctatcgggcttaccagaactgggtgaagaagaacggggctgagcactcgctccccaccctgggcctcaccaataaccagctcttcttcctgggctttgcacaggtctggtgctccgtccgcacacctgagagctcccacgaaggcctcatcaccgatccccacagcccctctcgcttccgggtcatcggctccctctccaattccaaggagttctcagaacacttccgctgcccacctggctcacccatgaacccgcctcacaagtgcgaagtctggtaaggacgaagcggagagagccaagacggaggaggggaaggggctgaggacgagacccccatccagcctccagggcattgctcagcccgcttggccacccggggccctgcttcctcacactggcgggttttcagccggaaccgagcccatggtgttggctctcaacgtgacccgcagtctgatcccctgtgaagagccggacatcccaggcacacgtgtgcgccaccttcagcaggcattcgggtgctgggctggtggctcatcaggcctgggccccacactgacaagcgccagatacgccacaaataccactgtgtcaaatgctttcaagatatatttttggggaaactattttttaaacactgtggaatacactggaaatcttcagggaaaaacacatttaaacacttttttttttaaggaaagaattggtatatttattatgttctgtttttctaaataacctgtggacaagggaagccccactgatttactccctctcttccccactccctgtgaggctgggctgaggcacggatccctgggccacagagcaagtctccaaatcagacagctgcctcagcccctgggatgtgtgatttcagctcctgtcacctcatgcaagggcgtggagaccagtagaggtgtggaggccaggcagagagaggagcctgctctgcggggggcccagctcatgggcactgccccttcagctagcctgcctccgtcccctgagtccaacagtgggagccctagctgggaagttctgatccccaaagccacagcaggggactgatggctatagcagaatgaggtcgggtcaggaccctcaaacaccatctgggaacaccaagcaccctgaatcgagactgcaggagccctgcggggtgagactgtgtcagagatacactgctggccacaagtgtcccctctcagtcccaccttttcgggctgtcccatgtctatctcaggggcccgttacctctctgcagcagtcccccatcccagccacaccagggtctgtccggccaaccctcttccccagggaaaggagaaaagagaaaacaggctgggcccggtggctcactcctgtaatcccagcactttgggaggttgaggtgggcggatcacctgaggtcaggagtttgagaccagcctggccaacgtggtgaaaccccatctctactaaaaaaaattacaaaaattagccgggagtggtggtgggcacctgtaatcccagttactcgggaggctgaggcaagagaatctcttgagctcaggaggcagaggttgcagtgagctgagattgcgccactgcactccagcctgggtgacagagggagactccgtcccaaaaaaaagaaaagagaaacagctgtcacctcccgcaggacccaaatcctctctctgagcaccgtcatccaccacatggctgggcctggctcccaggaccagtccagtcctctagtgccttatctgaggctgcagccgccagtctccaccccaaggagacagcccctgctcctagatgcccttggcctccgcagtgcagcccccaggtgtcctgactgaagcacaggccatagccccatttccccggtgcctgcagggctaacctccacgggagcccaggagctctggccggcaggtccatggcacagggcatcggaagactgcaaaactgctggacttaccctgggctgcagtccattgtcggcccctgggttgaatcaagatagtacttgcagctagatggatgcttttagccaggggacattgtgaggggaagattcctccacccagtctggcctgtggtgtctgtctcctccctgagaccacagcttctccagtagcagactcatgggcgccaccaagtggaagcacctggagcggcctctgccatccagtggggaagccaggccccgagacggaggtgggggcagcacgtgccctccacagccaccgctttcccgcctcagcagcccaggcctcctggcccagccctgcctggacagtgctctcccctcacccgggaagctggaatcctcctgcccgagaggaagcagacggcacagggacacccctgccaccttgggatctgcctccaagctggtgcagggtatcgagagtggattccagatggaggtcctggtcccagcacgcagcagtcctggtacccatcccagccacaccagggtctgtccggccaaccctcttccccagggaaaggagaaaagagaaaacaggctgggtgcggtgactcatgcatgcaatcccagcactttgggaggctgaggcaggtggatcacctgaggtcaggagtttgagaccagcctgaccaatgtggtgaaaccccagctctactgaaaatacaaaaattagccaggcatgatggtgggcacctgtaatcccagttactcgggaggctgaggcaagagaatctcttgagctcaggaggcagaggttgcagtgagctgagattgcgccactgcactccagcctgggtgacagagggggactccgtccca

SEQ ID NO: 438243 - DNA, 4361 bp, Homo sapiens
tgccaggattacaggcgtgagccaccacacctggccccacgggtgtcttgggggcactgtgcagccccctggctccctgtgccggacttggctggccaagccccccaccaactctcgtccagtggatagtgggggggcagccactgacagtttggggtatgggccctgcaggtgctgaccggatatctgaactacatggtccagctggggaagctgctgggcggcggggacgaggaggccatccggccccagatgcagcagatcttggactttgagacggcactggccaacatcaccatcccacaggagaagcgccgtgatgaggagctcatctaccacaaagtgacggcagccgagctgcagaccttggcacccgccatcaactggttgccttttctcaacaccatcttctaccccgtggagatcaatgaatccgagcctattgtggtctatgacaaggaataccttgagcagatctccactctcatcaacaccaccgacagatgcctgctcaacaactacatgatctggaacctggtgcggaaaacaagctccttccttgaccagcgctttcaggacgccgatgagaagttcatggaagtcatgtacgggaccaagaagacctgtcttcctcgctggaagttttgcgtgagtgacacagaaaacaacctgggctttgcgttgggccccatgtttgtcaaagcaaccttcgccgaggacagcaagagcatagccaccgagatcatcctggagattaagaaggcatttgaggaaagcctgagcaccctgaagtggatggatgaggaaacccgaaaatcagccaaggaaaaggccgatgccatctacaacatgataggataccccaacttcatcatggatcccaaggagctggacaaagtgtttaatgactacactgcagttccagacctctactttgaaaatgccatgcggtttttcaacttctcatggagggtcactgccgatcagctcaggaaagcccccaacagagatcagtggagcatgaccccgcccatggtgaacgcctactactcgcccaccaagaatgagattgtgtttccggccgggatcctgcaggcaccattctacacacgctcctcacccaaggccttaaactttggtggcataggtgtcgtcgtgggccatgagctgactcatgcttttgatgatcaaggacgggagtatgacaaggacgggaacctccggccatggtggaagaactcatccgtggaggccttcaagcgtcagaccgagtgcatggtagagcagtacagcaactacagcgtgaacggggagccggtgaacgggcggcacaccctgggggagaacatcgccgacaacgggggtctcaaggcggcctatcgggcttaccagaactgggtgaagaagaacggggctgagcactcgctccccaccctgggcctcaccaataaccagctcttcttcctgggctttgcacaggtctggtgctccgtccgcacacctgagagctcccacgaaggcctcatcaccgatccccacagcccctctcgcttccgggtcatcggctccctctccaattccaaggagttctcagaacacttccgctgcccacctggctcacccatgaacccgcctcacaagtgcgaagtctggtaaggacgaagcggagagagccaagacggaggaggggaaggggctgaggacgagacccccatccagcctccagggcattgctcagcccgcttggccacccggggccctgcttcctcacactggcgggttttcagccggaaccgagcccatggtgttggctctcaacgtgacccgcagtctgatcccctgtgaagagccggacatcccaggcacacgtgtgcgccaccttcagcaggcattcgggtgctgggctggtggctcatcaggcctgggccccacactgacaagcgccagatacgccacaaataccactgtgtcaaatgctttcaagatatatttttggggaaactattttttaaacactgtggaatacactggaaatcttcagggaaaaacacatttaaacacttttttttttaaggaaagaattggtatatttattatgttctgtttttctaaataacctgtggacaagggaagccccactgatttactccctctcttccccactccctgtgaggctgggctgaggcacggatccctgggccacagagcaagtctccaaatcagacagctgcctcagcccctgggatgtgtgatttcagctcctgtcacctcatgcaagggcgtggagaccagtagaggtgtggaggccaggcagagagaggagcctgctctgcggggggcccagctcatgggcactgccccttcagctagcctgcctccgtcccctgagtccaacagtgggagccctagctgggaagttctgatccccaaagccacagcaggggactgatggctatagcagaatgaggtcgggtcaggaccctcaaacaccatctgggaacaccaagcaccctgaatcgagactgcaggagccctgcggggtgagactgtgtcagagatacactgctggccacaagtgtcccctctcagtcccaccttttcgggctgtcccatgtctatctcaggggcccgttacctctctgcagcagtcccccatcccagccacaccagggtctgtccggccaaccctcttccccagggaaaggagaaaagagaaaacaggctgggcccggtggctcactcctgtaatcccagcactttgggaggttgaggtgggcggatcacctgaggtcaggagtttgagaccagcctggccaacgtggtgaaaccccatctctactaaaaaaaattacaaaaattagccgggagtggtggtgggcacctgtaatcccagttactcgggaggctgaggcaagagaatctcttgagctcaggaggcagaggttgcagtgagctgagattgcgccactgcactccagcctgggtgacagagggagactccgtcccaaaaaaaagaaaagagaaacagctgtcacctcccgcaggacccaaatcctctctctgagcaccgtcatccaccacatggctgggcctggctcccaggaccagtccagtcctctagtgccttatctgaggctgcagccgccagtctccaccccaaggagacagcccctgctcctagatgcccttggcctccgcagtgcagcccccaggtgtcctgactgaagcacaggccatagccccatttccccggtgcctgcagggctaacctccacgggagcccaggagctctggccggcaggtccatggcacagggcatcggaagactgcaaaactgctggacttaccctgggctgcagtccattgtcggcccctgggttgaatcaagatagtacttgcagctagatggatgcttttagccaggggacattgtgaggggaagattcctccacccagtctggcctgtggtgtctgtctcctccctgagaccacagcttctccagtagcagactcatgggcgccaccaagtggaagcacctggagcggcctctgccatccagtggggaagccaggccccgagacggaggtgggggcagcacgtgccctccacagccaccgctttcccgcctcagcagcccaggcctcctggcccagccctgcctggacagtgctctcccctcacccgggaagctggaatcctcctgcccgagaggaagcagacggcacagggacacccctgccaccttgggatctgcctccaagctggtgcagggtatcgagagtggattccagatggaggtcctggtcccagcacgcagcagtcctggtagctctgcagaggagacaggaacccgagaagtagctgaagcagaagccagccgcagtccccttgccacatagaggcgggcttctcccagccatggtgtcccctctgcctcccctcccccgaccctcctgccttccgcgtggagggtggtggtcctgtagtgtcagcaccagcaccatgggcttggaccccctccctggacacaggcaggtgtcctagggctgggggtgcagcccgagggaatggagaccacactcatggctcaggtctgccggggccggcagggggttggggaagaagagggctcaggcccagcaggggtggaagcccctgccactgccactacccgctccagagctttaaggaaaatgaagtgagacccctccccttaggcctggggagccatagggctggcttctctgtgggtgcgtggacgtggggttgggagctgggaatctattttttgtattatgttttgagctactgtagttttggcgtggcactattgtaatggaaataaaatacttgtacggag

SEQ ID NO: 438244 - DNA, 3723 bp, Homo sapiens
agtctcacggtctgaagtgctcatgtgagcatctccacttctgctgcagtggaagattaaaggatcggtttgggcaggaggttgggggacatacacagggttaagtagccctgggctcccctcatgtggtcagaaactaagataaccctctcattcagaccagagaaaggacccaacatcagccacggaaaaggccgatgccatctacaacatgataggataccccaacttcatcatggatcccaaggagctggacaaagtgtttaatgactacactgcagttccagacctctactttgaaaatgccatgcggtttttcaacttctcatggagggtcactgccgatcagctcaggaaagcccccaacagagatcagtggagcatgaccccgcccatggtgaacgcctactactcgcccaccaagaatgagattgtgtttccggccgggatcctgcaggcaccattctacacacgctcctcacccaaggccttaaactttggtggcataggtgtcgtcgtgggccatgagctgactcatgcttttgatgatcaaggacgggagtatgacaaggacgggaacctccggccatggtggaagaactcatccgtggaggccttcaagcgtcagaccgagtgcatggtagagcagtacagcaactacagcgtgaacggggagccggtgaacgggcggcacaccctgggggagaacatcgccgacaacgggggtctcaaggcggcctatcgggcttaccagaactgggtgaagaagaacggggctgagcactcgctccccaccctgggcctcaccaataaccagctcttcttcctgggctttgcacaggtctggtgctccgtccgcacacctgagagctcccacgaaggcctcatcaccgatccccacagcccctctcgcttccgggtcatcggctccctctccaattccaaggagttctcagaacacttccgctgcccacctggctcacccatgaacccgcctcacaagtgcgaagtctggtaaggacgaagcggagagagccaagacggaggaggggaaggggctgaggacgagacccccatccagcctccagggcattgctcagcccgcttggccacccggggccctgcttcctcacactggcgggttttcagccggaaccgagcccatggtgttggctctcaacgtgacccgcagtctgatcccctgtgaagagccggacatcccaggcacacgtgtgcgccaccttcagcaggcattcgggtgctgggctggtggctcatcaggcctgggccccacactgacaagcgccagatacgccacaaataccactgtgtcaaatgctttcaagatatatttttggggaaactattttttaaacactgtggaatacactggaaatcttcagggaaaaacacatttaaacacttttttttttaaggaaagaattggtatatttattatgttctgtttttctaaataacctgtggacaagggaagccccactgatttactccctctcttccccactccctgtgaggctgggctgaggcacggatccctgggccacagagcaagtctccaaatcagacagctgcctcagcccctgggatgtgtgatttcagctcctgtcacctcatgcaagggcgtggagaccagtagaggtgtggaggccaggcagagagaggagcctgctctgcggggggcccagctcatgggcactgccccttcagctagcctgcctccgtcccctgagtccaacagtgggagccctagctgggaagttctgatccccaaagccacagcaggggactgatggctatagcagaatgaggtcgggtcaggaccctcaaacaccatctgggaacaccaagcaccctgaatcgagactgcaggagccctgcggggtgagactgtgtcagagatacactgctggccacaagtgtcccctctcagtcccaccttttcgggctgtcccatgtctatctcaggggcccgttacctctctgcagcagtcccccatcccagccacaccagggtctgtccggccaaccctcttccccagggaaaggagaaaagagaaaacaggctgggcccggtggctcactcctgtaatcccagcactttgggaggttgaggtgggcggatcacctgaggtcaggagtttgagaccagcctggccaacgtggtgaaaccccatctctactaaaaaaaattacaaaaattagccgggagtggtggtgggcacctgtaatcccagttactcgggaggctgaggcaagagaatctcttgagctcaggaggcagaggttgcagtgagctgagattgcgccactgcactccagcctgggtgacagagggagactccgtcccaaaaaaaagaaaagagaaacagctgtcacctcccgcaggacccaaatcctctctctgagcaccgtcatccaccacatggctgggcctggctcccaggaccagtccagtcctctagtgccttatctgaggctgcagccgccagtctccaccccaaggagacagcccctgctcctagatgcccttggcctccgcagtgcagcccccaggtgtcctgactgaagcacaggccatagccccatttccccggtgcctgcagggctaacctccacgggagcccaggagctctggccggcaggtccatggcacagggcatcggaagactgcaaaactgctggacttaccctgggctgcagtccattgtcggcccctgggttgaatcaagatagtacttgcagctagatggatgcttttagccaggggacattgtgaggggaagattcctccacccagtctggcctgtggtgtctgtctcctccctgagaccacagcttctccagtagcagactcatgggcgccaccaagtggaagcacctggagcggcctctgccatccagtggggaagccaggccccgagacggaggtgggggcagcacgtgccctccacagccaccgctttcccgcctcagcagcccaggcctcctggcccagccctgcctggacagtgctctcccctcacccgggaagctggaatcctcctgcccgagaggaagcagacggcacagggacacccctgccaccttgggatctgcctccaagctggtgcagggtatcgagagtggattccagatggaggtcctggtcccagcacgcagcagtcctggtagctctgcagaggagacaggaacccgagaagtagctgaagcagaagccagccgcagtccccttgccacatagaggcgggcttctcccagccatggtgtcccctctgcctcccctcccccgaccctcctgccttccgcgtggagggtggtggtcctgtagtgtcagcaccagcaccatgggcttggaccccctccctggacacaggcaggtgtcctagggctgggggtgcagcccgagggaatggagaccacactcatggctcaggtctgccggggccggcagggggttggggaagaagagggctcaggcccagcaggggtggaagcccctgccactgccactacccgctccagagctttaaggaaaatgaagtgagacccctccccttaggcctggggagccatagggctggcttctctgtgggtgcgtggacgtggggttgggagctgggaatctattttttgtattatgttttgagctactgtagttttggcgtggcactattgtaatggaaataaaatacttgtacggag

SEQ ID NO: 438245 - DNA, 2997 bp, Homo sapiens
atgcggggcgtgtggccgcccccggtgtccgccctgctgtcggcgctggggatgtcgacgtacaagcgggccacgctggacgaggaggacctggtggactcgctctccgagggcgacgcataccccaacggcctgcaggtgaacttccacagcccccggagtggccagaggtgctgggctgcacggacccaggtggagaagcggctggtggtgttggtggtacttctggcggcaggactggtggcctgcttggcagcactgggcatccagtaccagacaagatccccctctgtgtgcctgagcgaagcttgtgtctcagtgaccagctccatcttgagctccatggaccccacagtggacccctgccatgacttcttcagctacgcctgtgggggctggatcaaggccaacccagtccctgatggccactcacgctgggggaccttcagcaacctctgggaacacaaccaagcaatcatcaagcacctcctcgaaaactccacggccagcgtgagcgaggcagagagaaaggcgcaagtatactaccgtgcgtgcatgaacgagaccaggatcgaggagctcagggccaaacctctaatggagttgattgagaggctcgggggctggaacatcacaggtccctgggccaaggacaacttccaggacaccctgcaggtggtcaccgcccactaccgcacctcacccttcttctctgtctatgtcagtgccgattccaagaactccaacagcaacgtgatccaggtggaccagtctggcctgggcttgccctcgagagactattacctgaacaaaactgaaaacgagaaggtgctgaccggatatctgaactacatggtccagctggggaagctgctgggcggcggggacgaggaggccatccggccccagatgcagcagatcttggactttgagacggcactggccaacatcaccatcccacaggagaagcgccgtgatgaggagctcatctaccacaaagtgacggcagccgagctgcagaccttggcacccgccatcaactggttgccttttctcaacaccatcttctaccccgtggagatcaatgaatccgagcctattgtggtctatgacaaggaataccttgagcagatctccactctcatcaacaccaccgacagatgcctgctcaacaactacatgatctggaacctggtgcggaaaacaagctccttccttgaccagcgctttcaggacgccgatgagaagttcatggaagtcatgtacgggaccaagaagacctgtcttcctcgctggaagttttgcgtgagtgacacagaaaacaacctgggctttgcgttgggccccatgtttgtcaaagcaaccttcgccgaggacagcaagagcatagccaccgagatcatcctggagattaagaaggcatttgaggaaagcctgagcaccctgaagtggatggatgaggaaacccgaaaatcagccaaggaaaaggccgatgccatctacaacatgataggataccccaacttcatcatggatcccaaggagctggacaaagtgtttaatgactacactgcagttccagacctctactttgaaaatgccatgcggtttttcaacttctcatggagggtcactgccgatcagctcaggaaagcccccaacagagatcagtggagcatgaccccgcccatggtgaacgcctactactcgcccaccaagaatgagattgtgtttccggccgggatcctgcaggcaccattctacacacgctcctcacccaaggccttaaactttggtggcataggtgtcgtcgtgggccatgagctgactcatgcttttgatgatcaaggacgggagtatgacaaggacgggaacctccggccatggtggaagaactcatccgtggaggccttcaagcgtcagaccgagtgcatggtagagcagtacagcaactacagcgtgaacggggagccggtgaacgggcggcacaccctgggggagaacatcgccgacaacgggggtctcaaggcggcctatcgggcttaccagaactgggtgaagaagaacggggctgagcactcgctccccaccctgggcctcaccaataaccagctcttcttcctgggctttgcacaggtctggtgctccgtccgcacacctgagagctcccacgaaggcctcatcaccgatccccacagcccctctcgcttccgggtcatcggctccctctccaattccaaggagttctcagaacacttccgctgcccacctggctcacccatgaacccgcctcacaagtgcgaagtctggtaaggacgaagcggagagagccaagacggaggaggggaaggggctgaggacgagacccccatccagcctccagggcattgctcagcccgcttggccacccggggccctgcttcctcacactggcgggttttcagccggaaccgagcccatggtgttggctctcaacgtgacccgcagtctgatcccctgtgaagagccggacatcccaggcacacgtgtgcgccaccttcagcaggcattcgggtgctgggctggtggctcatcaggcctgggccccacactgacaagcgccagatacgccacaaataccactgtgtcaaatgctttcaagatatatttttggggaaactattttttaaacactgtggaatacactggaaatcttcagggaaaaacacatttaaacacttttttttttaaggaaagaattggtatatttattatgttctgtttttctaaataacctgtggacaagggaacccctgccactgccactacccgctccagagctttaaggaaaatgaagtgagacccctccccttaggcctggggagccatagggctggcttctctgtgggtgcgtggacgtggggttgggagctgggaatctattttttgtattatgttttgagctactgtagttttggcgtggcactattgtaatggaaataaaatacttgtacggag

SEQ ID NO: 438246 - DNA, 1256 bp, Homo sapiens
tctctggtgtttctgattttcctgcctttattctgtcttctcttgtccttctcattccacccacccctgctcctagatgcccttggcctccgcagtgcagcccccaggtgtcctgactgaagcacaggccatagccccatttccccggtgcctgcagggctaacctccacgggagcccaggagctctggccggcaggtccatggcacagggcatcggaagactgcaaaactgctggacttaccctgggctgcagtccattgtcggcccctgggttgaatcaagatagtacttgcagctagatggatgcttttagccaggggacattgtgaggggaagattcctccacccagtctggcctgtggtgtctgtctcctccctgagaccacagcttctccagtagcagactcatgggcgccaccaagtggaagcacctggagcggcctctgccatccagtggggaagccaggccccgagacggaggtgggggcagcacgtgccctccacagccaccgctttcccgcctcagcagcccaggcctcctggcccagccctgcctggacagtgctctcccctcacccgggaagctggaatcctcctgcccgagaggaagcagacggcacagggacacccctgccaccttgggatctgcctccaagctggtgcagggtatcgagagtggattccagatggaggtcctggtcccagcacgcagcagtcctggtagctctgcagaggagacaggaacccgagaagtagctgaagcagaagccagccgcagtccccttgccacatagaggcgggcttctcccagccatggtgtcccctctgcctcccctcccccgaccctcctgccttccgcgtggagggtggtggtcctgtagtgtcagcaccagcaccatgggcttggaccccctccctggacacaggcaggtgtcctagggctgggggtgcagcccgagggaatggagaccacactcatggctcaggtctgccggggccggcagggggttggggaagaagagggctcaggcccagcaggggtggaagcccctgccactgccactacccgctccagagctttaaggaaaatgaagtgagacccctccccttaggcctggggagccatagggctggcttctctgtgggtgcgtggacgtggggttgggagctgggaatctattttttgtattatgttttgagctactgtagttttggcgtggcactattgtaatggaaataaaatacttgtacggag

SEQ ID NO: 438247 - DNA, 2701 bp, Homo sapiens
atgcggggcgtgtggccgcccccggtgtccgccctgctgtcggcgctggggatgtcgacgtacaagcgggccacgctggacgaggaggacctggtggactcgctctccgagggcgacgcataccccaacggcctgcaggtgaacttccacagcccccggagtggccagaggtgctgggctgcacggacccaggtggagaagcggctggtggtgttggtggtacttctggcggcaggactggtggcctgcttggcagcactgggcatccagtaccagacaagatccccctctgtgtgcctgagcgaagcttgtgtctcagtgaccagctccatcttgagctccatggaccccacagtggacccctgccatgacttcttcagctacgcctgtgggggctggatcaaggccaacccagtccctgatggccactcacgctgggggaccttcagcaacctctgggaacacaaccaagcaatcatcaagcacctcctcgaaaactccacggccagcgtgagcgaggcagagagaaaggcgcaagtatactaccgtgcgtgcatgaacgagaccaggatcgaggagctcagggccaaacctctaatggagttgattgagaggctcgggggctggaacatcacaggtccctgggccaaggacaacttccaggacaccctgcaggtggtcaccgcccactaccgcacctcacccttcttctctgtctatgtcagtgccgattccaagaactccaacagcaacgtgatccaggtggaccagtctggcctgggcttgccctcgagagactattacctgaacaaaactgaaaacgagaaggtgctgaccggatatctgaactacatggtccagctggggaagctgctgggcggcggggacgaggaggccatccggccccagatgcagcagatcttggactttgagacggcactggccaacatcaccatcccacaggagaagcgccgtgatgaggagctcatctaccacaaagtgacggcagccgagctgcagaccttggcacccgccatcaactggttgccttttctcaacaccatcttctaccccgtggagatcaatgaatccgagcctattgtggtctatgacaaggaataccttgagcagatctccactctcatcaacaccaccgacagatgcctgctcaacaactacatgatctggaacctggtgcggaaaacaagctccttccttgaccagcgctttcaggacgccgatgagaagttcatggaagtcatgtacgggaccaagaagacctgtcttcctcgctggaagttttgcgtgagtgacacagaaaacaacctgggctttgcgttgggccccatgtttgtcaaagcaaccttcgccgaggacagcaagagcatagccaccgagatcatcctggagattaagaaggcatttgaggaaagcctgagcaccctgaagtggatggatgaggaaacccgaaaatcagccaaggaaaaggccgatgccatctacaacatgataggataccccaacttcatcatggatcccaaggagctggacaaagtgtttaatgactacactgcagttccagacctctactttgaaaatgccatgcggtttttcaacttctcatggagggtcactgccgatcagctcaggaaagcccccaacagagatcagtggagcatgaccccgcccatggtgaacgcctactactcgcccaccaagaatgagattgtgtttccggccgggatcctgcaggcaccattctacacacgctcctcacccaaggccttaaactttggtggcataggtgtcgtcgtgggccatgagctgactcatgcttttgatgatcaaggacgggagtatgacaaggacgggaacctccggccatggtggaagaactcatccgtggaggccttcaagcgtcagaccgagtgcatggtagagcagtacagcaactacagcgtgaacggggagccggtgaacgggcggcacaccctgggggagaacatcgccgacaacgggggtctcaaggcggcctatcgggcttaccagaactgggtgaagaagaacggggctgagcactcgctccccaccctgggcctcaccaataaccagctcttcttcctgggctttgcacaggtctggtgctccgtccgcacacctgagagctcccacgaaggcctcatcaccgatccccacagcccctctcgcttccgggtcatcggctccctctccaattccaaggagttctcagaacacttccgctgcccacctggctcacccatgaacccgcctcacaagtgcgaagtctggtaaggacgaagcggagagagccaagacggaggaggggaaggggctgaggacgagacccccatccagcctccagggcattgctcagcccgcttggccacccggggccctgcttcctcacactggcgggttttcagccggaaccgagcccatggtgttggctctcaacgtgacccgcagtctgatcccctgtgaagagccggacatcccaggcacacgtgtgcgccaccttcagcaggcattcgggtgctgggctggtggctcatcaggcctgggccccacactgacaagcgccagatacgccacaaataccactgtgtcaaatgctttcaagatatatttttggggaaactattttttaaacactgtggaatacactggaaatcttcaggga

SEQ ID NO: 438248 - DNA, 1110 bp, Homo sapiens
cagcctgaccaacatggagaaaccccatctctactaaacatacaaaattagccaggcatggtggcacatgcctgtaatcccagttactcaggaggctgaggcaggagaatcgcttgaacccgggaggcagaggttgcagtgagctgagattgcgccactgcactccagcctgggtgacagagggagactccgtcccaaaaaaaagaaaagagaaacagctgtcacctcccgcaggacccaaatcctctctctgagcaccgtcatccaccacatggctgggcctggctcccaggaccagtccagtcctctagtgccttatctgaggctgcagccgccagtctccaccccaaggagacagcccctgctcctagatgcccttggcctccgcagtgccctggcccagccctgcctggacagtgctctcccctcacccgggaagctggaatcctcctgcccgagaggaagcagacggcacagggacacccctgccaccttgggatctgcctccaagctggtgcagggtatcgagagtggattccagatggaggtcctggtcccagcacgcagcagtcctggtagctctgcagaggagacaggaacccgagaagtagctgaagcagaagccagccgcagtccccttgccacatagaggcgggcttctcccagccatggtgtcccctctgcctcccctcccccgaccctcctgccttccgcgtggagggtggtggtcctgtagtgtcagcaccagcaccatgggcttggaccccctccctggacacaggcaggtgtcctagggctgggggtgcagcccgagggaatggagaccacactcatggctcaggtctgccggggccggcagggggttggggaagaagagggctcaggcccagcaggggtggaagcccctgccactgccactacccgctccagagctttaaggaaaatgaagtgagacccctccccttaggcctggggagccatagggctggcttctctgtgggtgcgtggacgtggggttgggagctgggaatctattttttgtattatgttttgagctactgtagttttggcgtggcactattgtaatggaaataaaatacttgtacggag

SEQ ID NO: 438249 - DNA, 993 bp, Homo sapiens
cgcgccaagggttaagggcccgcgcgggcgcggggagtgcagcctcaggccgtgattggctgcgccacccaggcccccgcgccctgccattggccccgcggcggccccgcccctccggcactcggcgccgaagccgcgagctcgcccgctggagctgagcgcgccgcctgggccaggcagccgagccgtccgagcagctgggctgggagcagggaacccggagctgggaatcgggagccgggcgcggggagctgcgcgaagccggggcggagcacgcgagctatggtgagtgctgcgcgcggaggtctggtccggtccagcccagcctcgacggtcgcgggcagcggtgccgcgggtggcacccggggccgccctggctcgcggggggctgggcgccggctgcagcagcagcccccgcccggctctcggaaggcgtggagtcggggagcgcccgggcagagcgcggctctcccggcggcgctgcgcttggtcccgtcgggggcggccgcgccgagcttggttctggtcccagccggatgtggggggctcggggtccccggttcgctttggggacggttgctgcggtctgttttgggttgttctgaagtccctggactcagcttggcttggagacccagggcagccgggctgggtcgggctcgcgggtggcggcgatttcgaggtgcctggatgcagctggacctgagcgtcccgggacactgaggtcggtctggggctcgccttggggcactgtgggtggccacgcccggcgcattcggagggctaggttgcggccctctgggactgctgatccagctgtggcctaaggggtgtatgtggtggcgacgcagctaggtcggtgctgtcagagaccaggggacactcaggggccctgcacccagcgatccggtctccccagcatctcccggtgatgggtcctcagaggaggggcttgctgaggccgagtgctgactgcgataggcaggagtacca

SEQ ID NO: 438250 - DNA, 387 bp, Homo sapiens
gtaacttgagcgccggctgctagggaggctgggatggcctccaggtttcagacagggccctggactgggggcttttatactcatttcatctagtccttgaaactatgtgacaaaggaaggatggttgttatgcccagtccacagatggaaaaactgatgctcagaaaggtcaagttacctgctgaagggcacacagctagtaagtgactccaaaataggcgcctggccgacaccaggctgcttctctgtaattaatagtgtttacttggaggctcggggtcatgaccacaccagcttacattgacagcgcctttccagtctctccagcaccaagcacatcgaacttggttacagtgagcacttaataaatgcatggtgtggattctg

SEQ ID NO: 438251 - DNA, 654 bp, Homo sapiens
aaatccattacagtgactggcctgtgagcagctgggcagggtctgagttggggtctgctggcccctctgctcttgttgccgcacagctctgccttccccttctctagaaccttcaactttccatcttcgagcttgtctgctcatgacattgtctccctcaagaacacctgtctatatccagcctgagcatggtatttccgaagctgctcctcggaacatgagtactctagatcttaaagcccgctccatcaaaaaggaatgctgtggtccaataaggcaataaggctgggagaggctgtgtcttctcccctctctggaagaatcacggtgcctattattaccatattaaaggctctgaaaagtaccacagcagagacttttccaactttcccgaagctcatcctaagcttattggagcatggagccctgtgtgtggaaggccagtcctgtcttgcagggtgttcacgttaggagcgtggtttggaagcacagctgtggctccccttctcacccagcctgacgcttggaaaattgagtttaatctctggccatcattgttctgcacggggtgcctgttgcatttacctgagaccagtgcgcagaccttactgctgtgatgtgtatctcctcaggccaccgagatcatcctggaga

SEQ ID NO: 438252 - DNA, 533 bp, Homo sapiens
cttctggcggcaggactggtggcctgcttggcagcactgggcatccagtaccagacaagtaggtgccttcgtgttgcatggtgggcttgactcactcctgcacccggctccgtcagctcgggcgaggggggcttccctgcttaagccggggcagggctctgaggctaaggagggagccaggcccaggggggtctgggtgctgagatagaccaagacccgggaagtgggcagcgtgggtgatataaaggtctcgcacttgagtccacatcctgtcccagcaacttactggctgtgtgacctcggacaagtcacttattccctcagcctgtgtcttctctaatttaaatgggaaaacagtacccaactgggggatgggtctgcggactagagataacatatgtcccatagctggtgcctcgtaggacttcttcaactttagctctgggtactgttgttgctagaatgtggggtaattacacacataggctgacattgtctgctatctctagttccaataaaataacaataatgcc

SEQ ID NO: 438253 - DNA, 368 bp, Homo sapiens
gctccttccttgaccagcgctttcaggacgccgatgagaagttcatggaagtcatgtacgggaccaagaaggtgagcctgctactgcgtatgcctgaatatgggctgagcgcctactttatgccaaggtgtctatgggagcacaggaagggacctcagccagctgggggtgggtagaagcttccggaaggagtgcttatgccaagtaaagggtaaagaggagtcctagccactcagccaatttatagcaaaaagtagttgccagtagtgatgatagatgctccccttgaacaactcatgatcctcacaatgcctgtgaggtgagtactgttattagccccactttgcacaggggaccaccaatagtat

SEQ ID NO: 438254 - DNA, 412 bp, Homo sapiens
ccagctggcacagttgaatatacacatcagggaagaggctggagcagaaggtgtaaatgtgagagccatcagtgcgtagaaggtattttaagccatagggctaaacgagtgcacatcaagaagagggctcccctaggctgagcccaggcccagatccccagaaactagtccttgccccaacacgggggagctccctgagacctccataccagtcccctccttcaccacctgccatgggaacccctgagctttggttttctctcctcccaggcttaccagaactgggtgaagaagaacggggctgagcactcgctccccaccctgggcctcaccaataaccagctcttcttcctgggctttgcacaggtgagtccattaggaaaacatgccacacatggtacattctgccatc

SEQ ID NO: 438255 - DNA, 5018 bp, Homo sapiens
atgcggggcgtgtggccgcccccggtgtccgccctgctgtcggcgctggggatgtcgacgtacaagcgggccacgctggacgaggaggacctggtggactcgctctccgagggcgacgcataccccaacggcctgcaggtgaacttccacagcccccggagtggccagaggtgctgggctgcacggacccaggtggagaagcggctggtggtgttggtggtacttctggcggcaggactggtggcctgcttggcagcactgggcatccagtaccagacaagatccccctctgtgtgcctgagcgaagcttgtgtctcagtgaccagctccatcttgagctccatggaccccacagtggacccctgccatgacttcttcagctacgcctgtgggggctggatcaaggccaacccagtccctgatggccactcacgctgggggaccttcagcaacctctgggaacacaaccaagcaatcatcaagcacctcctcgaaaactccacggccagcgtgagcgaggcagagagaaaggcgcaagtatactaccgtgcgtgcatgaacgagaccaggatcgaggagctcagggccaaacctctaatggagttgattgagaggctcgggggctggaacatcacaggtccctgggccaaggacaacttccaggacaccctgcaggtggtcaccgcccactaccgcacctcacccttcttctctgtctatgtcagtgccgattccaagaactccaacagcaacgtgatccaggtggaccagtctggcctgggcttgccctcgagagactattacctgaacaaaactgaaaacgagaaggtgctgaccggatatctgaactacatggtccagctggggaagctgctgggcggcggggacgaggaggccatccggccccagatgcagcagatcttggactttgagacggcactggccaacatcaccatcccacaggagaagcgccgtgatgaggagctcatctaccacaaagtgacggcagccgagctgcagaccttggcacccgccatcaactggttgccttttctcaacaccatcttctaccccgtggagatcaatgaatccgagcctattgtggtctatgacaaggaataccttgagcagatctccactctcatcaacaccaccgacagatgcctgctcaacaactacatgatctggaacctggtgcggaaaacaagctccttccttgaccagcgctttcaggacgccgatgagaagttcatggaagtcatgtacgggaccaagaagacctgtcttcctcgctggaagttttgcgtgagtgacacagaaaacaacctgggctttgcgttgggccccatgtttgtcaaagcaaccttcgccgaggacagcaagagcatagccaccgagatcatcctggagattaagaaggcatttgaggaaagcctgagcaccctgaagtggatggatgaggaaacccgaaaatcagccaaggaaaaggccgatgccatctacaacatgataggataccccaacttcatcatggatcccaaggagctggacaaagtgtttaatgactacactgcagttccagacctctactttgaaaatgccatgcggtttttcaacttctcatggagggtcactgccgatcagctcaggaaagcccccaacagagatcagtggagcatgaccccgcccatggtgaacgcctactactcgcccaccaagaatgagattgtgtttccggccgggatcctgcaggcaccattctacacacgctcctcacccaaggccttaaactttggtggcataggtgtcgtcgtgggccatgagctgactcatgcttttgatgatcaaggacgggagtatgacaaggacgggaacctccggccatggtggaagaactcatccgtggaggccttcaagcgtcagaccgagtgcatggtagagcagtacagcaactacagcgtgaacggggagccggtgaacgggcggcacaccctgggggagaacatcgccgacaacgggggtctcaaggcggcctatcgggcttaccagaactgggtgaagaagaacggggctgagcactcgctccccaccctgggcctcaccaataaccagctcttcttcctgggctttgcacaggtctggtgctccgtccgcacacctgagagctcccacgaaggcctcatcaccgatccccacagcccctctcgcttccgggtcatcggctccctctccaattccaaggagttctcagaacacttccgctgcccacctggctcacccatgaacccgcctcacaagtgcgaagtctggtaaggacgaagcggagagagccaagacggaggaggggaaggggctgaggacgagacccccatccagcctccagggcattgctcagcccgcttggccacccggggccctgcttcctcacactggcgggttttcagccggaaccgagcccatggtgttggctctcaacgtgacccgcagtctgatcccctgtgaagagccggacatcccaggcacacgtgtgcgccaccttcagcaggcattcgggtgctgggctggtggctcatcaggcctgggccccacactgacaagcgccagatacgccacaaataccactgtgtcaaatgctttcaagatatatttttggggaaactattttttaaacactgtggaatacactggaaatcttcagggaaaaacacatttaaacacttttttttttaaggaaagaattggtatatttattatgttctgtttttctaaataacctgtggacaagggaagccccactgatttactccctctcttccccactccctgtgaggctgggctgaggcacggatccctgggccacagagcaagtctccaaatcagacagctgcctcagcccctgggatgtgtgatttcagctcctgtcacctcatgcaagggcgtggagaccagtagaggtgtggaggccaggcagagagaggagcctgctctgcggggggcccagctcatgggcactgccccttcagctagcctgcctccgtcccctgagtccaacagtgggagccctagctgggaagttctgatccccaaagccacagcaggggactgatggctatagcagaatgaggtcgggtcaggaccctcaaacaccatctgggaacaccaagcaccctgaatcgagactgcaggagccctgcggggtgagactgtgtcagagatacactgctggccacaagtgtcccctctcagtcccaccttttcgggctgtcccatgtctatctcaggggcccgttacctctctgcagcagtcccccatcccagccacaccagggtctgtccggccaaccctcttccccagggaaaggagaaaagagaaaacaggctgggcccggtggctcactcctgtaatcccagcactttgggaggttgaggtgggcggatcacctgaggtcaggagtttgagaccagcctggccaacgtggtgaaaccccatctctactaaaaaaaattacaaaaattagccgggagtggtggtgggcacctgtaatcccagttactcgggaggctgaggcaagagaatctcttgagctcaggaggcagaggttgcagtgagctgagattgcgccactgcactccagcctgggtgacagagggagactccgtcccaaaaaaaagaaaagagaaacagctgtcacctcccgcaggacccaaatcctctctctgagcaccgtcatccaccacatggctgggcctggctcccaggaccagtccagtcctctagtgccttatctgaggctgcagccgccagtctccaccccaaggagacagcccctgctcctagatgcccttggcctccgcagtgcagcccccaggtgtcctgactgaagcacaggccatagccccatttccccggtgcctgcagggctaacctccacgggagcccaggagctctggccggcaggtccatggcacagggcatcggaagactgcaaaactgctggacttaccctgggctgcagtccattgtcggcccctgggttgaatcaagatagtacttgcagctagatggatgcttttagccaggggacattgtgaggggaagattcctccacccagtctggcctgtggtgtctgtctcctccctgagaccacagcttctccagtagcagactcatgggcgccaccaagtggaagcacctggagcggcctctgccatccagtggggaagccaggccccgagacggaggtgggggcagcacgtgccctccacagccaccgctttcccgcctcagcagcccaggcctcctggcccagccctgcctggacagtgctctcccctcacccgggaagctggaatcctcctgcccgagaggaagcagacggcacagggacacccctgccaccttgggatctgcctccaagctggtgcagggtatcgagagtggattccagatggaggtcctggtcccagcacgcagcagtcctggtagctctgcagaggagacaggaacccgagaagtagctgaagcagaagccagccgcagtccccttgccacatagaggcgggcttctcccagccatggtgtcccctctgcctcccctcccccgaccctcctgccttccgcgtggagggtggtggtcctgtagtgtcagcaccagcaccatgggcttggaccccctccctggacacaggcaggtgtcctagggctgggggtgcagcccgagggaatggagaccacactcatggctcaggtctgccggggccggcagggggttggggaagaagagggctcaggcccagcaggggtggaagcccctgccactgccactacccgctccagagctttaaggaaaatgaagtgagacccctccccttaggcctggggagccatagggctggcttctctgtgggtgcgtggacgtggggttgggagctgggaatctattttttgtattatgttttgagctactgtagttttggcgtggcactattgtaatggaaataaaatacttgtacggag

SEQ ID NO: 438256 - DNA, 4809 bp, Homo sapiens
atgcggggcgtgtggccgcccccggtgtccgccctgctgtcggcgctggggatgtcgacgtacaagcgggccacgctggacgaggaggacctggtggactcgctctccgagggcgacgcataccccaacggcctgcaggtgaacttccacagcccccggagtggccagaggtgctgggctgcacggacccaggtggagaagcggctggtggtgttggtggtacttctggcggcaggactggtggcctgcttggcagcactgggcatccagtaccagacaagatccccctctgtgtgcctgagcgaagcttgtgtctcagtgaccagctccatcttgagctccatggaccccacagtggacccctgccatgacttcttcagctacgcctgtgggggctggatcaaggccaacccagtccctgatggccactcacgctgggggaccttcagcaacctctgggaacacaaccaagcaatcatcaagcacctcctcgaaaactccacggccagcgtgagcgaggcagagagaaaggcgcaagtatactaccgtgcgtgcatgaacgagaccaggatcgaggagctcagggccaaacctctaatggagttgattgagaggctcgggggctggaacatcacaggtccctgggccaaggacaacttccaggacaccctgcaggtggtcaccgcccactaccgcacctcacccttcttctctgtctatgtcagtgccgattccaagaactccaacagcaacgtgatccaggtggaccagtctggcctgggcttgccctcgagagactattacctgaacaaaactgaaaacgagaaggtgctgaccggatatctgaactacatggtccagctggggaagctgctgggcggcggggacgaggaggccatccggccccagatgcagcagatcttggactttgagacggcactggccaacatcaccatcccacaggagaagcgccgtgatgaggagctcatctaccacaaagtgacggcagccgagctgcagaccttggcacccgccatcaactggttgccttttctcaacaccatcttctaccccgtggagatcaatgaatccgagcctattgtggtctatgacaaggaataccttgagcagatctccactctcatcaacaccaccgacagatgcctgctcaacaactacatgatctggaacctggtgcggaaaacaagctccttccttgaccagcgctttcaggacgccgatgagaagttcatggaagtcatgtacgggaccaagaagacctgtcttcctcgctggaagttttgcgtgagtgacacagaaaacaacctgggctttgcgttgggccccatgtttgtcaaagcaaccttcgccgaggacagcaagagcatagccaccgagatcatcctggagattaagaaggcatttgaggaaagcctgagcaccctgaagtggatggatgaggaaacccgaaaatcagccaaggaaaaggccgatgccatctacaacatgataggataccccaacttcatcatggatcccaaggagctggacaaagtgtttaatgactacactgcagttccagacctctactttgaaaatgccatgcggtttttcaacttctcatggagggtcactgccgatcagctcaggaaagcccccaacagagatcagtggagcatgaccccgcccatggtgaacgcctactactcgcccaccaagaatgagattgtgtttccggccgggatcctgcaggcaccattctacacacgctcctcacccaaggccttaaactttggtggcataggtgtcgtcgtgggccatgagctgactcatgcttttgatgatcaaggacgggagtatgacaaggacgggaacctccggccatggtggaagaactcatccgtggaggccttcaagcgtcagaccgagtgcatggtagagcagtacagcaactacagcgtgaacggggagccggtgaacgggcggcacaccctgggggagaacatcgccgacaacgggggtctcaaggcggcctatcgggcttaccagaactgggtgaagaagaacggggctgagcactcgctccccaccctgggcctcaccaataaccagctcttcttcctgggctttgcacaggtctggtgctccgtccgcacacctgagagctcccacgaaggcctcatcaccgatccccacagcccctctcgcttccgggtcatcggctccctctccaattccaaggagttctcagaacacttccgctgcccacctggctcacccatgaacccgcctcacaagtgcgaagtctggtaaggacgaagcggagagagccaagacggaggaggggaaggggctgaggacgagacccccatccagcctccagggcattgctcagcccgcttggccacccggggccctgcttcctcacactggcgggttttcagccggaaccgagcccatggtgttggctctcaacgtgacccgcagtctgatcccctgtgaagagccggacatcccaggcacacgtgtgcgccaccttcagcaggcattcgggtgctgggctggtggctcatcaggcctgggccccacactgacaagcgccagatacgccacaaataccactgtgtcaaatgctttcaagatatatttttggggaaactattttttaaacactgtggaatacactggaaatcttcagggaaaaacacatttaaacacttttttttttaaggaaagaattggtatatttattatgttctgtttttctaaataacctgtggacaagggaagccccactgatttactccctctcttccccactccctgtgaggctgggctgaggcacggatccctgggccacagagcaagtctccaaatcagacagctgcctcagcccctgggatgtgtgatttcagctcctgtcacctcatgcaagggcgtggagaccagtagaggtgtggaggccaggcagagagaggagcctgctctgcggggggcccagctcatgggcactgccccttcagctagcctgcctccgtcccctgagtccaacagtgggagccctagctgggaagttctgatccccaaagccacagcaggggactgatggctatagcagaatgaggtcgggtcaggaccctcaaacaccatctgggaacaccaagcaccctgaatcgagactgcaggagccctgcggggtgagactgtgtcagagatacactgctggccacaagtgtcccctctcagtcccaccttttcgggctgtcccatgtctatctcaggggcccgttacctctctgcagcagtcccccatcccagccacaccagggtctgtccggccaaccctcttccccagggaaaggagaaaagagaaaacaggctgggcccggtggctcactcctgtaatcccagcactttgggaggttgaggtgggcggatcacctgaggtcaggagtttgagaccagcctggccaacgtggtgaaaccccatctctactaaaaaaaattacaaaaattagccgggagtggtggtgggcacctgtaatcccagttactcgggaggctgaggcaagagaatctcttgagctcaggaggcagaggttgcagtgagctgagattgcgccactgcactccagcctgggtgacagagggagactccgtcccaaaaaaaagaaaagagaaacagctgtcacctcccgcaggacccaaatcctctctctgagcaccgtcatccaccacatggctgggcctggctcccaggaccagtccagtcctctagtgccttatctgaggctgcagccgccagtctccaccccaaggagacagcccctgctcctagatgcccttggcctccgcagtgcagcccccaggtgtcctgactgaagcacaggccatagccccatttccccggtgcctgcagggctaacctccacgggagcccaggagctctggccggcaggtccatggcacagggcatcggaagactgcaaaactgctggacttaccctgggctgcagtccattgtcggcccctgggttgaatcaagatagtacttgcagctagatggatgcttttagccaggggacattgtgaggggaagattcctccacccagtctggcctgtggtgtctgtctcctcctggaatcctcctgcccgagaggaagcagacggcacagggacacccctgccaccttgggatctgcctccaagctggtgcagggtatcgagagtggattccagatggaggtcctggtcccagcacgcagcagtcctggtagctctgcagaggagacaggaacccgagaagtagctgaagcagaagccagccgcagtccccttgccacatagaggcgggcttctcccagccatggtgtcccctctgcctcccctcccccgaccctcctgccttccgcgtggagggtggtggtcctgtagtgtcagcaccagcaccatgggcttggaccccctccctggacacaggcaggtgtcctagggctgggggtgcagcccgagggaatggagaccacactcatggctcaggtctgccggggccggcagggggttggggaagaagagggctcaggcccagcaggggtggaagcccctgccactgccactacccgctccagagctttaaggaaaatgaagtgagacccctccccttaggcctggggagccatagggctggcttctctgtgggtgcgtggacgtggggttgggagctgggaatctattttttgtattatgttttgagctactgtagttttggcgtggcactattgtaatggaaataaaatacttgtacggag

SEQ ID NO: 438257 - DNA, 5092 bp, Homo sapiens
tgattacagatcttaggaggcaggtccgtccgagcagctgggctgggagcagggaacccggagctgggaatcgggagccgggcgcggggagctgcgcgaagccggggcggagcacgcgagctatgatgtcgacgtacaagcgggccacgctggacgaggaggacctggtggactcgctctccgagggcgacgcataccccaacggcctgcaggtgaacttccacagcccccggagtggccagaggtgctgggctgcacggacccaggtggagaagcggctggtggtgttggtggtacttctggcggcaggactggtggcctgcttggcagcactgggcatccagtaccagacaagatccccctctgtgtgcctgagcgaagcttgtgtctcagtgaccagctccatcttgagctccatggaccccacagtggacccctgccatgacttcttcagctacgcctgtgggggctggatcaaggccaacccagtccctgatggccactcacgctgggggaccttcagcaacctctgggaacacaaccaagcaatcatcaagcacctcctcgaaaactccacggccagcgtgagcgaggcagagagaaaggcgcaagtatactaccgtgcgtgcatgaacgagaccaggatcgaggagctcagggccaaacctctaatggagttgattgagaggctcgggggctggaacatcacaggtccctgggccaaggacaacttccaggacaccctgcaggtggtcaccgcccactaccgcacctcacccttcttctctgtctatgtcagtgccgattccaagaactccaacagcaacgtgatccaggtggaccagtctggcctgggcttgccctcgagagactattacctgaacaaaactgaaaacgagaaggtgctgaccggatatctgaactacatggtccagctggggaagctgctgggcggcggggacgaggaggccatccggccccagatgcagcagatcttggactttgagacggcactggccaacatcaccatcccacaggagaagcgccgtgatgaggagctcatctaccacaaagtgacggcagccgagctgcagaccttggcacccgccatcaactggttgccttttctcaacaccatcttctaccccgtggagatcaatgaatccgagcctattgtggtctatgacaaggaataccttgagcagatctccactctcatcaacaccaccgacagatgcctgctcaacaactacatgatctggaacctggtgcggaaaacaagctccttccttgaccagcgctttcaggacgccgatgagaagttcatggaagtcatgtacgggaccaagaagacctgtcttcctcgctggaagttttgcgtgagtgacacagaaaacaacctgggctttgcgttgggccccatgtttgtcaaagcaaccttcgccgaggacagcaagagcatagccaccgagatcatcctggagattaagaaggcatttgaggaaagcctgagcaccctgaagtggatggatgaggaaacccgaaaatcagccaaggaaaaggccgatgccatctacaacatgataggataccccaacttcatcatggatcccaaggagctggacaaagtgtttaatgactacactgcagttccagacctctactttgaaaatgccatgcggtttttcaacttctcatggagggtcactgccgatcagctcaggaaagcccccaacagagatcagtggagcatgaccccgcccatggtgaacgcctactactcgcccaccaagaatgagattgtgtttccggccgggatcctgcaggcaccattctacacacgctcctcacccaaggccttaaactttggtggcataggtgtcgtcgtgggccatgagctgactcatgcttttgatgatcaaggacgggagtatgacaaggacgggaacctccggccatggtggaagaactcatccgtggaggccttcaagcgtcagaccgagtgcatggtagagcagtacagcaactacagcgtgaacggggagccggtgaacgggcggcacaccctgggggagaacatcgccgacaacgggggtctcaaggcggcctatcgggcttaccagaactgggtgaagaagaacggggctgagcactcgctccccaccctgggcctcaccaataaccagctcttcttcctgggctttgcacaggtctggtgctccgtccgcacacctgagagctcccacgaaggcctcatcaccgatccccacagcccctctcgcttccgggtcatcggctccctctccaattccaaggagttctcagaacacttccgctgcccacctggctcacccatgaacccgcctcacaagtgcgaagtctggtaaggacgaagcggagagagccaagacggaggaggggaaggggctgaggacgagacccccatccagcctccagggcattgctcagcccgcttggccacccggggccctgcttcctcacactggcgggttttcagccggaaccgagcccatggtgttggctctcaacgtgacccgcagtctgatcccctgtgaagagccggacatcccaggcacacgtgtgcgccaccttcagcaggcattcgggtgctgggctggtggctcatcaggcctgggccccacactgacaagcgccagatacgccacaaataccactgtgtcaaatgctttcaagatatatttttggggaaactattttttaaacactgtggaatacactggaaatcttcagggaaaaacacatttaaacacttttttttttaaggaaagaattggtatatttattatgttctgtttttctaaataacctgtggacaagggaagccccactgatttactccctctcttccccactccctgtgaggctgggctgaggcacggatccctgggccacagagcaagtctccaaatcagacagctgcctcagcccctgggatgtgtgatttcagctcctgtcacctcatgcaagggcgtggagaccagtagaggtgtggaggccaggcagagagaggagcctgctctgcggggggcccagctcatgggcactgccccttcagctagcctgcctccgtcccctgagtccaacagtgggagccctagctgggaagttctgatccccaaagccacagcaggggactgatggctatagcagaatgaggtcgggtcaggaccctcaaacaccatctgggaacaccaagcaccctgaatcgagactgcaggagccctgcggggtgagactgtgtcagagatacactgctggccacaagtgtcccctctcagtcccaccttttcgggctgtcccatgtctatctcaggggcccgttacctctctgcagcagtcccccatcccagccacaccagggtctgtccggccaaccctcttccccagggaaaggagaaaagagaaaacaggctgggcccggtggctcactcctgtaatcccagcactttgggaggttgaggtgggcggatcacctgaggtcaggagtttgagaccagcctggccaacgtggtgaaaccccatctctactaaaaaaaattacaaaaattagccgggagtggtggtgggcacctgtaatcccagttactcgggaggctgaggcaagagaatctcttgagctcaggaggcagaggttgcagtgagctgagattgcgccactgcactccagcctgggtgacagagggagactccgtcccaaaaaaaagaaaagagaaacagctgtcacctcccgcaggacccaaatcctctctctgagcaccgtcatccaccacatggctgggcctggctcccaggaccagtccagtcctctagtgccttatctgaggctgcagccgccagtctccaccccaaggagacagcccctgctcctagatgcccttggcctccgcagtgcagcccccaggtgtcctgactgaagcacaggccatagccccatttccccggtgcctgcagggctaacctccacgggagcccaggagctctggccggcaggtccatggcacagggcatcggaagactgcaaaactgctggacttaccctgggctgcagtccattgtcggcccctgggttgaatcaagatagtacttgcagctagatggatgcttttagccaggggacattgtgaggggaagattcctccacccagtctggcctgtggtgtctgtctcctccctgagaccacagcttctccagtagcagactcatgggcgccaccaagtggaagcacctggagcggcctctgccatccagtggggaagccaggccccgagacggaggtgggggcagcacgtgccctccacagccaccgctttcccgcctcagcagcccaggcctcctggcccagccctgcctggacagtgctctcccctcacccgggaagctggaatcctcctgcccgagaggaagcagacggcacagggacacccctgccaccttgggatctgcctccaagctggtgcagggtatcgagagtggattccagatggaggtcctggtcccagcacgcagcagtcctggtagctctgcagaggagacaggaacccgagaagtagctgaagcagaagccagccgcagtccccttgccacatagaggcgggcttctcccagccatggtgtcccctctgcctcccctcccccgaccctcctgccttccgcgtggagggtggtggtcctgtagtgtcagcaccagcaccatgggcttggaccccctccctggacacaggcaggtgtcctagggctgggggtgcagcccgagggaatggagaccacactcatggctcaggtctgccggggccggcagggggttggggaagaagagggctcaggcccagcaggggtggaagcccctgccactgccactacccgctccagagctttaaggaaaatgaagtgagacccctccccttaggcctggggagccatagggctggcttctctgtgggtgcgtggacgtggggttgggagctgggaatctattttttgtattatgttttgagctactgtagttttggcgtggcactattgtaatggaaataaaatacttgtacggag

SEQ ID NO: 438258 - DNA, 5691 bp, Homo sapiens
cgcgccaagggttaagggcccgcgcgggcgcggggagtgcagcctcaggccgtgattggctgcgccacccaggcccccgcgccctgccattggccccgcggcggccccgcccctccggcactcggcgccgaagccgcgagctcgcccgctggagctgagcgcgccgcctgggccaggcagccgagccgtccgagcagctgggctgggagcagggaacccggagctgggaatcgggagccgggcgcggggagctgcgcgaagccggggcggagcacgcgagctatggtgagtgctgcgcgcggaggtctggtccggtccagcccagcctcgacggtcgcgggcagcggtgccgcgggtggcacccggggccgccctggctcgcggggggctgggcgccggctgcagcagcagcccccgcccggctctcggaaggcgtggagtcggggagcgcccgggcagagcgcggctctcccggcggcgctgcgcttggtcccgtcgggggcggccgcgccgagcttggttctggtcccagccggatgtggggggctcggggtccccggttcgctttggggacggttgctgcggtctgttttgggttgttctgaagtccctggactcagcttggcttggagacccagggcagccgggctgggtcgggctcgcgggtggcggcgatttcgaggtgcctggatgcagctggacctgagcgtcccgggacactgagatgtcgacgtacaagcgggccacgctggacgaggaggacctggtggactcgctctccgagggcgacgcataccccaacggcctgcaggtgaacttccacagcccccggagtggccagaggtgctgggctgcacggacccaggtggagaagcggctggtggtgttggtggtacttctggcggcaggactggtggcctgcttggcagcactgggcatccagtaccagacaagatccccctctgtgtgcctgagcgaagcttgtgtctcagtgaccagctccatcttgagctccatggaccccacagtggacccctgccatgacttcttcagctacgcctgtgggggctggatcaaggccaacccagtccctgatggccactcacgctgggggaccttcagcaacctctgggaacacaaccaagcaatcatcaagcacctcctcgaaaactccacggccagcgtgagcgaggcagagagaaaggcgcaagtatactaccgtgcgtgcatgaacgagaccaggatcgaggagctcagggccaaacctctaatggagttgattgagaggctcgggggctggaacatcacaggtccctgggccaaggacaacttccaggacaccctgcaggtggtcaccgcccactaccgcacctcacccttcttctctgtctatgtcagtgccgattccaagaactccaacagcaacgtgatccaggtggaccagtctggcctgggcttgccctcgagagactattacctgaacaaaactgaaaacgagaaggtgctgaccggatatctgaactacatggtccagctggggaagctgctgggcggcggggacgaggaggccatccggccccagatgcagcagatcttggactttgagacggcactggccaacatcaccatcccacaggagaagcgccgtgatgaggagctcatctaccacaaagtgacggcagccgagctgcagaccttggcacccgccatcaactggttgccttttctcaacaccatcttctaccccgtggagatcaatgaatccgagcctattgtggtctatgacaaggaataccttgagcagatctccactctcatcaacaccaccgacagatgcctgctcaacaactacatgatctggaacctggtgcggaaaacaagctccttccttgaccagcgctttcaggacgccgatgagaagttcatggaagtcatgtacgggaccaagaagacctgtcttcctcgctggaagttttgcgtgagtgacacagaaaacaacctgggctttgcgttgggccccatgtttgtcaaagcaaccttcgccgaggacagcaagagcatagccaccgagatcatcctggagattaagaaggcatttgaggaaagcctgagcaccctgaagtggatggatgaggaaacccgaaaatcagccaaggaaaaggccgatgccatctacaacatgataggataccccaacttcatcatggatcccaaggagctggacaaagtgtttaatgactacactgcagttccagacctctactttgaaaatgccatgcggtttttcaacttctcatggagggtcactgccgatcagctcaggaaagcccccaacagagatcagtggagcatgaccccgcccatggtgaacgcctactactcgcccaccaagaatgagattgtgtttccggccgggatcctgcaggcaccattctacacacgctcctcacccaaggccttaaactttggtggcataggtgtcgtcgtgggccatgagctgactcatgcttttgatgatcaaggacgggagtatgacaaggacgggaacctccggccatggtggaagaactcatccgtggaggccttcaagcgtcagaccgagtgcatggtagagcagtacagcaactacagcgtgaacggggagccggtgaacgggcggcacaccctgggggagaacatcgccgacaacgggggtctcaaggcggcctatcgggcttaccagaactgggtgaagaagaacggggctgagcactcgctccccaccctgggcctcaccaataaccagctcttcttcctgggctttgcacaggtctggtgctccgtccgcacacctgagagctcccacgaaggcctcatcaccgatccccacagcccctctcgcttccgggtcatcggctccctctccaattccaaggagttctcagaacacttccgctgcccacctggctcacccatgaacccgcctcacaagtgcgaagtctggtaaggacgaagcggagagagccaagacggaggaggggaaggggctgaggacgagacccccatccagcctccagggcattgctcagcccgcttggccacccggggccctgcttcctcacactggcgggttttcagccggaaccgagcccatggtgttggctctcaacgtgacccgcagtctgatcccctgtgaagagccggacatcccaggcacacgtgtgcgccaccttcagcaggcattcgggtgctgggctggtggctcatcaggcctgggccccacactgacaagcgccagatacgccacaaataccactgtgtcaaatgctttcaagatatatttttggggaaactattttttaaacactgtggaatacactggaaatcttcagggaaaaacacatttaaacacttttttttttaaggaaagaattggtatatttattatgttctgtttttctaaataacctgtggacaagggaagccccactgatttactccctctcttccccactccctgtgaggctgggctgaggcacggatccctgggccacagagcaagtctccaaatcagacagctgcctcagcccctgggatgtgtgatttcagctcctgtcacctcatgcaagggcgtggagaccagtagaggtgtggaggccaggcagagagaggagcctgctctgcggggggcccagctcatgggcactgccccttcagctagcctgcctccgtcccctgagtccaacagtgggagccctagctgggaagttctgatccccaaagccacagcaggggactgatggctatagcagaatgaggtcgggtcaggaccctcaaacaccatctgggaacaccaagcaccctgaatcgagactgcaggagccctgcggggtgagactgtgtcagagatacactgctggccacaagtgtcccctctcagtcccaccttttcgggctgtcccatgtctatctcaggggcccgttacctctctgcagcagtcccccatcccagccacaccagggtctgtccggccaaccctcttccccagggaaaggagaaaagagaaaacaggctgggcccggtggctcactcctgtaatcccagcactttgggaggttgaggtgggcggatcacctgaggtcaggagtttgagaccagcctggccaacgtggtgaaaccccatctctactaaaaaaaattacaaaaattagccgggagtggtggtgggcacctgtaatcccagttactcgggaggctgaggcaagagaatctcttgagctcaggaggcagaggttgcagtgagctgagattgcgccactgcactccagcctgggtgacagagggagactccgtcccaaaaaaaagaaaagagaaacagctgtcacctcccgcaggacccaaatcctctctctgagcaccgtcatccaccacatggctgggcctggctcccaggaccagtccagtcctctagtgccttatctgaggctgcagccgccagtctccaccccaaggagacagcccctgctcctagatgcccttggcctccgcagtgcagcccccaggtgtcctgactgaagcacaggccatagccccatttccccggtgcctgcagggctaacctccacgggagcccaggagctctggccggcaggtccatggcacagggcatcggaagactgcaaaactgctggacttaccctgggctgcagtccattgtcggcccctgggttgaatcaagatagtacttgcagctagatggatgcttttagccaggggacattgtgaggggaagattcctccacccagtctggcctgtggtgtctgtctcctccctgagaccacagcttctccagtagcagactcatgggcgccaccaagtggaagcacctggagcggcctctgccatccagtggggaagccaggccccgagacggaggtgggggcagcacgtgccctccacagccaccgctttcccgcctcagcagcccaggcctcctggcccagccctgcctggacagtgctctcccctcacccgggaagctggaatcctcctgcccgagaggaagcagacggcacagggacacccctgccaccttgggatctgcctccaagctggtgcagggtatcgagagtggattccagatggaggtcctggtcccagcacgcagcagtcctggtagctctgcagaggagacaggaacccgagaagtagctgaagcagaagccagccgcagtccccttgccacatagaggcgggcttctcccagccatggtgtcccctctgcctcccctcccccgaccctcctgccttccgcgtggagggtggtggtcctgtagtgtcagcaccagcaccatgggcttggaccccctccctggacacaggcaggtgtcctagggctgggggtgcagcccgagggaatggagaccacactcatggctcaggtctgccggggccggcagggggttggggaagaagagggctcaggcccagcaggggtggaagcccctgccactgccactacccgctccagagctttaaggaaaatgaagtgagacccctccccttaggcctggggagccatagggctggcttctctgtgggtgcgtggacgtggggttgggagctgggaatctattttttgtattatgttttgagctactgtagttttggcgtggcactattgtaatggaaataaaatacttgtacggag

SEQ ID NO: 438259 - DNA, 5156 bp, Homo sapiens
cgcgccaagggttaagggcccgcgcgggcgcggggagtgcagcctcaggccgtgattggctgcgccacccaggcccccgcgccctgccattggccccgcggcggccccgcccctccggcactcggcgccgaagccgcgagctcgcccgctggagctgagcgcgccgcctgggccaggcagccgagccgtccgagcagctgggctgggagcagggaacccggagctgggaatcgggagccgggcgcggggagctgcgcgaagccggggcggagcacgcgagctatgatgtcgacgtacaagcgggccacgctggacgaggaggacctggtggactcgctctccgagggcgacgcataccccaacggcctgcaggtgaacttccacagcccccggagtggccagaggtgctgggctgcacggacccaggtggagaagcggctggtggtgttggtggtacttctggcggcaggactggtggcctgcttggcagcactgggcatccagtaccagacaagatccccctctgtgtgcctgagcgaagcttgtgtctcagtgaccagctccatcttgagctccatggaccccacagtggacccctgccatgacttcttcagctacgcctgtgggggctggatcaaggccaacccagtccctgatggccactcacgctgggggaccttcagcaacctctgggaacacaaccaagcaatcatcaagcacctcctcgaaaactccacggccagcgtgagcgaggcagagagaaaggcgcaagtatactaccgtgcgtgcatgaacgagaccaggatcgaggagctcagggccaaacctctaatggagttgattgagaggctcgggggctggaacatcacaggtccctgggccaaggacaacttccaggacaccctgcaggtggtcaccgcccactaccgcacctcacccttcttctctgtctatgtcagtgccgattccaagaactccaacagcaacgtgatccaggtggaccagtctggcctgggcttgccctcgagagactattacctgaacaaaactgaaaacgagaaggtgctgaccggatatctgaactacatggtccagctggggaagctgctgggcggcggggacgaggaggccatccggccccagatgcagcagatcttggactttgagacggcactggccaacatcaccatcccacaggagaagcgccgtgatgaggagctcatctaccacaaagtgacggcagccgagctgcagaccttggcacccgccatcaactggttgccttttctcaacaccatcttctaccccgtggagatcaatgaatccgagcctattgtggtctatgacaaggaataccttgagcagatctccactctcatcaacaccaccgacagatgcctgctcaacaactacatgatctggaacctggtgcggaaaacaagctccttccttgaccagcgctttcaggacgccgatgagaagttcatggaagtcatgtacgggaccaagaagacctgtcttcctcgctggaagttttgcgtgagtgacacagaaaacaacctgggctttgcgttgggccccatgtttgtcaaagcaaccttcgccgaggacagcaagagcatagccaccgagatcatcctggagattaagaaggcatttgaggaaagcctgagcaccctgaagtggatggatgaggaaacccgaaaatcagccaaggaaaaggccgatgccatctacaacatgataggataccccaacttcatcatggatcccaaggagctggacaaagtgtttaatgactacactgcagttccagacctctactttgaaaatgccatgcggtttttcaacttctcatggagggtcactgccgatcagctcaggaaagcccccaacagagatcagtggagcatgaccccgcccatggtgaacgcctactactcgcccaccaagaatgagattgtgtttccggccgggatcctgcaggcaccattctacacacgctcctcacccaaggccttaaactttggtggcataggtgtcgtcgtgggccatgagctgactcatgcttttgatgatcaaggacgggagtatgacaaggacgggaacctccggccatggtggaagaactcatccgtggaggccttcaagcgtcagaccgagtgcatggtagagcagtacagcaactacagcgtgaacggggagccggtgaacgggcggcacaccctgggggagaacatcgccgacaacgggggtctcaaggcggcctatcgggtctggtgctccgtccgcacacctgagagctcccacgaaggcctcatcaccgatccccacagcccctctcgcttccgggtcatcggctccctctccaattccaaggagttctcagaacacttccgctgcccacctggctcacccatgaacccgcctcacaagtgcgaagtctggtaaggacgaagcggagagagccaagacggaggaggggaaggggctgaggacgagacccccatccagcctccagggcattgctcagcccgcttggccacccggggccctgcttcctcacactggcgggttttcagccggaaccgagcccatggtgttggctctcaacgtgacccgcagtctgatcccctgtgaagagccggacatcccaggcacacgtgtgcgccaccttcagcaggcattcgggtgctgggctggtggctcatcaggcctgggccccacactgacaagcgccagatacgccacaaataccactgtgtcaaatgctttcaagatatatttttggggaaactattttttaaacactgtggaatacactggaaatcttcagggaaaaacacatttaaacacttttttttttaaggaaagaattggtatatttattatgttctgtttttctaaataacctgtggacaagggaagccccactgatttactccctctcttccccactccctgtgaggctgggctgaggcacggatccctgggccacagagcaagtctccaaatcagacagctgcctcagcccctgggatgtgtgatttcagctcctgtcacctcatgcaagggcgtggagaccagtagaggtgtggaggccaggcagagagaggagcctgctctgcggggggcccagctcatgggcactgccccttcagctagcctgcctccgtcccctgagtccaacagtgggagccctagctgggaagttctgatccccaaagccacagcaggggactgatggctatagcagaatgaggtcgggtcaggaccctcaaacaccatctgggaacaccaagcaccctgaatcgagactgcaggagccctgcggggtgagactgtgtcagagatacactgctggccacaagtgtcccctctcagtcccaccttttcgggctgtcccatgtctatctcaggggcccgttacctctctgcagcagtcccccatcccagccacaccagggtctgtccggccaaccctcttccccagggaaaggagaaaagagaaaacaggctgggcccggtggctcactcctgtaatcccagcactttgggaggttgaggtgggcggatcacctgaggtcaggagtttgagaccagcctggccaacgtggtgaaaccccatctctactaaaaaaaattacaaaaattagccgggagtggtggtgggcacctgtaatcccagttactcgggaggctgaggcaagagaatctcttgagctcaggaggcagaggttgcagtgagctgagattgcgccactgcactccagcctgggtgacagagggagactccgtcccaaaaaaaagaaaagagaaacagctgtcacctcccgcaggacccaaatcctctctctgagcaccgtcatccaccacatggctgggcctggctcccaggaccagtccagtcctctagtgccttatctgaggctgcagccgccagtctccaccccaaggagacagcccctgctcctagatgcccttggcctccgcagtgcagcccccaggtgtcctgactgaagcacaggccatagccccatttccccggtgcctgcagggctaacctccacgggagcccaggagctctggccggcaggtccatggcacagggcatcggaagactgcaaaactgctggacttaccctgggctgcagtccattgtcggcccctgggttgaatcaagatagtacttgcagctagatggatgcttttagccaggggacattgtgaggggaagattcctccacccagtctggcctgtggtgtctgtctcctccctgagaccacagcttctccagtagcagactcatgggcgccaccaagtggaagcacctggagcggcctctgccatccagtggggaagccaggccccgagacggaggtgggggcagcacgtgccctccacagccaccgctttcccgcctcagcagcccaggcctcctggcccagccctgcctggacagtgctctcccctcacccgggaagctggaatcctcctgcccgagaggaagcagacggcacagggacacccctgccaccttgggatctgcctccaagctggtgcagggtatcgagagtggattccagatggaggtcctggtcccagcacgcagcagtcctggtagctctgcagaggagacaggaacccgagaagtagctgaagcagaagccagccgcagtccccttgccacatagaggcgggcttctcccagccatggtgtcccctctgcctcccctcccccgaccctcctgccttccgcgtggagggtggtggtcctgtagtgtcagcaccagcaccatgggcttggaccccctccctggacacaggcaggtgtcctagggctgggggtgcagcccgagggaatggagaccacactcatggctcaggtctgccggggccggcagggggttggggaagaagagggctcaggcccagcaggggtggaagcccctgccactgccactacccgctccagagctttaaggaaaatgaagtgagacccctccccttaggcctggggagccatagggctggcttctctgtgggtgcgtggacgtggggttgggagctgggaatctattttttgtattatgttttgagctactgtagttttggcgtggcactattgtaatggaaataaaatacttgtacggag

SEQ ID NO: 438260 - DNA, 4134 bp, Homo sapiens
cggtatgacgagcttcggtatgacgagcttcggtatgacgagctttgagacggcactggccaacatcaccatcccacaggagaagcgccgtgatgaggagctcatctaccacaaagtgacggcagccgagctgcagaccttggcacccgccatcaactggttgccttttctcaacaccatcttctaccccgtggagatcaatgaatccgagcctattgtggtctatgacaaggaataccttgagcagatctccactctcatcaacaccaccgacagatgcctgctcaacaactacatgatctggaacctggtgcggaaaacaagctccttccttgaccagcgctttcaggacgccgatgagaagttcatggaagtcatgtacgggaccaagaagacctgtcttcctcgctggaagttttgcgtgagtgacacagaaaacaacctgggctttgcgttgggccccatgtttgtcaaagcaaccttcgccgaggacagcaagagcatagccaccgagatcatcctggagattaagaaggcatttgaggaaagcctgagcaccctgaagtggatggatgaggaaacccgaaaatcagccaaggaaaaggccgatgccatctacaacatgataggataccccaacttcatcatggatcccaaggagctggacaaagtgtttaatgactacactgcagttccagacctctactttgaaaatgccatgcggtttttcaacttctcatggagggtcactgccgatcagctcaggaaagcccccaacagagatcagtggagcatgaccccgcccatggtgaacgcctactactcgcccaccaagaatgagattgtgtttccggccgggatcctgcaggcaccattctacacacgctcctcacccaaggccttaaactttggtggcataggtgtcgtcgtgggccatgagctgactcatgcttttgatgatcaaggacgggagtatgacaaggacgggaacctccggccatggtggaagaactcatccgtggaggccttcaagcgtcagaccgagtgcatggtagagcagtacagcaactacagcgtgaacggggagccggtgaacgggcggcacaccctgggggagaacatcgccgacaacgggggtctcaaggcggcctatcgggcttaccagaactgggtgaagaagaacggggctgagcactcgctccccaccctgggcctcaccaataaccagctcttcttcctgggctttgcacaggtctggtgctccgtccgcacacctgagagctcccacgaaggcctcatcaccgatccccacagcccctctcgcttccgggtcatcggctccctctccaattccaaggagttctcagaacacttccgctgcccacctggctcacccatgaacccgcctcacaagtgcgaagtctggtaaggacgaagcggagagagccaagacggaggaggggaaggggctgaggacgagacccccatccagcctccagggcattgctcagcccgcttggccacccggggccctgcttcctcacactggcgggttttcagccggaaccgagcccatggtgttggctctcaacgtgacccgcagtctgatcccctgtgaagagccggacatcccaggcacacgtgtgcgccaccttcagcaggcattcgggtgctgggctggtggctcatcaggcctgggccccacactgacaagcgccagatacgccacaaataccactgtgtcaaatgctttcaagatatatttttggggaaactattttttaaacactgtggaatacactggaaatcttcagggaaaaacacatttaaacacttttttttttaaggaaagaattggtatatttattatgttctgtttttctaaataacctgtggacaagggaagccccactgatttactccctctcttccccactccctgtgaggctgggctgaggcacggatccctgggccacagagcaagtctccaaatcagacagctgcctcagcccctgggatgtgtgatttcagctcctgtcacctcatgcaagggcgtggagaccagtagaggtgtggaggccaggcagagagaggagcctgctctgcggggggcccagctcatgggcactgccccttcagctagcctgcctccgtcccctgagtccaacagtgggagccctagctgggaagttctgatccccaaagccacagcaggggactgatggctatagcagaatgaggtcgggtcaggaccctcaaacaccatctgggaacaccaagcaccctgaatcgagactgcaggagccctgcggggtgagactgtgtcagagatacactgctggccacaagtgtcccctctcagtcccaccttttcgggctgtcccatgtctatctcaggggcccgttacctctctgcagcagtcccccatcccagccacaccagggtctgtccggccaaccctcttccccagggaaaggagaaaagagaaaacaggctgggcccggtggctcactcctgtaatcccagcactttgggaggttgaggtgggcggatcacctgaggtcaggagtttgagaccagcctggccaacgtggtgaaaccccatctctactaaaaaaaattacaaaaattagccgggagtggtggtgggcacctgtaatcccagttactcgggaggctgaggcaagagaatctcttgagctcaggaggcagaggttgcagtgagctgagattgcgccactgcactccagcctgggtgacagagggagactccgtcccaaaaaaaagaaaagagaaacagctgtcacctcccgcaggacccaaatcctctctctgagcaccgtcatccaccacatggctgggcctggctcccaggaccagtccagtcctctagtgccttatctgaggctgcagccgccagtctccaccccaaggagacagcccctgctcctagatgcccttggcctccgcagtgcagcccccaggtgtcctgactgaagcacaggccatagccccatttccccggtgcctgcagggctaacctccacgggagcccaggagctctggccggcaggtccatggcacagggcatcggaagactgcaaaactgctggacttaccctgggctgcagtccattgtcggcccctgggttgaatcaagatagtacttgcagctagatggatgcttttagccaggggacattgtgaggggaagattcctccacccagtctggcctgtggtgtctgtctcctccctgagaccacagcttctccagtagcagactcatgggcgccaccaagtggaagcacctggagcggcctctgccatccagtggggaagccaggccccgagacggaggtgggggcagcacgtgccctccacagccaccgctttcccgcctcagcagcccaggcctcctggcccagccctgcctggacagtgctctcccctcacccgggaagctggaatcctcctgcccgagaggaagcagacggcacagggacacccctgccaccttgggatctgcctccaagctggtgcagggtatcgagagtggattccagatggaggtcctggtcccagcacgcagcagtcctggtagctctgcagaggagacaggaacccgagaagtagctgaagcagaagccagccgcagtccccttgccacatagaggcgggcttctcccagccatggtgtcccctctgcctcccctcccccgaccctcctgccttccgcgtggagggtggtggtcctgtagtgtcagcaccagcaccatgggcttggaccccctccctggacacaggcaggtgtcctagggctgggggtgcagcccgagggaatggagaccacactcatggctcaggtctgccggggccggcagggggttggggaagaagagggctcaggcccagcaggggtggaagcccctgccactgccactacccgctccagagctttaaggaaaatgaagtgagacccctccccttaggcctggggagccatagggctggcttctctgtgggtgcgtggacgtggggttgggagctgggaatctattttttgtattatgttttgagctactgtagttttggcgtggcactattgtaatggaaataaaatacttgtacggag

SEQ ID NO: 438261 - DNA, 3845 bp, Homo sapiens
ttccagaacaaagcatgggccccacatggtgctacctcccagcaagaaaggggttgggaaacaaagggctggggcccagcgagccccctgacttgtgttttccagacctgtcttcctcgctggaagttttgcgtgagtgacacagaaaacaacctgggctttgcgttgggccccatgtttgtcaaagcaaccttcgccgaggacagcaagagcatagccaccgagatcatcctggagattaagaaggcatttgaggaaagcctgagcaccctgaagtggatggatgaggaaacccgaaaatcagccaaggaaaaggccgatgccatctacaacatgataggataccccaacttcatcatggatcccaaggagctggacaaagtgtttaatgactacactgcagttccagacctctactttgaaaatgccatgcggtttttcaacttctcatggagggtcactgccgatcagctcaggaaagcccccaacagagatcagtggagcatgaccccgcccatggtgaacgcctactactcgcccaccaagaatgagattgtgtttccggccgggatcctgcaggcaccattctacacacgctcctcacccaaggccttaaactttggtggcataggtgtcgtcgtgggccatgagctgactcatgcttttgatgatcaaggacgggagtatgacaaggacgggaacctccggccatggtggaagaactcatccgtggaggccttcaagcgtcagaccgagtgcatggtagagcagtacagcaactacagcgtgaacggggagccggtgaacgggcggcacaccctgggggagaacatcgccgacaacgggggtctcaaggcggcctatcgggcttaccagaactgggtgaagaagaacggggctgagcactcgctccccaccctgggcctcaccaataaccagctcttcttcctgggctttgcacaggtctggtgctccgtccgcacacctgagagctcccacgaaggcctcatcaccgatccccacagcccctctcgcttccgggtcatcggctccctctccaattccaaggagttctcagaacacttccgctgcccacctggctcacccatgaacccgcctcacaagtgcgaagtctggtaaggacgaagcggagagagccaagacggaggaggggaaggggctgaggacgagacccccatccagcctccagggcattgctcagcccgcttggccacccggggccctgcttcctcacactggcgggttttcagccggaaccgagcccatggtgttggctctcaacgtgacccgcagtctgatcccctgtgaagagccggacatcccaggcacacgtgtgcgccaccttcagcaggcattcgggtgctgggctggtggctcatcaggcctgggccccacactgacaagcgccagatacgccacaaataccactgtgtcaaatgctttcaagatatatttttggggaaactattttttaaacactgtggaatacactggaaatcttcagggaaaaacacatttaaacacttttttttttaaggaaagaattggtatatttattatgttctgtttttctaaataacctgtggacaagggaagccccactgatttactccctctcttccccactccctgtgaggctgggctgaggcacggatccctgggccacagagcaagtctccaaatcagacagctgcctcagcccctgggatgtgtgatttcagctcctgtcacctcatgcaagggcgtggagaccagtagaggtgtggaggccaggcagagagaggagcctgctctgcggggggcccagctcatgggcactgccccttcagctagcctgcctccgtcccctgagtccaacagtgggagccctagctgggaagttctgatccccaaagccacagcaggggactgatggctatagcagaatgaggtcgggtcaggaccctcaaacaccatctgggaacaccaagcaccctgaatcgagactgcaggagccctgcggggtgagactgtgtcagagatacactgctggccacaagtgtcccctctcagtcccaccttttcgggctgtcccatgtctatctcaggggcccgttacctctctgcagcagtcccccatcccagccacaccagggtctgtccggccaaccctcttccccagggaaaggagaaaagagaaaacaggctgggcccggtggctcactcctgtaatcccagcactttgggaggttgaggtgggcggatcacctgaggtcaggagtttgagaccagcctggccaacgtggtgaaaccccatctctactaaaaaaaattacaaaaattagccgggagtggtggtgggcacctgtaatcccagttactcgggaggctgaggcaagagaatctcttgagctcaggaggcagaggttgcagtgagctgagattgcgccactgcactccagcctgggtgacagagggagactccgtcccaaaaaaaagaaaagagaaacagctgtcacctcccgcaggacccaaatcctctctctgagcaccgtcatccaccacatggctgggcctggctcccaggaccagtccagtcctctagtgccttatctgaggctgcagccgccagtctccaccccaaggagacagcccctgctcctagatgcccttggcctccgcagtgcagcccccaggtgtcctgactgaagcacaggccatagccccatttccccggtgcctgcagggctaacctccacgggagcccaggagctctggccggcaggtccatggcacagggcatcggaagactgcaaaactgctggacttaccctgggctgcagtccattgtcggcccctgggttgaatcaagatagtacttgcagctagatggatgcttttagccaggggacattgtgaggggaagattcctccacccagtctggcctgtggtgtctgtctcctccctgagaccacagcttctccagtagcagactcatgggcgccaccaagtggaagcacctggagcggcctctgccatccagtggggaagccaggccccgagacggaggtgggggcagcacgtgccctccacagccaccgctttcccgcctcagcagcccaggcctcctggcccagccctgcctggacagtgctctcccctcacccgggaagctggaatcctcctgcccgagaggaagcagacggcacagggacacccctgccaccttgggatctgcctccaagctggtgcagggtatcgagagtggattccagatggaggtcctggtcccagcacgcagcagtcctggtagctctgcagaggagacaggaacccgagaagtagctgaagcagaagccagccgcagtccccttgccacatagaggcgggcttctcccagccatggtgtcccctctgcctcccctcccccgaccctcctgccttccgcgtggagggtggtggtcctgtagtgtcagcaccagcaccatgggcttggaccccctccctggacacaggcaggtgtcctagggctgggggtgcagcccgagggaatggagaccacactcatggctcaggtctgccggggccggcagggggttggggaagaagagggctcaggcccagcaggggtggaagcccctgccactgccactacccgctccagagctttaaggaaaatgaagtgagacccctccccttaggcctggggagccatagggctggcttctctgtgggtgcgtggacgtggggttgggagctgggaatctattttttgtattatgttttgagctactgtagttttggcgtggcactattgtaatggaaataaaatacttgtacggag

SEQ ID NO: 438262 - DNA, 3131 bp, Homo sapiens
atgcggggcgtgtggccgcccccggtgtccgccctgctgtcggcgctggggatgtcgacgtacaagcgggccacgctggacgaggaggacctggtggactcgctctccgagggcgacgcataccccaacggcctgcaggtgaacttccacagcccccggagtggccagaggtgctgggctgcacggacccaggtggagaagcggctggtggtgttggtggtacttctggcggcaggactggtggcctgcttggcagcactgggcatccagtaccagacaagatccccctctgtgtgcctgagcgaagcttgtgtctcagtgaccagctccatcttgagctccatggaccccacagtggacccctgccatgacttcttcagctacgcctgtgggggctggatcaaggccaacccagtccctgatggccactcacgctgggggaccttcagcaacctctgggaacacaaccaagcaatcatcaagcacctcctcgaaaactccacggccagcgtgagcgaggcagagagaaaggcgcaagtatactaccgtgcgtgcatgaacgagaccaggatcgaggagctcagggccaaacctctaatggagttgattgagaggctcgggggctggaacatcacaggtccctgggccaaggacaacttccaggacaccctgcaggtggtcaccgcccactaccgcacctcacccttcttctctgtctatgtcagtgccgattccaagaactccaacagcaacgtgatccaggtggaccagtctggcctgggcttgccctcgagagactattacctgaacaaaactgaaaacgagaaggtgctgaccggatatctgaactacatggtccagctggggaagctgctgggcggcggggacgaggaggccatccggccccagatgcagcagatcttggactttgagacggcactggccaacatcaccatcccacaggagaagcgccgtgatgaggagctcatctaccacaaagtgacggcagccgagctgcagaccttggcacccgccatcaactggttgccttttctcaacaccatcttctaccccgtggagatcaatgaatccgagcctattgtggtctatgacaaggaataccttgagcagatctccactctcatcaacaccaccgacagatgcctgctcaacaactacatgatctggaacctggtgcggaaaacaagctccttccttgaccagcgctttcaggacgccgatgagaagttcatggaagtcatgtacgggaccaagaagacctgtcttcctcgctggaagttttgcgtgagtgacacagaaaacaacctgggctttgcgttgggccccatgtttgtcaaagcaaccttcgccgaggacagcaagagcatagccaccgagatcatcctggagattaagaaggcatttgaggaaagcctgagcaccctgaagtggatggatgaggaaacccgaaaatcagccaaggaaaaggccgatgccatctacaacatgataggataccccaacttcatcatggatcccaaggagctggacaaagtgtttaatgactacactgcagttccagacctctactttgaaaatgccatgcggtttttcaacttctcatggagggtcactgccgatcagctcaggaaagcccccaacagagatcagtggagcatgaccccgcccatggtgaacgcctactactcgcccaccaagaatgagattgtgtttccggccgggatcctgcaggcaccattctacacacgctcctcacccaaggccttaaactttggtggcataggtgtcgtcgtgggccatgagctgactcatgcttttgatgatcaaggacgggagtatgacaaggacgggaacctccggccatggtggaagaactcatccgtggaggccttcaagcgtcagaccgagtgcatggtagagcagtacagcaactacagcgtgaacggggagccggtgaacgggcggcacaccctgggggagaacatcgccgacaacgggggtctcaaggcggcctatcgggcttaccagaactgggtgaagaagaacggggctgagcactcgctccccaccctgggcctcaccaataaccagctcttcttcctgggctttgcacaggtctggtgctccgtccgcacacctgagagctcccacgaaggcctcatcaccgatccccacagcccctctcgcttccgggtcatcggctccctctccaattccaaggagttctcagaacacttccgctgcccacctggctcacccatgaacccgcctcacaagtgcgaagtctggtaaggacgaagcggagagagccaagacggaggaggggaaggggctgaggacgagacccccatccagcctccagggcattgctcagcccgcttggccacccggggccctgcttcctcacactggcgggttttcagccggaaccgagcccatggtgttggctctcaacgtgacccgcagtctgatcccctgtgaagagccggacatcccaggcacacgtgtgcgccaccttcagcaggcattcgggtgctgggctggtggctcatcaggcctgggccccacactgacaagcgccagatacgccacaaataccactgtgtcaaatgctttcaagatatatttttggggaaactattttttaaacactgtggaatacactggaaatcttcagggaaaaacacatttaaacacttttttttttaaggaaagaattggtatatttattatgttctgtttttctaaataacctgtggacaagggaagccccactgatttactccctctcttccccactccctgtgaggctgggctgaggcacggatccctgggccacagagcaagtctccaaatcagacagctgcctcagcccctgggatgtgtgatttcagctcctgtcacctcatgcaagggcgtggagaccagtagaggtgtggaggccaggcagagagaggagcctgctctgcggggggcccagctcatgggcactgccccttcagctagcctgcctccgtcccctgagtccaacagtgggagccctagctgggaagttctgatcccctgtgaagagccggacatcccaggcacacgtgtgcgccacccttcag

SEQ ID NO: 438263 - DNA, 1173 bp, Homo sapiens
cccgggcaatattatcccccgcggaaaatatccgatcagcaccacaaacgctgatccagccagtgatgcactgaggctaacctccacgggagcccaggagctctggccggcaggtccatggcacagggcatcggaagactgcaaaactgctggacttaccctgggctgcagtccattgtcggcccctgggttgaatcaagatagtacttgcagctagatggatgcttttagccaggggacattgtgaggggaagattcctccacccagtctggcctgtggtgtctgtctcctccctgagaccacagcttctccagtagcagactcatgggcgccaccaagtggaagcacctggagcggcctctgccatccagtggggaagccaggccccgagacggaggtgggggcagcacgtgccctccacagccaccgctttcccgcctcagcagcccaggcctcctggcccagccctgcctggacagtgctctcccctcacccgggaagctggaatcctcctgcccgagaggaagcagacggcacagggacacccctgccaccttgggatctgcctccaagctggtgcagggtatcgagagtggattccagatggaggtcctggtcccagcacgcagcagtcctggtagctctgcagaggagacaggaacccgagaagtagctgaagcagaagccagccgcagtccccttgccacatagaggcgggcttctcccagccatggtgtcccctctgcctcccctcccccgaccctcctgccttccgcgtggagggtggtggtcctgtagtgtcagcaccagcaccatgggcttggaccccctccctggacacaggcaggtgtcctagggctgggggtgcagcccgagggaatggagaccacactcatggctcaggtctgccggggccggcagggggttggggaagaagagggctcaggcccagcaggggtggaagcccctgccactgccactacccgctccagagctttaaggaaaatgaagtgagacccctccccttaggcctggggagccatagggctggcttctctgtgggtgcgtggacgtggggttgggagctgggaatctattttttgtattatgttttgagctactgtagttttggcgtggcactattgtaatggaaataaaatacttgtacggag

SEQ ID NO: 438264 - DNA, 2935 bp, Homo sapiens
cgcgccaagggttaagggcccgcgcgggcgcggggagtgcagcctcaggccgtgattggctgcgccacccaggcccccgcgccctgccattggccccgcggcggccccgcccctccggcactcggcgccgaagccgcgagctcgcccgctggagctgagcgcgccgcctgggccaggcagccgagccgtccgagcagctgggctgggagcagggaacccggagctgggaatcgggagccgggcgcggggagctgcgcgaagccggggcggagcacgcgagctatgatgtcgacgtacaagcgggccacgctggacgaggaggacctggtggactcgctctccgagggcgacgcataccccaacggcctgcaggtgaacttccacagcccccggagtggccagaggtgctgggctgcacggacccaggtggagaagcggctggtggtgttggtggtacttctggcggcaggactggtggcctgcttggcagcactgggcatccagtaccagacaagatccccctctgtgtgcctgagcgaagcttgtgtctcagtgaccagctccatcttgagctccatggaccccacagtggacccctgccatgacttcttcagctacgcctgtgggggctggatcaaggccaacccagtccctgatggccactcacgctgggggaccttcagcaacctctgggaacacaaccaagcaatcatcaagcacctcctcgaaaactccacggccagcgtgagcgaggcagagagaaaggcgcaagtatactaccgtgcgtgcatgaacgagaccaggatcgaggagctcagggccaaacctctaatggagttgattgagaggctcgggggctggaacatcacaggtccctgggccaaggacaacttccaggacaccctgcaggtggtcaccgcccactaccgcacctcacccttcttctctgtctatgtcagtgccgattccaagaactccaacagcaacgtgatccaggtggaccagtctggcctgggcttgccctcgagagactattacctgaacaaaactgaaaacgagaaggtgctgaccggatatctgaactacatggtccagctggggaagctgctgggcggcggggacgaggaggccatccggccccagatgcagcagatcttggactttgagacggcactggccaacatcaccatcccacaggagaagcgccgtgatgaggagctcatctaccacaaagtgacggcagccgagctgcagaccttggcacccgccatcaactggttgccttttctcaacaccatcttctaccccgtggagatcaatgaatccgagcctattgtggtctatgacaaggaataccttgagcagatctccactctcatcaacaccaccgacagatgcctgctcaacaactacatgatctggaacctggtgcggaaaacaagctccttccttgaccagcgctttcaggacgccgatgagaagttcatggaagtcatgtacgggaccaagaagacctgtcttcctcgctggaagttttgcgtgagtgacacagaaaacaacctgggctttgcgttgggccccatgtttgtcaaagcaaccttcgccgaggacagcaagagcatagccaccgagatcatcctggagattaagaaggcatttgaggaaagcctgagcaccctgaagtggatggatgaggaaacccgaaaatcagccaaggaaaaggccgatgccatctacaacatgataggataccccaacttcatcatggatcccaaggagctggacaaagtgtttaatgactacactgcagttccagacctctactttgaaaatgccatgcggtttttcaacttctcatggagggtcactgccgatcagctcaggaaagcccccaacagagatcagtggagcatgaccccgcccatggtgaacgcctactactcgcccaccaagaatgagattgtgtttccggccgggatcctgcaggcaccattctacacacgctcctcacccaaggccttaaactttggtggcataggtgtcgtcgtgggccatgagctgactcatgcttttgatgatcaaggacgggagtatgacaaggacgggaacctccggccatggtggaagaactcatccgtggaggccttcaagcgtcagaccgagtgcatggtagagcagtacagcaactacagcgtgaacggggagccggtgaacgggcggcacaccctgggggagaacatcgccgacaacgggggtctcaaggcggcctatcgggcttaccagaactgggtgaagaagaacggggctgagcactcgctccccaccctgggcctcaccaataaccagctcttcttcctgggctttgcacaggtctggtgctccgtccgcacacctgagagctcccacgaaggcctcatcaccgatccccacagcccctctcgcttccgggtcatcggctccctctccaattccaaggagttctcagaacacttccgctgcccacctggctcacccatgaacccgcctcacaagtgcgaagtctggtaaggacgaagcggagagagccaagacggaggaggggaaggggctgaggacgagacccccatccagcctccagggcattgctcagcccgcttggccacccggggccctgcttcctcacactggcgggttttcagccggaaccgagcccatggtgttggctctcaacgtgacccgcagtctgatcccctgtgaagagccggacatcccaggcacacgtgtgcgccaccttcagcaggcattcgggtgctgggctggtggctcatcaggcctgggccccacactgacaagcgccagatacgccacaaataccactgtgtcaaatgctttcaagatatatttttggggaaactattttttaaacactgtggaatacactggaaatcttcaggga

SEQ ID NO: 438265 - DNA, 1496 bp, Homo sapiens
cgcgccaagggttaagggcccgcgcgggcgcggggagtgcagcctcaggccgtgattggctgcgccacccaggcccccgcgccctgccattggccccgcggcggccccgcccctccggcactcggcgccgaagccgcgagctcgcccgctggagctgagcgcgccgcctgggccaggcagccgagccgtccgagcagctgggctgggagcagggaacccggagctgggaatcgggagccgggcgcggggagctgcgcgaagccggggcggagcacgcgagctatgatgtcgacgtacaagcgggccacgctggacgaggaggacctggtggactcgctctccgagggcgacgcataccccaacggcctgcaggtgaacttccacagcccccggagtggccagaggtgctgggctgcacggacccaggtggagaagcggctggtggtgttggtggtacttctggcggcaggactggtggcctgcttggcagcactgggcatccagtaccagacaagatccccctctgtgtgcctgagcgaagcttgtgtctcagtgaccagctccatcttgagctccatggaccccacagtggacccctgccatgacttcttcagctacgcctgtgggggctggatcaaggccaacccagtccctgatggccactcacgctgggggaccttcagcaacctctgggaacacaaccaagcaatcatcaagcacctcctcgaaaactccacggccagcgtgagcgaggcagagagaaaggcgcaagtatactaccgtgcgtgcatgaacgagaccaggatcgaggagctcagggccaaacctctaatggagttgattgagaggctcgggggctggaacatcacaggtccctgggccaaggacaacttccaggacaccctgcaggtggtcaccgcccactaccgcacctcacccttcttctctgtctatgtcagtgccgattccaagaactccaacagcaacgtgatccaggtggaccagtctggcctgggcttgccctcgagagactattacctgaacaaaactgaaaacgagaaggtaagcgtgcctctcccctcccagcctgcctcccagcacggtccttcctgctccgtgtccacacccacacctgtgcaggtctttgaagctaggggagcccaggggtgtcagtgacctgatgggtgaaacaggcagaccctggcaggggagggacacccctaggctggctgtgtcactcaggcatcatggacacaaggggcaagagacaggtatcatttgtcctggttctagagagaggcagaggcagcaataacagctaccacaattcgcctggccctttatacatcacctgtgaccctcccattaaccctgcagatactgaacttcatttgcctcatctgtcaaacaggaattagttttgtcttgccttttacagaagagggtatcaggctcagagatgctaagtgatctgctcaaggtcacatagccagtaa

SEQ ID NO: 438266 - DNA, 1515 bp, Homo sapiens
tgaactgctaggtactccttttggcctaaggacacagtgaaaaatgtaccgagaccttggagagccacgaaccaagaaacttcagaaacctctgatatctgatcaagagttaagagacgtcagaatcatcacaactgacaaaagaatgttttctctcttcaagattctcttttgaaagacatctaaaaagatcaggaaaagaagacctacaccagcatcacttgtgattctcaatgagcataaccccccagaaatagatgacaagagggggcccaacacacaaggggaattacagaatgcatcccctaagcaaaggaagcagagtgtgtacacaccacccaccataaaaggtgcaaaatgagttgataacaaccagaagttgacttgttagtgctgtgcttctactcgagcttggaaaaatcccaacacaaaacaaacaccacctccgattccatcatgatgccacgttgctttctactggattacctcctgaagcactttagatattttatacataagtattgacatgtttttcagaagctgtttcttcacttattgcttttttctaataatttttattacaccatttgccaagtccttccctttggttttagtttattcctctctacaactaaaaaagggatcttgagtttaggtacattttaagtgattcatttttagtttttctaattctggaatctgagccttctcttacaacagggagtctttcaaaaacatttttttgtttctttttcaaattccactgtgtttatttattgccttgtttctttttcaaattccattggtcttgatttaatttagttccacagattttactgatagtctactacctgccaactactgaattatgcagcagacttataaaaataaaaaggctattttattgttattgccatcctgctagtaaagatttattcaattatttataattaattaagtggcttcacctatatttctgttaataatcacattaattatgtatgacaggtaggatttatgttatagataagaaaactagagtccaaagaaaataagtgtccccaaatgaaccaataatccaacaaacgcttccactaactagcttctgacctgtttgagttgtgatagattttagaataaaaaagcctatcctccttaggagccatagacttttattctttcttatactgtcttatatattgacttagagctaaacttcctccaattcagacataaagcataggcagatacttttgctaatgaggctaagctgggaagaaaaccctgagttctactttaattcttgggcattgacttcaaactaagatgacttataagaaataaaagaagtaaatttgaaactttaataaaaaaagtacatggttcatttaaaaatgtttcctatgtctaaatctatattttaaaaataacctttatcatgtaaaatgagagaattgctgagtttatgacaatcttaggtataaccttttcttaaagaacaaggcatcaatcttt

SEQ ID NO: 438267 - DNA, 931 bp, Homo sapiens
tgaactgctaggtactccttttggcctaaggacacagtgaaaaatgtaccgagaccttggagagccacgaaccaagaaacttcagaaacctctgatatctgatcaagagttaagagacgtcagaatcatcacaactgacaaaagaatgttttctctcttcaagattctcttttgaaagacatctaaaaagaaaccaggtctcactgttttgccaggctggtcttgaactcctgtgctcaagcaatcctcccaccttggcctctcagagtgctggggttacagaaatagatgacaagagggggcccaacacacaaggggaattacagaatgcatcccctaagcaaaggaagcagagtgtgtacacaccacccaccataaaaggggttaagcatctgaaaggccagaatgaatcagcattccctgaagaagaagaaggcaccaatgaaagagaggagcagcgggaccattaattactggtctgcagcaagaaggcttcttggaaataactgaactattaacttttctgagtataccatggaattccactgcttgacttccagaagcatcctccatctctgcaccccacactcatacagtagctatgcacatcctggaagtctccttgactgaactttagaactaagtacacattgttccacatcacttataattaaagaataagcatttattttacagtgattcttctttttaactatgtaaaaatttgcatacatgtgactgttctaactttaatactgccagagcttaatccttgatgtcctactgataaggtttgcattctaacaacacatgtaaataacatcactttaagagtaaaaaataaatagtaaacacatttagacatgagtgtgtgtgtgtgtgtgtgtgggtttagcttaaagagaaatatctaataaagcttttagcttga

SEQ ID NO: 438268 - DNA, 1454 bp, Homo sapiens
tgaactgctaggtactccttttggcctaaggacacagtgaaaaatgtaccgagaccttggagagccacgaaccaagaaacttcagaaacctctgatatctgatcaagagttaagagacgtcagaatcatcacaactgacaaaagaatgttttctctcttcaagattctcttttgaaagacatctaaaaagaaatagatgacaagagggggcccaacacacaaggggaattacagaatgcatcccctaagcaaaggaagcagagtgtgtacacaccacccaccataaaaggtgcaaaatgagttgataacaaccagaagttgacttgttagtgctgtgcttctactcgagcttggaaaaatcccaacacaaaacaaacaccacctccgattccatcatgatgccacgttgctttctactggattacctcctgaagcactttagatattttatacataagtattgacatgtttttcagaagctgtttcttcacttattgcttttttctaataatttttattacaccatttgccaagtccttccctttggttttagtttattcctctctacaactaaaaaagggatcttgagtttaggtacattttaagtgattcatttttagtttttctaattctggaatctgagccttctcttacaacagggagtctttcaaaaacatttttttgtttctttttcaaattccactgtgtttatttattgccttgtttctttttcaaattccattggtcttgatttaatttagttccacagattttactgatagtctactacctgccaactactgaattatgcagcagacttataaaaataaaaaggctattttattgttattgccatcctgctagtaaagatttattcaattatttataattaattaagtggcttcacctatatttctgttaataatcacattaattatgtatgacaggtaggatttatgttatagataagaaaactagagtccaaagaaaataagtgtccccaaatgaaccaataatccaacaaacgcttccactaactagcttctgacctgtttgagttgtgatagattttagaataaaaaagcctatcctccttaggagccatagacttttattctttcttatactgtcttatatattgacttagagctaaacttcctccaattcagacataaagcataggcagatacttttgctaatgaggctaagctgggaagaaaaccctgagttctactttaattcttgggcattgacttcaaactaagatgacttataagaaataaaagaagtaaatttgaaactttaataaaaaaagtacatggttcatttaaaaatgtttcctatgtctaaatctatattttaaaaataacctttatcatgtaaaatgagagaattgctgagtttatgacaatcttaggtataaccttttcttaaagaacaaggcatcaatcttt

SEQ ID NO: 438269 - DNA, 893 bp, Homo sapiens
tgaactgctaggtactccttttggcctaaggacacagtgaaaaatgtaccgagaccttggagagccacgaaccaagaaacttcagaaacctctgatatctgatcaagagttaagagacgtcagaatcatcacaactgacaaaaggtgctcccggattttgctctccagcttccggttcttggtctccaggctcctcactctgtccaagaatgttttctctcttcaagattctcttttgaaagacatctaaaaagatcaggaaaagaagacctacaccagcatcacttgtgattctcaatgagcataaccccccagaaatagatgacaagagggggcccaacacacaaggggaattacagaatgcatcccctaagcaaaggaagcagagtgtgtacacaccacccaccataaaaggggttaagcatctgaaaggccagaatgaatcagcattccctgaagaagaagaaggcaccaatgaaagagaggagcagcgggaccattaattactggtctgcagcaagaaggcttcttggaaataactgaactattaacttttctgagtataccatggaattccactgcttgacttccagaagcatcctccatctctgcaccccacactcatacagtagctatgcacatcctggaagtctccttgactgaactttagaactaagtacacattgttccacatcacttataattaaagaataagcatttattttacagtgattcttctttttaactatgtaaaaatttgcatacatgtgactgttctaactttaatactgccagagcttaatccttgatgtcctactgataaggtttgcattctaacaacacatgtaaataacatcactttaagagtaaaaaataaatagtaaacacattta

SEQ ID NO: 438270 - DNA, 1007 bp, Homo sapiens
gtattagtgaagaggcacacaattagcgtattgttcctttctgtattgtgctgagaggatccaagggattggtgggggaacaggcaagccaggcatcaccgtggatgttgaagaagggggttactcaaacctcggcatcttcacttgctcgatctggaattacagctatttattacgaagcactctgtgtggcttagtggagtgtgtctgaggaaacacatcccggacaccacttagggttagtctttctgagctcttcacatctctgactaattatcatcattaccatggagcccaacagtcccaaaaagatacagtttgccgtgcctgtattccagagtcagattgcacctgaagcagcagagcagatcaggaaaagaagacctacaccagcatcacttgtgattctcaatgagcataaccccccagaaatagatgacaagagggggcccaacacacaaggggaattacagaatgcatcccctaagcaaaggaagcagagtgtgtacacaccacccaccataaaaggggttaagcatctgaaaggccagaatgaatcagcattccctgaagaagaagaaggcaccaatgaaagagaggagcagcgggaccattaattactggtctgcagcaagaaggcttcttggaaataactgaactattaacttttctgagtataccatggaattccactgcttgacttccagaagcatcctccatctctgcaccccacactcatacagtagctatgcacatcctggaagtctccttgactgaactttagaactaagtacacattgttccacatcacttataattaaagaataagcatttattttacagtgattcttctttttaactatgtaaaaatttgcatacatgtgactgttctaactttaatactgccagagcttaatccttgatgtcctactgataaggtttgcattctaacaacacatgtaaataacatcactttaagagtaaaaaataaatagtaaacacattta

SEQ ID NO: 438271 - DNA, 832 bp, Homo sapiens
tgaactgctaggtactccttttggcctaaggacacagtgaaaaatgtaccgagaccttggagagccacgaaccaagaaacttcagaaacctctgatatctgatcaagagttaagagacgtcagaatcatcacaactgacaaaaggtgctcccggattttgctctccagcttccggttcttggtctccaggctcctcactctgtccaagaatgttttctctcttcaagattctcttttgaaagacatctaaaaagaaatagatgacaagagggggcccaacacacaaggggaattacagaatgcatcccctaagcaaaggaagcagagtgtgtacacaccacccaccataaaaggggttaagcatctgaaaggccagaatgaatcagcattccctgaagaagaagaaggcaccaatgaaagagaggagcagcgggaccattaattactggtctgcagcaagaaggcttcttggaaataactgaactattaacttttctgagtataccatggaattccactgcttgacttccagaagcatcctccatctctgcaccccacactcatacagtagctatgcacatcctggaagtctccttgactgaactttagaactaagtacacattgttccacatcacttataattaaagaataagcatttattttacagtgattcttctttttaactatgtaaaaatttgcatacatgtgactgttctaactttaatactgccagagcttaatccttgatgtcctactgataaggtttgcattctaacaacacatgtaaataacatcactttaagagtaaaaaataaatagtaaacacattta

SEQ ID NO: 438272 - DNA, 674 bp, Homo sapiens
  misc_feature (7)..(7): n is a, c, g, or t
  misc_feature (17)..(17): n is a, c, g, or t
cctcganccaggtgccngatataatctcgtggtgcgccgttttttaagccggtccgaaaagcacaatattcgggtgggagtgacccgatttcccagaaatagatgacaagagggggcccaacacacaaggggaattacagaatgcatcccctaagcaaaggaagcagagtgtgtacacaccacccaccataaaaggggttaagcatctgaaaggccagaatgaatcagcattccctgaagaagaagaaggcaccaatgaaagagaggagcagcgggaccattaattactggtctgcagcaagaaggcttcttggaaataactgaactattaacttttctgagtataccatggaattccactgcttgacttccagaagcatcctccatctctgcaccccacactcatacagtagctatgcacatcctggaagtctccttgactgaactttagaactaagtacacattgttccacatcacttataattaaagaataagcatttattttacagtgattcttctttttaactatgtaaaaatttgcatacatgtgactgttctaactttaatactgccagagcttaatccttgatgtcctactgataaggtttgcattctaacaacacatgtaaataacatcactttaagagtaaaaaataaatagtaaacacattta

SEQ ID NO: 438273 - DNA, 860 bp, Homo sapiens
tgaactgctaggtactccttttggcctaaggacacagtgaaaaatgtaccgagaccttggagagccacgaaccaagaaacttcagaaacctctgatatctgatcaagagttaagagacgtcagaatcatcacaactgacaaaagaatgttttctctcttcaagattctcttttgaaagacatctaaaaagaaaccaggtctcactgttttgccaggctggtcttgaactcctgtgctcaagcaatcctcccaccttggcctctcagagtgctggggttacagaaatagatgacaagagggggcccaacacacaaggggaattacagaatgcatcccctaagcaaaggaagcagagtgtgtacacaccacccaccataaaaggggttaagcatctgaaaggccagaatgaatcagcattccctgaagaagaagaaggcaccaatgaaagagaggagcagcgggaccattaattactggtctgcagcaagaaggcttcttggaaataactgaactattaacttttctgagtataccatggaattccactgcttgacttccagaagcatcctccatctctgcaccccacactcatacagtagctatgcacatcctggaagtctccttgactgaactttagaactaagtacacattgttccacatcacttataattaaagaataagcatttattttacagtgattcttctttttaactatgtaaaaatttgcatacatgtgactgttctaactttaatactgccagagcttaatccttgatgtcctactgataaggtttgcattctaacaacacatgtaaataacatcactttaagagtaaaaaataaatagtaaacacattta

SEQ ID NO: 438274 - DNA, 964 bp, Homo sapiens
tgaactgctaggtactccttttggcctaaggacacagtgaaaaatgtaccgagaccttggagagccacgaaccaagaaacttcagaaacctctgatatctgatcaagagttaagagacgtcagaatcatcacaactgacaaaaggtgctcccggattttgctctccagcttccggttcttggtctccaggctcctcactctgtccaagaatgttttctctcttcaagattctcttttgaaagacatctaaaaagatcaggaaaagaagacctacaccagcatcacttgtgattctcaatgagcataaccccccagaaatagatgacaagagggggcccaacacacaaggggaattacagaatgcatcccctaagcaaaggaagcagagtgtgtacacaccacccaccataaaaggggttaagcatctgaaaggccagaatgaatcagcattccctgaagaagaagaaggcaccaatgaaagagaggagcagcgggaccattaattactggtctgcagcaagaaggcttcttggaaataactgaactattaacttttctgagtataccatggaattccactgcttgacttccagaagcatcctccatctctgcaccccacactcatacagtagctatgcacatcctggaagtctccttgactgaactttagaactaagtacacattgttccacatcacttataattaaagaataagcatttattttacagtgattcttctttttaactatgtaaaaatttgcatacatgtgactgttctaactttaatactgccagagcttaatccttgatgtcctactgataaggtttgcattctaacaacacatgtaaataacatcactttaagagtaaaaaataaatagtaaacacatttagacatgagtgtgtgtgtgtgtgtgtgtgggtttagcttaaagagaaatatctaataaagcttttagcttga

SEQ ID NO: 438275 - DNA, 403 bp, Homo sapiens
ttacagaatgcatcccctaagcaaaggaagcagagtgtgtacacaccacccaccataaaaggtactgttcaggtactgtttcgggttgtcatgagtgctgaatcatggctggtcggccgtctgttctctaggaccacatatctgatgataagctagatctagtctcagctctacaacttaacagtgttatgttcagtaagatatcttatctacttaaaacttagtttcatcaagagtaaaatatggggttgaaaaagaaatagctagtgatctcagaatttcagtctagaaattcagtttccaaaataatgacaaagatttttttttaccgttattcgcatacttccttaaagagattttcccagaagccctaattactcttgccagtgttggcagatgatta

SEQ ID NO: 438276 - DNA, 618 bp, Homo sapiens
tatagagatgaagtctcactatgtttcccagcctagtctcaagctcctggactcaagtggtcctcctgcctcagccttccaaagtgcagggattacaggcatgagccaccgcacccagctcaactggttgttattgttaggttggtgtttttgcatggcaatgccatccgcctgacatattgattgtgcaacaatcaatatgttgcacaaaatatctactgagccttgtaacagcttcctaaatccaaggatagatcagaaactatattgtacttcatttaaggcactcatttttgcatttccattgcagatgtctggaaggttatacgatggatacagatacagatacattcacctgtcagaaagatggtcgctggttccctgagagaatctcctgcagtcctaaaaaatgtcctctcccggaaaacataacacatatacttgttcatggggacgatttcagtgtgaataggcaagtttctgtgtcatgtgcagaagggtatacctttgagggagttaacatatcagtatgtcaggtaagattctgtcttaattagaatgtgtaatgcctacatatacatatattgccaagcaagcagtatctataatagtaatccc

SEQ ID NO: 438277 - DNA, 260 bp, Homo sapiens
  misc_feature (26)..(26): n is a, c, g, or t
cggaaaatataaataatggaaaatanattttgagtgggcttaccctacctttcctactgcatcatattcatgcgatacaggatacagcttacagggcccttccattattgaatgcacggcttatataaaaattatattaaatagatgctgctcacaaaatgtacatattctgctgtctattgggaaagttcctggtacacatttttattcagttacttaaaatgatttttccattaaagtatattttgctactaaataaa

SEQ ID NO: 438278 - DNA, 4475 bp, Homo sapiens
acattttcctgtaaagaagggcatgtcctgcaaggcccctctgtcctgaaatgcttgccatcccagcaatggaatgactctttccctgtttgtaagattgttctttgtaccccacctcccctaatttcctttggtgtccccattccttcttctgctcttcattttggaagtactgtcaagtattcttgtgtaggtgggtttttcctaagaggaaattctaccaccctctgccaacctgatggcacctggagctctccactgccagaatgtgttccagtagaatgtccccaacctgaggaaatccccaatggaatcattgatgtgcaaggccttgcctatctcagcacagctctctatacctgcaagccaggctttgaattggtgggaaatactaccaccctttgtggagaagatggtcactggcttggaggaaaaccaacatgtaaagccattgagtgcctgaaacccaaggagattttgaatggcaaattctcttacacggacctacactatggacagaccgttacctactcttgcaaccgaggctttcggctcgaaggtcccagtgccttgacctgtttagagacaggtgattgggatgtagatgccccatcttgcaatgccatccactgtgattccccacaacccattgaaaatggttttgtagaaggtgcagattacagctatggtgccataatcatctacagttgcttccctgggtttcaggtggctggtcatgccatgcagacctgtgaagagtcaggatggtcaagttccatcccaacatgtatgccaatagactgtggcctccctcctcatatagattttggagactgtactaaactcaaagatgaccagggatattttgagcaagaagacgacatgatggaagttccatatgtgactcctcaccctccttatcatttgggagcagtggctaaaacctgggaaaatacaaaggagtctcctgctacacattcatcaaactttctgtatggtaccatggtttcatacacctgtaatccaggatatgaacttctggggaaccctgtgctgatctgccaggaagatggaacttggaatggcagtgcaccatcctgcatttcaattgaatgtgacttgcctactgctcctgaaaatggctttttgcgttttacagagactagcatgggaagtgctgtgcagtatagctgtaaacctggacacattctagcgggctctgacttaaggctttgtctagagaatagaaagtggagtggtgcctccccacgctgtgaagccatttcatgcaaaaagccaaatccagtcatgaatggatccatcaaaggaagcaactacacatacctgagcacgttgtactatgagtgtgaccccggatatgtgctgaatggcactgagaggagaacatgccaggatgacaaaaactgggatgaggatgagcccatttgcattcctgtggactgcagttcacccccagtctcagccaatggccaggtgagaggagacgagtacacattccaaaaagagattgaatacacttgcaatgaagggttcttgcttgagggagccaggagtcgggtttgtcttgccaatggaagttggagtggagccactcccgactgtgtgcctgtcagatgtgccaccccgccacaactggccaatggggtgacggaaggcctggactatggcttcatgaaggaagtaacattccactgtcatgagggctacatcttgcacggtgctccaaaactcacctgtcagtcagatggcaactgggatgcagagattcctctctgtaaaccagtcaactgtggacctcctgaagatcttgcccatggtttccctaatggtttttcctttattcatgggggccatatacagtatcagtgctttcctggttataagctccatggaaattcatcaagaaggtgcctctccaatggctcctggagtggcagctcaccttcctgcctgccttgcagatgttccacaccagtaattgaatatggaactgtcaatgggacagattttgactgtggaaaggcagcccggattcagtgcttcaaaggcttcaagctcctaggactttctgaaatcacctgtgaagccgatggccagtggagctctgggttcccccactgtgaacacacttcttgtggttctcttccaatgataccaaatgcgttcatcagtgagaccagctcttggaaggaaaatgtgataacttacagctgcaggtctggatatgtcatacaaggcagttcagatctgatttgtacagagaaaggggtatggagccagccttatccagtctgtgagcccttgtcctgtgggtccccaccgtctgtcgccaatgcagtggcaactggagaggcacacacctatgaaagtgaagtgaaactcagatgtctggaaggttatacgatggatacagatacagatacattcacctgtcagaaagatggtcgctggttccctgagagaatctcctgcagtcctaaaaaatgtcctctcccggaaaacataacacatatacttgttcatggggacgatttcagtgtgaataggcaagtttctgtgtcatgtgcagaagggtatacctttgagggagttaacatatcagtatgtcagcttgatggaacctgggagccaccattctccgatgaatcttgcagtccagtttcttgtgggaaacctgaaagtccagaacatggatttgtggttggcagtaaatacacctttgaaagcacaattatttatcagtgtgagcctggctatgaactagaggggaacagggaacgtgtctgccaggagaacagacagtggagtggaggggtggcaatatgcaaagagaccaggtgtgaaactccacttgaatttctcaatgggaaagctgacattgaaaacaggacgactggacccaacgtggtatattcctgcaacagaggctacagtcttgaagggccatctgaggcacactgcacagaaaatggaacctggagccacccagtccctctctgcaaaccaaatccatgccctgttccttttgtgattcccgagaatgctctgctgtctgaaaaggagttttatgttgatcagaatgtgtccatcaaatgtagggaaggttttctgctgcagggccacggcatcattacctgcaaccccgacgagacgtggacacagacaagcgccaaatgtgaaaaaatctcatgtggtccaccagctcacgtagaaaatgcaattgctcgaggcgtacattatcaatatggagacatgatcacctactcatgttacagtggatacatgttggagggtttcctgaggagtgtttgtttagaaaatggaacatggacatcacctcctatttgcagagctgtctgtcgatttccatgtcagaatgggggcatctgccaacgcccaaatgcttgttcctgtccagagggctggatggggcgcctctgtgaagaaccaatctgcattcttccctgtctgaacggaggtcgctgtgtggccccttaccagtgtgactgcccgcctggctggacggggtctcgctgtcatacagctgtttgccagtctccctgcttaaatggtggaaaatgtgtaagaccaaaccgatgtcactgtctttcttcttggacgggacataactgttccaggaaaaggaggactgggttttaaccactgcacgaccatctggctctcccaaaagcaggatcatctctcctcggtagtgcctgggcatcctggaacttatgcaaagaaagtccaacatggtgctgggtcttgtttagtaaacttgttacttggggttactttttttattttgtgatatattttgttattccttgtgacatactttcttacatgtttccatttttaaatatgcctgtattttctatataaaaattatattaaatagatgctgctcacaaaacaacaccagaaaaaaaaaaaaaaaaagaaaaaaagaaaataaaagagaaaaaaaaaaaaaaaaaaaaaaaataaaaagagagcagagtgaggcgcgagaggataaaaaaaaggagaggcgaggtgtcaggggggggggcggtggcggtggcgacatggagctatgcgagactggcgggatgggcgcggtgtggaagtgcggggacagaccgcatggaagcagaggaggtgtaccgggagtagaatcagggcagatagaggaggagctgtgtcgagaacaggggggacgagaggcataccgcgtagaaaggaggtgcagaggggagcagatgggaggagtgaggcggtatgtgtgcgcaccagcggcgatttgaggagcttcgaggtatcgctcgaacatgcatggaggtagattcggaggggcgagtagacaatggatggacgaagagggagaccggcatcctcgttgatacgccgagtttgaggtgcagggtaagcaacatacagtactatgcaatgcccagggggggcggccgccc

SEQ ID NO: 438279 - DNA, 1353 bp, Homo sapiens
ctgttgattggaatagtttcagaaggaatggtaccagctcctccttgtacctctggtagaatttggctgtgaatccatctggtcctggacttttcttggttggggaacagggaacgtgtctgccaggagaacagacagtggagtggaggggtggcaatatgcaaagagaccaggtgtgaaactccacttgaatttctcaatgggaaagctgacattgaaaacaggacgactggacccaacgtggtatattcctgcaacagaggctacagtcttgaagggccatctgaggcacactgcacagaaaatggaacctggagccacccagtccctctctgcaaaccaaatccatgccctgttccttttgtgattcccgagaatgctctgctgtctgaaaaggagttttatgttgatcagaatgtgtccatcaaatgtagggaaggttttctgctgcagggccacggcatcattacctgcaaccccgacgagacgtggacacagacaagcgccaaatgtgaaaaaatctcatgtggtccaccagctcacgtagaaaatgcaattgctcgaggcgtacattatcaatatggagacatgatcacctactcatgttacagtggatacatgttggagggtttcctgaggagtgtttgtttagaaaatggaacatggacatcacctcctatttgcagagctgtctgtcgatttccatgtcagaatgggggcatctgccaacgcccaaatgcttgttcctgtccagagggctggatggggcgcctctgtgaagaaccaatctgcattcttccctgtctgaacggaggtcgctgtgtggccccttaccagtgtgactgcccgcctggctggacggggtctcgctgtcatacagctgtttgccagtctccctgcttaaatggtggaaaatgtgtaagaccaaaccgatgtcactgtctttcttcttggacgggacataactgttccaggaaaaggaggactgggttttaaccactgcacgaccatctggctctcccaaaagcaggatcatctctcctcggtagtgcctgggcatcctggaacttatgcaaagaaagtccaacatggtgctgggtcttgtttagtaaacttgttacttggggttactttttttattttgtgatatattttgttattccttgtgacatactttcttacatgtttccatttttaaatatgcctgtattttctatataaaaattatattaaatagatgctgctcacaaaatgtacatattctgctgtctattgggaaagttcctggtacacatttttattcagttacttaaaatgatttttccattaaagtatattttgctactaaataaa

SEQ ID NO: 438280 - DNA, 3817 bp, Homo sapiens
acattttcctgtaaagaagggcatgtcctgcaaggcccctctgtcctgaaatgcttgccatcccagcaatggaatgactctttccctgtttgtaagattgttctttgtaccccacctcccctaatttcctttggtgtccccattccttcttctgctcttcattttggaagtactgtcaagtattcttgtgtaggtgggtttttcctaagaggaaattctaccaccctctgccaacctgatggcacctggagctctccactgccagaatgtgttccagtagaatgtccccaacctgaggaaatccccaatggaatcattgatgtgcaaggccttgcctatctcagcacagctctctatacctgcaagccaggctttgaattggtgggaaatactaccaccctttgtggagaagatggtcactggcttggaggaaaaccaacatgtaaagccattgagtgcctgaaacccaaggagattttgaatggcaaattctcttacacggacctacactatggacagaccgttacctactcttgcaaccgaggctttcggctcgaaggtcccagtgccttgacctgtttagagacaggtgattgggatgtagatgccccatcttgcaatgccatccactgtgattccccacaacccattgaaaatggttttgtagaaggtgcagattacagctatggtgccataatcatctacagttgcttccctgggtttcaggtggctggtcatgccatgcagacctgtgaagagtcaggatggtcaagttccatcccaacatgtatgccaatagactgtggcctccctcctcatatagattttggagactgtactaaactcaaagatgaccagggatattttgagcaagaagacgacatgatggaagttccatatgtgactcctcaccctccttatcatttgggagcagtggctaaaacctgggaaaatacaaaggagtctcctgctacacattcatcaaactttctgtatggtaccatggtttcatacacctgtaatccaggatatgaacttctggggaaccctgtgctgatctgccaggaagatggaacttggaatggcagtgcaccatcctgcatttcaattgaatgtgacttgcctactgctcctgaaaatggctttttgcgttttacagagactagcatgggaagtgctgtgcagtatagctgtaaacctggacacattctagcgggctctgacttaaggctttgtctagagaatagaaagtggagtggtgcctccccacgctgtgaagccatttcatgcaaaaagccaaatccagtcatgaatggatccatcaaaggaagcaactacacatacctgagcacgttgtactatgagtgtgaccccggatatgtgctgaatggcactgagaggagaacatgccaggatgacaaaaactgggatgaggatgagcccatttgcattcctgtggactgcagttcacccccagtctcagccaatggccaggtgagaggagacgagtacacattccaaaaagagattgaatacacttgcaatgaagggttcttgcttgagggagccaggagtcgggtttgtcttgccaatggaagttggagtggagccactcccgactgtgtgcctgtcagatgtgccaccccgccacaactggccaatggggtgacggaaggcctggactatggcttcatgaaggaagtaacattccactgtcatgagggctacatcttgcacggtgctccaaaactcacctgtcagtcagatggcaactgggatgcagagattcctctctgtaaaccagtcaactgtggacctcctgaagatcttgcccatggtttccctaatggtttttcctttattcatgggggccatatacagtatcagtgctttcctggttataagctccatggaaattcatcaagaaggtgcctctccaatggctcctggagtggcagctcaccttcctgcctgccttgcagatgttccacaccagtaattgaatatggaactgtcaatgggacagattttgactgtggaaaggcagcccggattcagtgcttcaaaggcttcaagctcctaggactttctgaaatcacctgtgaagccgatggccagtggagctctgggttcccccactgtgaacacacttcttgtggttctcttccaatgataccaaatgcgttcatcagtgagaccagctcttggaaggaaaatgtgataacttacagctgcaggtctggatatgtcatacaaggcagttcagatctgatttgtacagagaaaggggtatggagccagccttatccagtctgtgagcccttgtcctgtgggtccccaccgtctgtcgccaatgcagtggcaactggagaggcacacacctatgaaagtgaagtgaaactcagatgtctggaaggttatacgatggatacagatacagatacattcacctgtcagaaagatggtcgctggttccctgagagaatctcctgcagtcctaaaaaatgtcctctcccggaaaacataacacatatacttgttcatggggacgatttcagtgtgaataggcaagtttctgtgtcatgtgcagaagggtatacctttgagggagttaacatatcagtatgtcagcttgatggaacctgggagccaccattctccgatgaatcttgcagtccagtttcttgtgggaaacctgaaagtccagaacatggatttgtggttggcagtaaatacacctttgaaagcacaattatttatcagtgtgagcctggctatgaactagaggggaacagggaacgtgtctgccaggagaacagacagtggagtggaggggtggcaatatgcaaagagaccaggtgtgaaactccacttgaatttctcaatgggaaagctgacattgaaaacaggacgactggacccaacgtggtatattcctgcaacagaggctacagtcttgaagggccatctgaggcacactgcacagaaaatggaacctggagccacccagtccctctctgcaaaccaaatccatgccctgttccttttgtgattcccgagaatgctctgctgtctgaaaaggagttttatgttgatcagaatgtgtccatcaaatgtagggaaggttttctgctgcagggccacggcatcattacctgcaaccccgacgagacgtggacacagacaagcgccaaatgtgaaagcttgttcctgtccagagggctggatggggcgcctctgtgaagaaccaatctgcattcttccctgtctgaacggaggtcgctgtgtggccccttaccagtgtgactgcccgcctggctggacggggtctcgctgtcatacagctgtttgccagtctccctgcttaaatggtggaaaatgtgtaagaccaaaccgatgtcactgtctttcttcttggacgggacataactgttccaggaaaaggaggactgggttttaaccactgcacgaccatctggctctcccaaaagcaggatcatctctcctcggtagtgcctgggcatcctggaacttatgcaaagaaagtccaacatggtgctgggtcttgtttagtaaacttgttacttggggttactttttttattttgtgatatattttgttattccttgtgacatactttcttacatgtttccatttttaaatatgcctgtattttctatataaaaattatattaaatagatgctgctcacaaaatgtacatattctgctgtctattgggaaagttcctggtacacatttttattcagttacttaaaatgatttttccattaaagtatattttgctactaaataaa

SEQ ID NO: 438281 - DNA, 1180 bp, Homo sapiens
ggtaagaatgggcaaaagtgaataagttacaagaaacaggcttttatccattggctattgggtttttatgtttctggttacttcgtgggattggtttctcaaaactcactcagggggattaccggtctgtcacgtagcagctttttaaaaaacgggacggtgcagtgtggttctgagtgcagtcttaataaagcccagtgctgtacgggtaaatataaacatttagtaacgtgaaaagcacaaggacacaatatgtccccttaatagcgggaaaaaccaatataagccctcccactccctactaccacggatggccaccaaagaattaaacaaaagtgcccagccaaccctatgttgatgggcagctcacgtagaaaatgcaattgctcgaggcgtacattatcaatatggagacatgatcacctactcatgttacagtggatacatgttggagggtttcctgaggagtgtttgtttagaaaatggaacatggacatcacctcctatttgcagagctgtctgtcgatttccatgtcagaatgggggcatctgccaacgcccaaatgcttgttcctgtccagagggctggatggggcgcctctgtgaagaaccaatctgcattcttccctgtctgaacggaggtcgctgtgtggccccttaccagtgtgactgcccgcctggctggacggggtctcgctgtcatacagctgtttgccagtctccctgcttaaatggtggaaaatgtgtaagaccaaaccgatgtcactgtctttcttcttggacgggacataactgttccaggaaaaggaggactgggttttaaccactgcacgaccatctggctctcccaaaagcaggatcatctctcctcggtagtgcctgggcatcctggaacttatgcaaagaaagtccaacatggtgctgggtcttgtttagtaaacttgttacttggggttactttttttattttgtgatatattttgttattccttgtgacatactttcttacatgtttccatttttaaatatgcctgtattttctatataaaaattatattaaatagatgctgctcacaaaatgtacatattctgctgtctattgggaaagttcctggtacacatttttattcagttacttaaaatgatttttccattaaagtatattttgctactaaataaa

SEQ ID NO: 438282 - DNA, 1500 bp, Homo sapiens
acattttcctgtaaagaagggcatgtcctgcaaggcccctctgtcctgaaatgcttgccatcccagcaatggaatgactctttccctgtttgtaagattgttctttgtaccccacctcccctaatttcctttggtgtccccattccttcttctgctcttcattttggaagtactgtcaagtattcttgtgtaggtgggtttttcctaagaggaaattctaccaccctctgccaacctgatggcacctggagctctccactgccagaatgtgttccagtagaatgtccccaacctgaggaaatccccaatggaatcattgatgtgcaaggccttgcctatctcagcacagctctctatacctgcaagccaggctttgaattggtgggaaatactaccaccctttgtggagaagatggtcactggcttggaggaaaaccaacatgtaaagccattgagtgcctgaaacccaaggagattttgaatggcaaattctcttacacggacctacactatggacagaccgttacctactcttgcaaccgaggctttcggctcgaaggtcccagtgccttgacctgtttagagacaggtgattgggatgtagatgccccatcttgcaatgccatccactgtgattccccacaacccattgaaaatggttttgtagaaggtgcagattacagctatggtgccataatcatctacagttgcttccctgggtttcaggtggctggtcatgccatgcagacctgtgaagagtcaggatggtcaagttccatcccaacatgtatgccaatagactgtggcctccctcctcatatagattttggagactgtactaaactcaaagatgaccagggatattttgagcaagaagacgacatgatggaagttccatatgtgactcctcaccctccttatcatttgggagcagtggctaaaacctgggaaaatacaaaggagtctcctgctacacattcatcaaactttctgtatggtaccatggtttcatacacctgtaatccaggatatgaacttctggggaaccctgtgctgatctgccaggaagatggaacttggaatggcagtgcaccatcctgcatttcaattgaatgtgacttgcctactgctcctgaaaatggctttttgcgttttacagagactagcatgggaagtgctgtgcagtatagctgtaaacctggacacattctagcgggctctgacttaaggctttgtctagagaatagaaagtggagtggtgcctccccacagggtgaacccagttaagacgttgagccacatcgcactacatgcacaaggatggaatccaatgcaagctagacacaaagaagcatgccccgcagcgtaccaggacgcgggaccccgaagagatgtgaaatggccccgagaggaggaaaggccaagatgaacgaaaactgggaagagcagggaacacggcggcagtaacgaggactccagtaaagccacccatatcactct

SEQ ID NO: 438283 - DNA, 198 bp, Homo sapiens
tgtgacatactttcttacatgtttccatttttaaatatgcctgtattttctatataaaaattatattaaatagatgctgctcacaaaatgtacatattctgctgtctattgggaaagttcctggtacacatttttattcagttacttaaaatgatttttccattaaagtatattttgctactaaataaattttgctgg

SEQ ID NO: 438284 - DNA, 427 bp, Homo sapiens
gaattgtaagatagatagaaaactagtggcagaatcaagagtaaaactcaggtctgatgcttctcagatctttccataagttagcacttgtttcccatgcctcttagttatctcaaagaatgacccccatccgtataaacatcacagataatgcccaggtatctgggactttcaatcctgttttcatcaactcctaaagagatgttagctcttcagttcaattttttcttttgaatctatttggttgcttttttttttttttccaggaaaaggaggactgggttttaaccactgcacgaccatctggctctcccaaaagcaggatcatctctcctcggtagtgcctgggcatcctggaacttatgcaaagaaagtccaacatggtgctgggtcttgtttagtaaacttgttacttggggttactttt

SEQ ID NO: 438285 - DNA, 579 bp, Homo sapiens
ttacagtggatacatgttggagggtttcctgaggagtgtttgtttagaaaatggaacatggacatcacctcctatttgcagaggtaaggaaatatttgaatggttatttcttagtgaaactgcagggaaatgtgtatagaaatctgatttgtccagcaattaatatgcatactactttatttttccttggctttaaaatttcttttagcagctgtgtaattttcttttaatgttatggtttgagttttaaaagcacatagaactcttaggttctgtgcttgaaatgttgcaaaatagaaagaggtaatgaggcaccctagtattatatccttctaaaacttacacttttataataaaatatgatttttatacatcataataattatttcattcattctacaaatatttgctagaagtcgagaagtacgctagtacacacagataaaaccaaggaactaaataattgagttgttggatgagttgaccacaaactgttcagatttggactttttttttttttaatactttaagttttagggtacatgcacacaacatgcgggtttgttacatatgtctaca

SEQ ID NO: 438286 - DNA, 4038 bp, Homo sapiens
acattttcctgtaaagaagggcatgtcctgcaaggcccctctgtcctgaaatgcttgccatcccagcaatggaatgactctttccctgtttgtaagattgttctttgtaccccacctcccctaatttcctttggtgtccccattccttcttctgctcttcattttggaagtactgtcaagtattcttgtgtaggtgggtttttcctaagaggaaattctaccaccctctgccaacctgatggcacctggagctctccactgccagaatgtgttccagtagaatgtccccaacctgaggaaatccccaatggaatcattgatgtgcaaggccttgcctatctcagcacagctctctatacctgcaagccaggctttgaattggtgggaaatactaccaccctttgtggagaagatggtcactggcttggaggaaaaccaacatgtaaagccattgagtgcctgaaacccaaggagattttgaatggcaaattctcttacacggacctacactatggacagaccgttacctactcttgcaaccgaggctttcggctcgaaggtcccagtgccttgacctgtttagagacaggtgattgggatgtagatgccccatcttgcaatgccatccactgtgattccccacaacccattgaaaatggttttgtagaaggtgcagattacagctatggtgccataatcatctacagttgcttccctgggtttcaggtggctggtcatgccatgcagacctgtgaagagtcaggatggtcaagttccatcccaacatgtatgccaatagactgtggcctccctcctcatatagattttggagactgtactaaactcaaagatgaccagggatattttgagcaagaagacgacatgatggaagttccatatgtgactcctcaccctccttatcatttgggagcagtggctaaaacctgggaaaatacaaaggagtctcctgctacacattcatcaaactttctgtatggtaccatggtttcatacacctgtaatccaggatatgaacttctggggaaccctgtgctgatctgccaggaagatggaacttggaatggcagtgcaccatcctgcatttcaattgaatgtgacttgcctactgctcctgaaaatggctttttgcgttttacagagactagcatgggaagtgctgtgcagtatagctgtaaacctggacacattctagcgggctctgacttaaggctttgtctagagaatagaaagtggagtggtgcctccccacgctgtgaagccatttcatgcaaaaagccaaatccagtcatgaatggatccatcaaaggaagcaactacacatacctgagcacgttgtactatgagtgtgaccccggatatgtgctgaatggcactgagaggagaacatgccaggatgacaaaaactgggatgaggatgagcccatttgcattcctgtggactgcagttcacccccagtctcagccaatggccaggtgagaggagacgagtacacattccaaaaagagattgaatacacttgcaatgaagggttcttgcttgagggagccaggagtcgggtttgtcttgccaatggaagttggagtggagccactcccgactgtgtgcctgtcagatgtgccaccccgccacaactggccaatggggtgacggaaggcctggactatggcttcatgaaggaagtaacattccactgtcatgagggctacatcttgcacggtgctccaaaactcacctgtcagtcagatggcaactgggatgcagagattcctctctgtaaaccagtcaactgtggacctcctgaagatcttgcccatggtttccctaatggtttttcctttattcatgggggccatatacagtatcagtgctttcctggttataagctccatggaaattcatcaagaaggtgcctctccaatggctcctggagtggcagctcaccttcctgcctgccttgcagatgttccacaccagtaattgaatatggaactgtcaatgggacagattttgactgtggaaaggcagcccggattcagtgcttcaaaggcttcaagctcctaggactttctgaaatcacctgtgaagccgatggccagtggagctctgggttcccccactgtgaacacacttcttgtggttctcttccaatgataccaaatgcgttcatcagtgagaccagctcttggaaggaaaatgtgataacttacagctgcaggtctggatatgtcatacaaggcagttcagatctgatttgtacagagaaaggggtatggagccagccttatccagtctgtgagcccttgtcctgtgggtccccaccgtctgtcgccaatgcagtggcaactggagaggcacacacctatgaaagtgaagtgaaactcagatgtctggaaggttatacgatggatacagatacagatacattcacctgtcagaaagatggtcgctggttccctgagagaatctcctgcagtcctaaaaaatgtcctctcccggaaaacataacacatatacttgttcatggggacgatttcagtgtgaataggcaagtttctgtgtcatgtgcagaagggtatacctttgagggagttaacatatcagtatgtcagcttgatggaacctgggagccaccattctccgatgaatcttgcagtccagtttcttgtgggaaacctgaaagtccagaacatggatttgtggttggcagtaaatacacctttgaaagcacaattatttatcagtgtgagcctggctatgaactagaggggaacagggaacgtgtctgccaggagaacagacagtggagtggaggggtggcaatatgcaaagagaccaggtgtgaaactccacttgaatttctcaatgggaaagctgacattgaaaacaggacgactggacccaacgtggtatattcctgcaacagaggctacagtcttgaagggccatctgaggcacactgcacagaaaatggaacctggagccacccagtccctctctgcaaaccaaatccatgccctgttccttttgtgattcccgagaatgctctgctgtctgaaaaggagttttatgttgatcagaatgtgtccatcaaatgtagggaaggttttctgctgcagggccacggcatcattacctgcaaccccgacgagacgtggacacagacaagcgccaaatgtgaaaaaatctcatgtggtccaccagctcacgtagaaaatgcaattgctcgaggcgtacattatcaatatggagacatgatcacctactcatgttacagtggatacatgttggagggtttcctgaggagtgtttgtttagaaaatggaacatggacatcacctcctatttgcagagctgtctgtcgatttccatgtcagaatgggggcatctgccaacgcccaaatgcttgttcctgtccagagggctggatggggcgcctctgtgaagaaccaatctgcattcttccctgtctgaacggaggtcgctgtgtggccccttaccagtgtgactgcccgcctggctggacggggtctcgctgtcatacagctgtttgccagtctccctgcttaaatggtggaaaatgtgtaagaccaaaccgatgtcactgtctttcttcttggacgggacataactgttccaggaaaaggaggactgggttttaaccactgcacgaccatctggctctcccaaaagcaggatcatctctcctcggtagtgcctgggcatcctggaacttatgcaaagaaagtccaacatggtgctgggtcttgtttagtaaacttgttacttggggttactttttttattttgtgatatattttgttattccttgtgacatactttcttacatgtttccatttttaaatatgcctgtattttctatataaaaattatattaaatagatgctgctcacaaaatgtacatattctgctgtctattgggaaagttcctggtacacatttttattcagttacttaaaatgatttttccattaaagtatattttgctactaaataaa

SEQ ID NO: 438287 - DNA, 1943 bp, Homo sapiens
tatagagatgaagtctcactatgtttcccagcctagtctcaagctcctggactcaagtggtcctcctgcctcagccttccaaagtgcagggattacaggcatgagccaccgcacccagctcaactggttgttattgttaggttggtgtttttgcatggcaatgccatccgcctgacatattgattgtgcaacaatcaatatgttgcacaaaatatctactgagccttgtaacagcttcctaaatccaaggatagatcagaaactatattgtacttcatttaaggcactcatttttgcatttccattgcagatgtctggaaggttatacgatggatacagatacagatacattcacctgtcagaaagatggtcgctggttccctgagagaatctcctgcagtcctaaaaaatgtcctctcccggaaaacataacacatatacttgttcatggggacgatttcagtgtgaataggcaagtttctgtgtcatgtgcagaagggtatacctttgagggagttaacatatcagtatgtcagcttgatggaacctgggagccaccattctccgatgaatcttgcagtccagtttcttgtgggaaacctgaaagtccagaacatggatttgtggttggcagtaaatacacctttgaaagcacaattatttatcagtgtgagcctggctatgaactagaggggaacagggaacgtgtctgccaggagaacagacagtggagtggaggggtggcaatatgcaaagagaccaggtgtgaaactccacttgaatttctcaatgggaaagctgacattgaaaacaggacgactggacccaacgtggtatattcctgcaacagaggctacagtcttgaagggccatctgaggcacactgcacagaaaatggaacctggagccacccagtccctctctgcaaaccaaatccatgccctgttccttttgtgattcccgagaatgctctgctgtctgaaaaggagttttatgttgatcagaatgtgtccatcaaatgtagggaaggttttctgctgcagggccacggcatcattacctgcaaccccgacgagacgtggacacagacaagcgccaaatgtgaaaaaatctcatgtggtccaccagctcacgtagaaaatgcaattgctcgaggcgtacattatcaatatggagacatgatcacctactcatgttacagtggatacatgttggagggtttcctgaggagtgtttgtttagaaaatggaacatggacatcacctcctatttgcagagctgtctgtcgatttccatgtcagaatgggggcatctgccaacgcccaaatgcttgttcctgtccagagggctggatggggcgcctctgtgaagaaccaatctgcattcttccctgtctgaacggaggtcgctgtgtggccccttaccagtgtgactgcccgcctggctggacggggtctcgctgtcatacagctgtttgccagtctccctgcttaaatggtggaaaatgtgtaagaccaaaccgatgtcactgtctttcttcttggacgggacataactgttccaggaaaaggaggactgggttttaaccactgcacgaccatctggctctcccaaaagcaggatcatctctcctcggtagtgcctgggcatcctggaacttatgcaaagaaagtccaacatggtgctgggtcttgtttagtaaacttgttacttggggttactttttttattttgtgatatattttgttattccttgtgacatactttcttacatgtttccatttttaaatatgcctgtattttctatataaaaattatattaaatagatgctgctcacaaaatgtacatattctgctgtctattgggaaagttcctggtacacatttttattcagttacttaaaatgatttttccattaaagtatattttgctactaaataaa

SEQ ID NO: 438288 - DNA, 1082 bp, Homo sapiens
taccgagctgatacctcctagaagagtgtgattaaaatatgcggcgggcacggtggctcaatcctgtaatcccagcactttgtccacagctaagatggcagcagaatgctctgctgtctgaaaaggagttttatgttgatcagaatgtgtccatcaaatgtagggaaggttttctgctgcagggccacggcatcattacctgcaaccccgacgagacgtggacacagacaagcgccaaatgtgaaaaaatctcatgtggtccaccagctcacgtagaaaatgcaattgctcgaggcgtacattatcaatatggagacatgatcacctactcatgttacagtggatacatgttggagggtttcctgaggagtgtttgtttagaaaatggaacatggacatcacctcctatttgcagagctgtctgtcgatttccatgtcagaatgggggcatctgccaacgcccaaatgcttgttcctgtccagagggctggatggggcgcctctgtgaagaaccaatctgcattcttccctgtctgaacggaggtcgctgtgtggccccttaccagtgtgactgcccgcctggctggacggggtctcgctgtcatacagctgtttgccagtctccctgcttaaatggtggaaaatgtgtaagaccaaaccgatgtcactgtctttcttcttggacgggacataactgttccaggaaaaggaggactgggttttaaccactgcacgaccatctggctctcccaaaagcaggatcatctctcctcggtagtgcctgggcatcctggaacttatgcaaagaaagtccaacatggtgctgggtcttgtttagtaaacttgttacttggggttactttttttattttgtgatatattttgttattccttgtgacatactttcttacatgtttccatttttaaatatgcctgtattttctatataaaaattatattaaatagatgctgctcacaaaatgtacatattctgctgtctattgggaaagttcctggtacacatttttattcagttacttaaaatgatttttccattaaagtatattttgctactaaataaa

SEQ ID NO: 438289 - DNA, 785 bp, Homo sapiens
tgtgtcaaacttgctgtagatctgcttgaggatctgcccagtccggcgtctgccgtcttccagcctccccatcagcgtttggatgccttcctctaggtcctttaggaggtgatagtcatcgctgtccgaggtgtcatacaccaggttgttggcgaacatactcctgaggaaccgcacgggctccagccacgactcgatgagcagcagggagatgcggagcagctctagattggatttctgttgcgtttcctccatgttggagggtgtcggaatagagtctgagaagcagaaggaggtctgggagtcatacagctgtttgccagtctccctgcttaaatggtggaaaatgtgtaagaccaaaccgatgtcactgtctttcttcttggacgggacataactgttccaggaaaaggaggactgggttttaaccactgcacgaccatctggctctcccaaaagcaggatcatctctcctcggtagtgcctgggcatcctggaacttatgcaaagaaagtccaacatggtgctgggtcttgtttagtaaacttgttacttggggttactttttttattttgtgatatattttgttattccttgtgacatactttcttacatgtttccatttttaaatatgcctgtattttctatataaaaattatattaaatagatgctgctcacaaaatgtacatattctgctgtctattgggaaagttcctggtacacatttttattcagttacttaaaatgatttttccattaaagtatattttgctactaaataaa

SEQ ID NO: 438290 - DNA, 480 bp, Homo sapiens
tgcttgtgagctctgtgcttatctgggttgtaggtgaggagataagagagagctgtgtgatcctttattaggggcttttcatatgagaggcacaagaggtgcgcgccatggagcgcactgtggagaacatcgtactgccccggcatgaggccctgctcttcctcgtcttctgaggacaaggcgcacgttctccgcagtgcagagcagcttgccgaggaccccgcgtgaagaaagccagcgaggggggcttctgctccctgagactctgggttcacccacagcactttctgaggaagaggacaccagcccaagctggacctgccatttctccactccctacagacagccagtctccacttgcctcccctctggatgtatctggtcagggaagtgggggatgttcttttgataaaaaaaaaaaaattttatgtatttaaacttttattacaagatttcaattaaacaggcaccatagcactg

SEQ ID NO: 438291 - DNA, 207 bp, Homo sapiens
tttgtttgttttttaactgcatagttcattccttggaagaagctgtaccatcgatacctgatgaatgaagagcaagctgtcagcaaagtggacggcatcctgtctaactgtggcatagaaaaggagtcagacctgtgtgtgctgaacctcatacggtgagcaccaccaatacaggaagcaccaccaatacagctagcaccaccaagt

SEQ ID NO: 438292 - DNA, 3544 bp, Homo sapiens
aggtcgcggccagaggaggagctcgctgccgggggacgctgggctgagcggccggcggcgcgggcccggcggcggcggcagcggggtccgggtccggagcgccacatgagacggtttaagcggaagcatcttactgccattgactgccagcatttggctcggagtcacttggctgtgacccagcccttcggtcaaagatggacaaacagagatccgaaccatggtctctatcctaaaccgagaacaaaaagagggagtaggggtcagggaagtcaaagatgcatccctgagttcttcctagcaggcaagcagccgtgcaccaatgacatggccaaaagcaattctgttggccaggacagctgtcaggactctgagggtgacatgatctttcctgcagagagcagctgtgcactgcctcaggaaggcagtgcagggccgggctcaccagggtctgccccgccctccaggaagcggtcttggtcctctgaggaagagagtaaccaggctaccgggaccagccggtgggatggagtttctaagaaagctccacggcaccatttgtctgtgccatgcacaaggcctagggaggccaggcaagaagcagaggacagtacgtctcggctctctgcggagtctggtgaaaccgaccaagatgctggggacgtgggtcctgatcccattcctgactcatactatgggcttcttgggaccttgccctgccaggaagcactgagccacatttgcagcctgcctagtgaggtcctgaggcacgtgtttgccttcctcccggtggaagacctctattggaacctgagcttggtgtgccacttgtggagggagatcatcagtgacccgctgttcattccttggaagaagctgtaccatcgatacctgatgaatgaagagcaagctgtcagcaaagtggacggcatcctgtctaactgtggcatagaaaaggagtcagacctgtgtgtgctgaacctcatacgatacacagccaccactaagtgctctccgagtgtggatcccgagagggtgctgtggagtctgagggaccaccccctcctccccgaggctgaggcgtgtgtgcggcaacacctccccgacctctacgctgctgccgggggtgtcaacatctgggccctggtggcggctgtggtgctcctctccagcagtgtgaatgacatccagcgactgctcttctgcctccggagacccagctccacggtgaccatgccagatgtcaccgagaccctgtactgcatagccgtgcttctctacgccatgagggagaaggggattaacatcagcaataggattcactacaacattttctattgcctatatcttcaggagaattcctgcactcaggccacaaaagttaaagaggagccatctgtctggccaggcaagaaaaccatccaacttacacatgaacaacagctgattctgaatcacaagatggaacctctccaggtggtgaaaattatggcctttgccggcactgggaagacctcaacgctggtcaagtatgcagagaagtggtctcagagcaggtttctgtatgtgacattcaacaagagcatcgcaaagcaggccgaacgcgtcttccccagcaacgtcatctgcaaaaccttccactccatggcctacgggcacatagggcggaagtaccagtcaaagaagaagttgaatctcttcaagttaacacccttcatggtcaactccgtccttgctgaagggaagggtggattcataagagccaagcttgtgtgtaagactctagaaaacttctttgcctcggctgacgaagagctgaccattgatcacgtgcctatttggtgtaagaacagccaaggacagagagtcatggttgagcagagtgaaaaactgaatggtgtccttgaagcgagccgcctctgggataacatgcggaagctgggggagtgcacagaagaggcgcaccagatgactcatgacggctacttgaaactctggcagctgagcaagccttcgctggcctcttttgacgccatctttgtggatgaggcccaggactgcacaccagctatcatgaacatagttctgtctcagccatgtgggaaaatctttgtaggggacccgcaccagcagatctataccttccggggtgcggtcaacgccctgttcacagtgccccacacccacgtcttctatctcacgcagagttttcggtttggtgtggaaatagcttatgtgggagctactatcttggatgtttgcaagagagtcaggaaaaagactttggttggaggaaaccatcagagtggcattagaggtgacgcaaaggggcaagtggccttgttgtcccggaccaacgccaacgtgtttgatgaggccgtacgggtgacggaaggggaattcccttcaaggatacatttgattggggggattaaatcatttggattggacagaatcattgatatttggatccttcttcagccagaggaagaacggaggaaacaaaacctcgtcattaaagacaaatttatcagaagatgggtgcacaaagaaggctttagtggcttcaagaggtatgtgaccgctgccgaggacaaggagcttgaagccaagatcgcagttgttgaaaagtataacatcaggattccagagctggtgcaaaggatagaaaaatgccatatagaagatttggactttgcagagtacattctgggcactgtgcacaaagccaaaggcctggagtttgacactgtgcatgttttggatgattttgtgaaagtgccttgtgcccggcataacctgccccagcttccgcacttcagagttgagtcattttctgaggatgaatggaatttactgtatgttgcagtaactcgagccaagaagcgtctcatcatgaccaaatcattggaaaacattttgactttggctggggagtacttcttgcaagcagagctgacaagcaacgtcttaaaaacaggcgtggtgcgctgctgcgtgggacagtgcaacaatgccatccctgttgacaccgtccttaccatgaagaagctgcccatcacctatagcaacaggaaggaaaacaaggggggctacctctgccactcctgtgcggagcagcgcatcgggcccctggcgttcctgacagcctccccggagcaggtgcgcgccatggagcgcactgtggagaacatcgtactgccccggcatgaggccctgctcttcctcgtcttctgaggacaaggcgcacgttctccgcagtgcagagcagcttgccgaggaccccgcgtgaagaaagccagcgaggggggcttctgctccctgagactctgggttcacccacagcactttctgaggaagaggacaccagcccaagctggacctgccatttctccactccctacagacagccagtctccacttgcctcccctctggatgtatctggtcagggaagtgggggatgttcttttgataaaaaaaaaaaaattttatgtatttaaacttttattacaagatttcaattaaacaggcaccatagcactg

SEQ ID NO: 438293 - DNA, 2792 bp, Homo sapiens
aggtcgcggccagaggaggagctcgctgccgggggacgctgggctgagcggccggcggcgcgggcccggcggcggcggcagcggggtccgggtccggagcgccacattcattccttggaagaagctgtaccatcgatacctgatgaatgaagagcaagctgtcagcaaagtggacggcatcctgtctaactgtggcatagaaaaggagtcagacctgtgtgtgctgaacctcatacgatacacagccaccactaagtgctctccgagtgtggatcccgagagggtgctgtggagtctgagggaccaccccctcctccccgaggctgaggcgtgtgtgcggcaacacctccccgacctctacgctgctgccgggggtgtcaacatctgggccctggtggcggctgtggtgctcctctccagcagtgtgaatgacatccagcgactgctcttctgcctccggagacccagctccacggtgaccatgccagatgtcaccgagaccctgtactgcatagccgtgcttctctacgccatgagggagaaggggattaacatcagcaataggattcactacaacattttctattgcctatatcttcaggagaattcctgcactcaggccacaaaagttaaagaggagccatctgtctggccaggcaagaaaaccatccaacttacacatgaacaacagctgattctgaatcacaagatggaacctctccaggtggtgaaaattatggcctttgccggcactgggaagacctcaacgctggtcaagtatgcagagaagtggtctcagagcaggtttctgtatgtgacattcaacaagagcatcgcaaagcaggccgaacgcgtcttccccagcaacgtcatctgcaaaaccttccactccatggcctacgggcacatagggcggaagtaccagtcaaagaagaagttgaatctcttcaagttaacacccttcatggtcaactccgtccttgctgaagggaagggtggattcataagagccaagcttgtgtgtaagactctagaaaacttctttgcctcggctgacgaagagctgaccattgatcacgtgcctatttggtgtaagaacagccaaggacagagagtcatggttgagcagagtgaaaaactgaatggtgtccttgaagcgagccgcctctgggataacatgcggaagctgggggagtgcacagaagaggcgcaccagatgactcatgacggctacttgaaactctggcagctgagcaagccttcgctggcctcttttgacgccatctttgtggatgaggcccaggactgcacaccagctatcatgaacatagttctgtctcagccatgtgggaaaatctttgtaggggacccgcaccagcagatctataccttccggggtgcggtcaacgccctgttcacagtgccccacacccacgtcttctatctcacgcagagttttcggtttggtgtggaaatagcttatgtgggagctactatcttggatgtttgcaagagagtcaggaaaaagactttggttggaggaaaccatcagagtggcattagaggtgacgcaaaggggcaagtggccttgttgtcccggaccaacgccaacgtgtttgatgaggccgtacgggtgacggaaggggaattcccttcaaggatacatttgattggggggattaaatcatttggattggacagaatcattgatatttggatccttcttcagccagaggaagaacggaggaaacaaaacctcgtcattaaagacaaatttatcagaagatgggtgcacaaagaaggctttagtggcttcaagaggtatgtgaccgctgccgaggacaaggagcttgaagccaagatcgcagttgttgaaaagtataacatcaggattccagagctggtgcaaaggatagaaaaatgccatatagaagatttggactttgcagagtacattctgggcactgtgcacaaagccaaaggcctggagtttgacactgtgcatgttttggatgattttgtgaaagtgccttgtgcccggcataacctgccccagcttccgcacttcagagttgagtcattttctgaggatgaatggaatttactgtatgttgcagtaactcgagccaagaagcgtctcatcatgaccaaatcattggaaaacattttgactttggctggggagtacttcttgcaagcagagctgacaagcaacgtcttaaaaacaggcgtggtgcgctgctgcgtgggacagtgcaacaatgccatccctgttgacaccgtccttaccatgaagaagctgcccatcacctatagcaacaggaaggaaaacaaggggggctacctctgccactcctgtgcggagcagcgcatcgggcccctggcgttcctgacagcctccccggagcaggtgcgcgccatggagcgcactgtggagaacatcgtactgccccggcatgaggccctgctcttcctcgtcttctgaggacaaggcgcacgttctccgcagtgcagagcagcttgccgaggaccccgcgtgaagaaagccagcgaggggggcttctgctccctgagactctgggttcacccacagcactttctgaggaagaggacaccagcccaagctggacctgccatttctccactccctacagacagccagtctccacttgcctcccctctggatgtatctggtcagggaagtgggggatgttcttttgataaaaaaaaaaaaattttatgtatttaaacttttattacaagatttcaattaaacaggcaccatagcactg

SEQ ID NO: 438294 - DNA, 2564 bp, Homo sapiens
tgtttccctttgccttccactggtccttacagtttttcaggttgtttgtctcttcaagtcacagctggcgcccctcattccctgaagagcccgtcctggtctcttcctcctcttggagatatacatagaaactacacctttcccaggactgtgttatctgagaatgctttgccagccatagatatatttaaatccttttctttcttttttccattaaatggtggtaggtattttctttttagaaatgggaaggagtttaaatccatctgaggaaaaataagatgcagattgtgacttgaatttgagactttctaaatctacttttttttctggtaggattcactacaacattttctattgcctatatcttcaggagaattcctgcactcaggccacaaaagttaaagaggagccatctgtctggccaggcaagaaaaccatccaacttacacatgaacaacagctgattctgaatcacaagatggaacctctccaggtggtgaaaattatggcctttgccggcactgggaagacctcaacgctggtcaagtatgcagagaagtggtctcagagcaggtttctgtatgtgacattcaacaagagcatcgcaaagcaggccgaacgcgtcttccccagcaacgtcatctgcaaaaccttccactccatggcctacgggcacatagggcggaagtaccagtcaaagaagaagttgaatctcttcaagttaacacccttcatggtcaactccgtccttgctgaagggaagggtggattcataagagccaagcttgtgtgtaagactctagaaaacttctttgcctcggctgacgaagagctgaccattgatcacgtgcctatttggtgtaagaacagccaaggacagagagtcatggttgagcagagtgaaaaactgaatggtgtccttgaagcgagccgcctctgggataacatgcggaagctgggggagtgcacagaagaggcgcaccagatgactcatgacggctacttgaaactctggcagctgagcaagccttcgctggcctcttttgacgccatctttgtggatgaggcccaggactgcacaccagctatcatgaacatagttctgtctcagccatgtgggaaaatctttgtaggggacccgcaccagcagatctataccttccggggtgcggtcaacgccctgttcacagtgccccacacccacgtcttctatctcacgcagagttttcggtttggtgtggaaatagcttatgtgggagctactatcttggatgtttgcaagagagtcaggaaaaagactttggttggaggaaaccatcagagtggcattagaggtgacgcaaaggggcaagtggccttgttgtcccggaccaacgccaacgtgtttgatgaggccgtacgggtgacggaaggggaattcccttcaaggatacatttgattggggggattaaatcatttggattggacagaatcattgatatttggatccttcttcagccagaggaagaacggaggaaacaaaacctcgtcattaaagacaaatttatcagaagatgggtgcacaaagaaggctttagtggcttcaagaggtatgtgaccgctgccgaggacaaggagcttgaagccaagatcgcagttgttgaaaagtataacatcaggattccagagctggtgcaaaggatagaaaaatgccatatagaagatttggactttgcagagtacattctgggcactgtgcacaaagccaaaggcctggagtttgacactgtgcatgttttggatgattttgtgaaagtgccttgtgcccggcataacctgccccagcttccgcacttcagagttgagtcattttctgaggatgaatggaatttactgtatgttgcagtaactcgagccaagaagcgtctcatcatgaccaaatcattggaaaacattttgactttggctggggagtacttcttgcaagcagagctgacaagcaacgtcttaaaaacaggcgtggtgcgctgctgcgtgggacagtgcaacaatgccatccctgttgacaccgtccttaccatgaagaagctgcccatcacctatagcaacaggaaggaaaacaaggggggctacctctgccactcctgtgcggagcagcgcatcgggcccctggcgttcctgacagcctccccggagcaggtgcgcgccatggagcgcactgtggagaacatcgtactgccccggcatgaggccctgctcttcctcgtcttctgaggacaaggcgcacgttctccgcagtgcagagcagcttgccgaggaccccgcgtgaagaaagccagcgaggggggcttctgctccctgagactctgggttcacccacagcactttctgaggaagaggacaccagcccaagctggacctgccatttctccactccctacagacagccagtctccacttgcctcccctctggatgtatctggtcagggaagtgggggatgttcttttgataaaaaaaaaaaaattttatgtatttaaacttttattacaagatttcaattaaacaggcaccatagcactg

SEQ ID NO: 438295 - DNA, 2009 bp, Homo sapiens
gggaaagtctgtttctttttttcatcaagtcttttcaatcatgtgccattgtttttgtgaattaagcatcagtcataaatctagaagaacaatttggccttttctggttcacctaactgttatgatctctgtcctgtcacgggcatggcacggcccggctgcttcctgtctcagcactggagaccctctggcgtggagaggctgttgaggagacccaggaggttagggtggtgtctgcggtcccccttctgtgaggatgccctggctccactgctgtatgggagttgacagtgtgaccgcagggtgctgcctttgccagggtctcaaactctgggttaccatatgctttacttcctagaatggtgtccttgaagcgagccgcctctgggataacatgcggaagctgggggagtgcacagaagaggcgcaccagatgactcatgacggctacttgaaactctggcagctgagcaagccttcgctggcctcttttgacgccatctttgtggatgaggcccaggactgcacaccagctatcatgaacatagttctgtctcagccatgtgggaaaatctttgtaggggacccgcaccagcagatctataccttccggggtgcggtcaacgccctgttcacagtgccccacacccacgtcttctatctcacgcagagttttcggtttggtgtggaaatagcttatgtgggagctactatcttggatgtttgcaagagagtcaggaaaaagactttggttggaggaaaccatcagagtggcattagaggtgacgcaaaggggcaagtggccttgttgtcccggaccaacgccaacgtgtttgatgaggccgtacgggtgacggaaggggaattcccttcaaggatacatttgattggggggattaaatcatttggattggacagaatcattgatatttggatccttcttcagccagaggaagaacggaggaaacaaaacctcgtcattaaagacaaatttatcagaagatgggtgcacaaagaaggctttagtggcttcaagaggtatgtgaccgctgccgaggacaaggagcttgaagccaagatcgcagttgttgaaaagtataacatcaggattccagagctggtgcaaaggatagaaaaatgccatatagaagatttggactttgcagagtacattctgggcactgtgcacaaagccaaaggcctggagtttgacactgtgcatgttttggatgattttgtgaaagtgccttgtgcccggcataacctgccccagcttccgcacttcagagttgagtcattttctgaggatgaatggaatttactgtatgttgcagtaactcgagccaagaagcgtctcatcatgaccaaatcattggaaaacattttgactttggctggggagtacttcttgcaagcagagctgacaagcaacgtcttaaaaacaggcgtggtgcgctgctgcgtgggacagtgcaacaatgccatccctgttgacaccgtccttaccatgaagaagctgcccatcacctatagcaacaggaaggaaaacaaggggggctacctctgccactcctgtgcggagcagcgcatcgggcccctggcgttcctgacagcctccccggagcaggtgcgcgccatggagcgcactgtggagaacatcgtactgccccggcatgaggccctgctcttcctcgtcttctgaggacaaggcgcacgttctccgcagtgcagagcagcttgccgaggaccccgcgtgaagaaagccagcgaggggggcttctgctccctgagactctgggttcacccacagcactttctgaggaagaggacaccagcccaagctggacctgccatttctccactccctacagacagccagtctccacttgcctcccctctggatgtatctggtcagggaagtgggggatgttcttttgataaaaaaaaaaaaattttatgtatttaaacttttattacaagatttcaattaaacaggcaccatagcactg

SEQ ID NO: 438296 - DNA, 2610 bp, Homo sapiens
aggtcgcggccagaggaggagctcgctgccgggggacgctgggctgagcggccggcggcgcgggcccggcggcggcggcagcggggtccgggtccggagcgccacatgagacggtttaagcggaagcatcttactgccattgactgccagcatttggctcggagtcacttggctgtgacccagcccttcggtcaaagatggacaaacagagatccgaaccatggtctctatcctaaaccgagaacaaaaagagggagtaggggtcagggaagtcaaagatgcatccctgagttcttcctagcaggcaagcagccgtgcaccaatgacatggccaaaagcaattctgttggccaggacagctgtcaggactctgagggtgacatgatctttcctgcagagagcagctgtgcactgcctcaggaaggcagtgcagggccgggctcaccagggtctgccccgccctccaggaagcggtcttggtcctctgaggaagagagtaaccaggctaccgggaccagccggtgggatggagtttctaagaaagctccacggcaccatttgtctgtgccatgcacaaggcctagggaggccaggcaagaagcagaggacagtacgtctcggctctctgcggagtctggtgaaaccgaccaagatgctggggacgtgggtcctgatcccattcctgactcatactatgggcttcttgggaccttgccctgccaggaagcactgagccacatttgcagcctgcctagtgaggtcctgaggcacgtgtttgccttcctcccggtggaagacctctattggaacctgagcttggtgtgccacttgtggagggagatcatcagtgacccgctgttcattccttggaagaagctgtaccatcgatacctgatgaatgaagagcaagctgtcagcaaagtggacggcatcctgtctaactgtggcatagaaaaggagtcagacctgtgtgtgctgaacctcatacgatacacagccaccactaagtgctctccgagtgtggatcccgagagggtgctgtggagtctgagggaccaccccctcctccccgaggctgaggcgtgtgtgcggcaacacctccccgacctctacgctgctgccgggggtgtcaacatctgggccctggtggcggctgtggtgctcctctccagcagtgtgaatgacatccagcgactgctcttctgcctccggagacccagctccacggtgaccatgccagatgtcaccgagaccctgtactgcatagccgtgcttctctacgccatgagggagaaggggattaacatcagcaataggattcactacaacattttctattgcctatatcttcaggagaattcctgcactcaggccacaaaagttaaagaggagccatctgtctggccaggcaagaaaaccatccaacttacacatgaacaacagctgattctgaatcacaagatggaacctctccaggtggtgaaaattatggcctttgccggcactgggaagacctcaacgctggtcaagtatgcagagaagtggtctcagagcaggtttctgtatgtgacattcaacaagagcatcgcaaagcaggccgaacgcgtcttccccagcaacgtcatctgcaaaaccttccactccatggcctacgggcacatagggcggaagtaccagtcaaagaagaagttgaatctcttcaagttaacacccttcatggtcaactccgtccttgctgaagggaagggtggattcataagagccaagcttgtgtgtaagactctagaaaacttctttgcctcggctgacgaagagctgaccattgatcacgtgcctatttggtgtaagaacagccaaggacagagagtcatggttgagcagagtgaaaaactgagtcattttctgaggatgaatggaatttactgtatgttgcagtaactcgagccaagaagcgtctcatcatgaccaaatcattggaaaacattttgactttggctggggagtacttcttgcaagcagagctgacaagcaacgtcttaaaaacaggcgtggtgcgctgctgcgtgggacagtgcaacaatgccatccctgttgacaccgtccttaccatgaagaagctgcccatcacctatagcaacaggaaggaaaacaaggggggctacctctgccactcctgtgcggagcagcgcatcgggcccctggcgttcctgacagcctccccggagcaggtgcgcgccatggagcgcactgtggagaacatcgtactgccccggcatgaggccctgctcttcctcgtcttctgaggacaaggcgcacgttctccgcagtgcagagcagcttgccgaggaccccgcgtgaagaaagccagcgaggggggcttctgctccctgagactctgggttcacccacagcactttctgaggaagaggacaccagcccaagctggacctgccatttctccactccctacagacagccagtctccacttgcctcccctctggatgtatctggtcagggaagtgggggatgttcttttgataaaaaaaaaaaaattttatgtatttaaacttttattacaagatttcaattaaacaggcaccatagcactg

SEQ ID NO: 438297 - DNA, 1493 bp, Homo sapiens
gttagtacttgttggccataactggagtgtttgcctggtggttttctgttctttttcatagctggtaggcaggccgtctaagagaaaagaccaaataaatcaaaacgtaggttacagattgtagaataagtagatcaatagctggtcataatccagaaaatacgaaaccgtcctttcctgggcagcagatgtgtgcggtcctgctagcatatcagtctgtgatgtggagccccacagggcagcagcgaagctgacagtgccctgtccttgtggtgtttccagcctgggaggtcactagtgcttcctctgggtgctccctgcgtgccaggcgtgagtgctttgcatgcattgaagggtttcttctcctcagcagccacctgaagcaggcaccgtgccatctgcatttatggataaagacacaggcttagcgaggctgtcatttgctcactagcacagccagcagcacgggacggtggaaatacgcagggatgtttggggcaagttttcttcatgtcctctgtgttgcctgcctggcttataatgtgaatacacaatagttttctgaagattgagctggggataccttagcataaaataaaatccagaaatattctggaaatgtcattacaggcaatagttttgcatgtttatctgttaaatatatatatatttaaaaagcaattggactgtcagttggactgtcgatagctttggaggcagggaaaagttagaggaagtaagggagaacgggttaggcggggtttttctctctgggacttacagtgcatctaaagggttctcacagagccgccgctatcagtgtttccagtagaccctaacggaggtgtcgccatgactctctttctcgctctttctttctcaggagtacttcttgcaagcagagctgacaagcaacgtcttaaaaacaggcgtggtgcgctgctgcgtgggacagtgcaacaatgccatccctgttgacaccgtccttaccatgaagaagctgcccatcacctatagcaacaggaaggaaaacaaggggggctacctctgccactcctgtgcggagcagcgcatcgggcccctggcgttcctgacagcctccccggagcaggtgcgcgccatggagcgcactgtggagaacatcgtactgccccggcatgaggccctgctcttcctcgtcttctgaggacaaggcgcacgttctccgcagtgcagagcagcttgccgaggaccccgcgtgaagaaagccagcgaggggggcttctgctccctgagactctgggttcacccacagcactttctgaggaagaggacaccagcccaagctggacctgccatttctccactccctacagacagccagtctccacttgcctcccctctggatgtatctggtcagggaagtgggggatgttcttttgataaaaaaaaaaaaattttatgtatttaaacttttattacaagatttcaattaaacaggcaccatagcactg

SEQ ID NO: 438298 - DNA, 2804 bp, Homo sapiens
  misc_feature (2801)..(2801): n is a, c, g, or t
aggtcgcggccagaggaggagctcgctgccgggggacgctgggctgagcggccggcggcgcgggcccggcggcggcggcagcggggtccgggtccggagcgccacatgagacggtttaagcggaagcatcttactgccattgactgccagcatttggctcggagtcacttggctgtgacccagcccttcggtcaaagatggacaaacagagatccgaaccatggtctctatcctaaaccgagaacaaaaagagggagtaggggtcagggaagtcaaagatgcatccctgagttcttcctagcaggcaagcagccgtgcaccaatgacatggccaaaagcaattctgttggccaggacagctgtcaggactctgagggtgacatgatctttcctgcagagagcagctgtgcactgcctcaggaaggcagtgcagggccgggctcaccagggtctgccccgccctccaggaagcggtcttggtcctctgaggaagagagtaaccaggctaccgggaccagccggtgggatggagtttctaagaaagctccacggcaccatttgtctgtgccatgcacaaggcctagggaggccaggcaagaagcagaggacagtacgtctcggctctctgcggagtctggtgaaaccgaccaagatgctggggacgtgggtcctgatcccattcctgactcatactatgggcttcttgggaccttgccctgccaggaagcactgagccacatttgcagcctgcctagtgaggtcctgaggcacgtgtttgccttcctcccggtggaagacctctattggaacctgagcttggtgtgccacttgtggagggagatcatcagtgacccgctgttcattccttggaagaagctgtaccatcgatacctgatgaatgaagagcaagctgtcagcaaagtggacggcatcctgtctaactgtggcatagaaaaggagtcagacctgtgtgtgctgaacctcatacgatacacagccaccactaagtgctctccgagtgtggatcccgagagggtgctgtggagtctgagggaccaccccctcctccccgaggctgaggcgtgtgtgcggcaacacctccccgacctctacgctgctgccgggggtgtcaacatctgggccctggtggcggctgtggtgctcctctccagcagtgtgaatgacatccagcgactgctcttctgcctccggagacccagctccacggtgaccatgccagatgtcaccgagaccctgtactgcatagccgtgcttctctacgccatgagggagaaggggattaacatcagcaataggattcactacaacattttctattgcctatatcttcaggagaattcctgcactcaggccacaaaagttaaagaggagccatctgtctggccaggcaagaaaaccatccaacttacacatgaacaacagctgattctgaatcacaagatggaacctctccaggtggtgaaaattatggcctttgccggcactgggaagacctcaacgctggtcaagtatgcagagaagtggtctcagagcaggtttctgtatgtgacattcaacaagagcatcgcaaagcaggccgaacgcgtcttccccagcaacgtcatctgcaaaaccttccactccatggcctacgggcacatagggcggaagtaccagtcaaagaagaagttgaatctcttcaagttaacacccttcatggtcaactccgtccttgctgaagggaagggtggattcataagagccaagcttgtgtgtaagactctagaaaacttctttgcctcggctgacgaagagctgaccattgatcacgtgcctatttggtgtaagaacagccaaggacagagagtcatggttgagcagagtgaaaaactgaatggtgtccttgaagcgagccgcctctgggataacatgcggaagctgggggagtgcacagaagaggcgcaccagatgactcatgacggctacttgaaactctggcagctgagcaagccttcgctggcctcttttgacgccatctttgtggatgaggcccaggactgcacaccagctatcatgaacatagttctgtctcagccatgtgggaaaatctttgtaggggacccgcaccagcagatctataccttccggggtgcggtcaacgccctgttcacagtgccccacacccacgtcttctatctcacgcagagttttcggtttggtgtggaaatagcttatgtgggagctactatcttggatgtttgcaagagagtcaggaaaaagactttggttggaggaaaccatcagagtggcattagaggtgacgcaaaggggcaagtggccttgttgtcccggaccaacgccaacgtgtttgatgaggccgtacgggtgacggaaggggaattcccttcaaggatacatttgattggggggattaaatcatttggattggacagaatcattgatatttggatccttcttcagccagaggaagaacggaggaaacaaaacctcgtcattaaagacaaatttatcagaagatgggtgcacaaagaaggctttagtggcttcaagaggtatgtgaccgctgccgaggacaaggagcttgaagccaagatcgcagttgttgaaaagtataacatcaggattccagagctggtgcaaaggatagaaaaatgccccacacccacgtcttctatctcacgcagagttttcggtttggtgtggaaatagcttatgtgggagctactatcttggatgtttgcaagagagtcaggaaaaaagacttttgggttggaggaaancct

SEQ ID NO: 438299 - DNA, 2567 bp, Homo sapiens
aggtcgcggccagaggaggagctcgctgccgggggacgctgggctgagcggccggcggcgcgggcccggcggcggcggcagcggggtccgggtccggagcgccacatgagacggtttaagcggaagcatcttactgccattgactgccagcatttggctcggagtcacttggctgtgacccagcccttcggtcaaagatggacaaacagagatccgaaccatggtctctatcctaaaccgagaacaaaaagagggagtaggggtcagggaagtcaaagatgcatccctgagttcttcctagcaggcaagcagccgtgcaccaatgacatggccaaaagcaattctgttggccaggacagctgtcaggactctgagggtgacatgatctttcctgcagagagcagctgtgcactgcctcaggaaggcagtgcagggccgggctcaccagggtctgccccgccctccaggaagcggtcttggtcctctgaggaagagagtaaccaggctaccgggaccagccggtgggatggagtttctaagaaagctccacggcaccatttgtctgtgccatgcacaaggcctagggaggccaggcaagaagcagaggacagtacgtctcggctctctgcggagtctggtgaaaccgaccaagatgctggggacgtgggtcctgatcccattcctgactcatactatgggcttcttgggaccttgccctgccaggaagcactgagccacatttgcagcctgcctagtgaggtcctgaggcacgtgtttgccttcctcccggtggaagacctctattggaacctgagcttggtgtgccacttgtggagggagatcatcagtgacccgctgttcattccttggaagaagctgtaccatcgatacctgatgaatgaagagcaagctgtcagcaaagtggacggcatcctgtctaactgtggcatagaaaaggagtcagacctgtgtgtgctgaacctcatacgatacacagccaccactaagtgctctccgagtgtggatcccgagagggtgctgtggagtctgagggaccaccccctcctccccgaggctgaggcgtgtgtgcggcaacacctccccgacctctacgctgctgccgggggtgtcaacatctgggccctggtggcggctgtggtgctcctctccagcagtgtgaatgacatccagcgactgctcttctgcctccggagacccagctccacggtgaccatgccagatgtcaccgagaccctgtactgcatagccgtgcttctctacgccatgagggagaaggggattaacatcagcaataggattcactacaacattttctattgcctatatcttcaggagaattcctgcactcaggccacaaaagttaaagaggagccatctgtctggccaggcaagaaaaccatccaacttacacatgaacaacagctgattctgaatcacaagatggaacctctccaggtggtgaaaattatggcctttgccggcactgggaagacctcaacgctggtcaagtatgcagagaagtggtctcagagcaggtttctgtatgtgacattcaacaagagcatcgcaaagcaggccgaacgcgtcttccccagcaacgtcatctgcaaaaccttccactccatggcctacgggcacatagggcggaagtaccagtcaaagaagaagttgaatctcttcaagttaacacccttcatggtcaactccgtccttgctgaagggaagggtggattcataagagccaagcttgtgtgtaagactctagaaaacttctttgcctcggctgacgaagagctgaccattgatcacgtgcctatttggtgtaagaacagccaaggacagagagtcatggttgagcagagtgaaaaactgaatggtgtccttgaagcgagccgcctctgggataacatgcggaagctgggggagtgcacagaagaggcgcaccagatgactcatgacggctacttgaaactctggcagctgagcaagccttcgctggcctcttttgacgccatctttgtggatgaggcccaggactgcacaccagctatcatgaacatagttctgtctcagccatgtgggaaaatctttgtaggggacccgcaccagcagatctataccttccggggtgcggtcaacgccctgttcacagtgccccacacccacgtcttctatctcacgcagagttttcggtttggtgtggaaatagcttatgtgggagctactatcttggatgtttgcaagagagtcaggaaaaagactttggttggaggaaaccatcagagtggcattagaggtgacgcaaaggggcaagtggccttgttgtcccggaccaacgccaacgtgtttgatgaggccgtacgggtgacggaaggggaattcccttcaaggatacatttgattggggtggtgtggggttttgttttttcctaaatggaagtgatgacctgtgagaacgttgcagcacagaggaaacacagccagtgtgagggagcaggccgccgagtgatgcattgtgctggagtgggcgggggatggagcaccat

SEQ ID NO: 438300 - DNA, 1446 bp, Homo sapiens
gttagtacttgttggccataactggagtgtttgcctggtggttttctgttctttttcatagctggtaggcaggccgtctaagagaaaagaccaaataaatcaaaacgtaggttacagattgtagaataagtagatcaatagctggtcataatccagaaaatacgaaaccgtcctttcctgggcagcagatgtgtgcggtcctgctagcatatcagtctgtgatgtggagccccacagggcagcagcgaagctgacagtgccctgtccttgtggtgtttccagcctgggaggtcactagtgcttcctctgggtgctccctgcgtgccaggcgtgagtgctttgcatgcattgaagggtttcttctcctcagcagccacctgaagcaggcaccgtgccatctgcatttatggataaagacacaggcttagcgaggctgtcatttgctcactagcacagccagcagcacgggacggtggaaatacgcagggatgtttggggcaagttttcttcatgtcctctgtgttgcctgcctggcttataatgtgaatacacaatagttttctgaagattgagctggggataccttagcataaaataaaatccagaaatattctggaaatgtcattacaggcaatagttttgcatgtttatctgttaaatatatatatatttaaaaagcaattggactgtcagttggactgtcgatagctttggaggcagggaaaagttagaggaagtaagggagaacgggttaggcggggtttttctctctgggacttacagtgcatctaaagggttctcacagagccgccgctatcagtgtttccagtagaccctaacggaggtgtcgccatgactctctttctcgctctttctttctcaggagtacttcttgcaagcagagctgacaagcaacgtcttaaaaacaggacaccgtccttaccatgaagaagctgcccatcacctatagcaacaggaaggaaaacaaggggggctacctctgccactcctgtgcggagcagcgcatcgggcccctggcgttcctgacagcctccccggagcaggtgcgcgccatggagcgcactgtggagaacatcgtactgccccggcatgaggccctgctcttcctcgtcttctgaggacaaggcgcacgttctccgcagtgcagagcagcttgccgaggaccccgcgtgaagaaagccagcgaggggggcttctgctccctgagactctgggttcacccacagcactttctgaggaagaggacaccagcccaagctggacctgccatttctccactccctacagacagccagtctccacttgcctcccctctggatgtatctggtcagggaagtgggggatgttcttttgataaaaaaaaaaaaattttatgtatttaaacttttattacaagatttcaattaaacaggcaccatagcactg

SEQ ID NO: 438301 - DNA, 2223 bp, Homo sapiens
aggtcgcggccagaggaggagctcgctgccgggggacgctgggctgagcggccggcggcgcgggcccggcggcggcggcagcggggtccgggtccggagcgccacatgagacggtttaagcggaagcatcttactgccattgactgccagcatttggctcggagtcacttggctgtgacccagcccttcggtcaaagatggacaaacagagatccgaaccatggtctctatcctaaaccgagaacaaaaagagggagtaggggtcagggaagtcaaagatgcatccctgagttcttcctagcaggcaagcagccgtgcaccaatgacatggccaaaagcaattctgttggccaggacagctgtcaggactctgagggtgacatgatctttcctgcagagagcagctgtgcactgcctcaggaaggcagtgcagggccgggctcaccagggtctgccccgccctccaggaagcggtcttggtcctctgaggaagagagtaaccaggctaccgggaccagccggtgggatggagtttctaagaaagctccacggcaccatttgtctgtgccatgcacaaggcctagggaggccaggcaagaagcagaggacagtacgtctcggctctctgcggagtctggtgaaaccgaccaagatgctggggacgtgggtcctgatcccattcctgactcatactatgggcttcttgggaccttgccctgccaggaagcactgagccacatttgcagcctgcctagtgaggtcctgaggcacgtgtttgccttcctcccggtggaagacctctattggaacctgagcttggtgtgccacttgtggagggagatcatcagtgacccgctgttcattccttggaagaagctgtaccatcgatacctgatgaatgaagagcaagctgtcagcaaagtggacggcatcctgtctaactgtggcatagaaaaggagtcagacctgtgtgtgctgaacctcatacgatacacagccaccactaagtgctctccgagtgtggatcccgagagggtgctgtggagtctgagggaccaccccctcctccccgaggctgaggcgtgtgtgcggcaacacctccccgacctctacgctgctgccgggggtgtcaacatctgggccctggtggcggctgtggtgctcctctccagcagtgtgaatgacatccagcgactgctcttctgcctccggagacccagctccacggtgaccatgccagatgtcaccgagaccctgtactgcatagccgtgcttctctacgccatgagggagaaggggattaacatcagcaataggattcactacaacattttctattgcctatatcttcaggagaattcctgcactcaggccacaaaagttaaagaggagccatctgtctggccaggcaagaaaaccatccaacttacacatgaacaacagctgattctgaatcacaagatggaacctctccaggtggtgaaaattatggcctttgccggcactgggaagacctcaacgctggtcaagtatgcagagaagtggtctcagagcaggtttctgtatgtgacattcaacaagagcatcgcaaagcaggccgaacgcgtcttccccagcaacgtcatctgcaaaaccttccactccatggcctacgggcacatagggcggaagtgagtactgctgtcactagtggcactgttgctgctggcacggtcgcgtcttactgttttcccgtgacgatcacatgtgagcttacaccacagtgaccccgaggagtgtagtgctgttatctccacttacaggcaggaaacaaatacataggtttagccatttgtacttttatcctgtagcaacatattgtttacatataatgccgtcttgccaagaggggtgttctcatggaagtgaggcacagaaagtcaaaatgacttgcttaaagttcagagtctcacaaatcctgatcagttgtaggcttttcttggaagggagtgaggaagactcagccgaggcacacttgacccaggtctcctggatgtagaggcatcagggaactccaagggtccctccggggaccttctggagcccagcttcatggtggaatagcagtgtctgccgaaagctggttcctattctgggttggtacatgtgagtcctgaaagccatttccagtcagacatggaccatgcagaactttttcgctttaaaacattaacactcgcctgt

SEQ ID NO: 438302 - DNA, 1041 bp, Homo sapiens
aggtcgcggccagaggaggagctcgctgccgggggacgctgggctgagcggccggcggcgcgggcccggcggcggcggcagcggggtccgggtccggagcgccacatgagacggtttaagcggaagcatcttactgccattgactgccagcatttggctcggagtcacttggctgtgacccagcccttcggtcaaagatggacaaacagagatccgaaccatggtctctatcctaaaccgagaacaaaaagagggagtaggggtcagggaagtcaaagatgcatccctgagttcttcctagcaggcaagcagccgtgcaccaatgacatggccaaaagcaattctgttggccaggacagctgtcaggactctgagggtgacatgatctttcctgcagagagcagctgtgcactgcctcaggaaggcagtgcagggccgggctcaccagggtctgccccgccctccaggaagcggtcttggtcctctgaggaagagagtaaccaggctaccgggaccagccggtgggatggagtttctaagaaagctccacggcaccatttgtctgtgccatgcacaaggcctagggaggccaggcaagaagcagaggacagtacgtctcggctctctgcggagtctggtgaaaccgaccaagatgctggggacgtgggtcctgatcccattcctgactcatactatgggcttcttgggaccttgccctgccaggaagcactgagccacatttgcagcctgcctagtgaggtcctgaggcacgtgtttgccttcctcccggtggaagacctctattggaacctgagcttggtgtgccacttgtggagggagatcatcagtgacccgctgttcattccttggaagaagctgtaccatcgatacctgatgaatgaagagcaagctgtcagcaaagtggacggcatcctgtctaactgtggcatagaaaaggagtcagacctgtgtgtgctgaacctcatacggtgagcaccaccaatacaggaagcaccaccaatacagctagcaccaccaagt

SEQ ID NO: 438303 - DNA, 381 bp, Homo sapiens
gtcctgctctcaagacagaggtgtgataagcctggacaaggcctgattggggatccctgggcatgtcttgtctggtcagagggtcacctcctttcctcctggcttccccaggcactgggaagacctcaacgctggtcaagtatgcagagaagtggtctcagagcaggtttctgtatgtgacattcaacaagagcatcgcaaagcaggccgaacgcgtcttccccagcaacgtcatctgcaaaaccttccactccatggcctacgggcacatagggcggaagtgagtactgctgtcactagtggcactgttgctgctggcacggtcgcgtcttactgttttcccgtgacgatcacatgtgagcttacaccacagtgaccccg

SEQ ID NO: 438304 - DNA, 969 bp, Homo sapiens
gagcggtacatttgattgggaaaacctcgtcattaaagacaaatttatcagaagatgggtgcacaaagaaggctttagtggcttcaagaggtatgtgaccgctgccgaggacaaggagcttgaagccaagatcgcagttgttgaaaagtataacatcaggattccagagctggtgcaaaggatagaaaaatgccatatagaagatttggactttgcaggtaagggaagcagttggtttttacctcccccctaagaggaggaacagatggtcttctgctgttcttttttttttttggagacagagtatggctctgttgcccaggctggagtgcagtggcgtgatctgggctcactgcaatgcccaccttctgggttcaagcaattatcctgcctcagcctcgtgagtagctgggactacaggccccaccaccagcccggctagttggtggtattttttggtagagatggagtctcaccatgtgggccaggctggtctcgaactcccaacctcaggtaatctgcccacctcgacctcccaaagtgctagaattacaggcgtgagccactgcgcccagcctcttctgctgtttcttccctgtgtggaatatctttgagcaaggatggctttatggcttaagggacaggggagcagagtcctggttcttcctcaggggctctttattctgttctactttcaagcccgtacaatgggattttctagtcccagctctgccacgtgtaatgtcaggcaagccgtgcagccctcttctgggctctgtcccttcatgtgttagatccagacggtgggtggagccactctgtcctctgggatgtgattccgagaggcgttaactctcctgcaactaattttcgacttttcccctcgtctttttcttttttctgttcccgacagttgtctgttcccgacagttgtttcctctttcccccttttcctacaaaactgcactg

SEQ ID NO: 438305 - DNA, 3388 bp, Homo sapiens
aggtcgcggccagaggaggagctcgctgccgggggacgctgggctgagcggccggcggcgcgggcccggcggcggcggcagcggggtccgggtccggagcgccacagtcagggaagtcaaagatgcatccctgagttcttcctagcaggcaagcagccgtgcaccaatgacatggccaaaagcaattctgttggccaggacagctgtcaggactctgagggtgacatgatctttcctgcagagagcagctgtgcactgcctcaggaaggcagtgcagggccgggctcaccagggtctgccccgccctccaggaagcggtcttggtcctctgaggaagagagtaaccaggctaccgggaccagccggtgggatggagtttctaagaaagctccacggcaccatttgtctgtgccatgcacaaggcctagggaggccaggcaagaagcagaggacagtacgtctcggctctctgcggagtctggtgaaaccgaccaagatgctggggacgtgggtcctgatcccattcctgactcatactatgggcttcttgggaccttgccctgccaggaagcactgagccacatttgcagcctgcctagtgaggtcctgaggcacgtgtttgccttcctcccggtggaagacctctattggaacctgagcttggtgtgccacttgtggagggagatcatcagtgacccgctgttcattccttggaagaagctgtaccatcgatacctgatgaatgaagagcaagctgtcagcaaagtggacggcatcctgtctaactgtggcatagaaaaggagtcagacctgtgtgtgctgaacctcatacgatacacagccaccactaagtgctctccgagtgtggatcccgagagggtgctgtggagtctgagggaccaccccctcctccccgaggctgaggcgtgtgtgcggcaacacctccccgacctctacgctgctgccgggggtgtcaacatctgggccctggtggcggctgtggtgctcctctccagcagtgtgaatgacatccagcgactgctcttctgcctccggagacccagctccacggtgaccatgccagatgtcaccgagaccctgtactgcatagccgtgcttctctacgccatgagggagaaggggattaacatcagcaataggattcactacaacattttctattgcctatatcttcaggagaattcctgcactcaggccacaaaagttaaagaggagccatctgtctggccaggcaagaaaaccatccaacttacacatgaacaacagctgattctgaatcacaagatggaacctctccaggtggtgaaaattatggcctttgccggcactgggaagacctcaacgctggtcaagtatgcagagaagtggtctcagagcaggtttctgtatgtgacattcaacaagagcatcgcaaagcaggccgaacgcgtcttccccagcaacgtcatctgcaaaaccttccactccatggcctacgggcacatagggcggaagtaccagtcaaagaagaagttgaatctcttcaagttaacacccttcatggtcaactccgtccttgctgaagggaagggtggattcataagagccaagcttgtgtgtaagactctagaaaacttctttgcctcggctgacgaagagctgaccattgatcacgtgcctatttggtgtaagaacagccaaggacagagagtcatggttgagcagagtgaaaaactgaatggtgtccttgaagcgagccgcctctgggataacatgcggaagctgggggagtgcacagaagaggcgcaccagatgactcatgacggctacttgaaactctggcagctgagcaagccttcgctggcctcttttgacgccatctttgtggatgaggcccaggactgcacaccagctatcatgaacatagttctgtctcagccatgtgggaaaatctttgtaggggacccgcaccagcagatctataccttccggggtgcggtcaacgccctgttcacagtgccccacacccacgtcttctatctcacgcagagttttcggtttggtgtggaaatagcttatgtgggagctactatcttggatgtttgcaagagagtcaggaaaaagactttggttggaggaaaccatcagagtggcattagaggtgacgcaaaggggcaagtggccttgttgtcccggaccaacgccaacgtgtttgatgaggccgtacgggtgacggaaggggaattcccttcaaggatacatttgattggggggattaaatcatttggattggacagaatcattgatatttggatccttcttcagccagaggaagaacggaggaaacaaaacctcgtcattaaagacaaatttatcagaagatgggtgcacaaagaaggctttagtggcttcaagaggtatgtgaccgctgccgaggacaaggagcttgaagccaagatcgcagttgttgaaaagtataacatcaggattccagagctggtgcaaaggatagaaaaatgccatatagaagatttggactttgcagagtacattctgggcactgtgcacaaagccaaaggcctggagtttgacactgtgcatgttttggatgattttgtgaaagtgccttgtgcccggcataacctgccccagcttccgcacttcagagttgagtcattttctgaggatgaatggaatttactgtatgttgcagtaactcgagccaagaagcgtctcatcatgaccaaatcattggaaaacattttgactttggctggggagtacttcttgcaagcagagctgacaagcaacgtcttaaaaacaggcgtggtgcgctgctgcgtgggacagtgcaacaatgccatccctgttgacaccgtccttaccatgaagaagctgcccatcacctatagcaacaggaaggaaaacaaggggggctacctctgccactcctgtgcggagcagcgcatcgggcccctggcgttcctgacagcctccccggagcaggtgcgcgccatggagcgcactgtggagaacatcgtactgccccggcatgaggccctgctcttcctcgtcttctgaggacaaggcgcacgttctccgcagtgcagagcagcttgccgaggaccccgcgtgaagaaagccagcgaggggggcttctgctccctgagactctgggttcacccacagcactttctgaggaagaggacaccagcccaagctggacctgccatttctccactccctacagacagccagtctccacttgcctcccctctggatgtatctggtcagggaagtgggggatgttcttttgataaaaaaaaaaaaattttatgtatttaaacttttattacaagatttcaattaaacaggcaccatagcactg

SEQ ID NO: 438306 - DNA, 2638 bp, Homo sapiens
aactaagatctcaaatccaaaagtgatgagaaggagtccagggcgaacagaagggctcccctgtttcccaaatacaacttggaaagtttggattcagtccagacagtctgtagccagcagctggacccgtggctcggctttcctgactccttcctgctgtgattcgtattaaccatggcctgtgggctgtccctccctccctgtgcacctggcttgcagggtgtcaacatctgggccctggtggcggctgtggtgctcctctccagcagtgtgaatgacatccagcgactgctcttctgcctccggagacccagctccacggtgaccatgccagatgtcaccgagaccctgtactgcatagccgtgcttctctacgccatgagggagaaggggattaacatcagcaataggattcactacaacattttctattgcctatatcttcaggagaattcctgcactcaggccacaaaagttaaagaggagccatctgtctggccaggcaagaaaaccatccaacttacacatgaacaacagctgattctgaatcacaagatggaacctctccaggtggtgaaaattatggcctttgccggcactgggaagacctcaacgctggtcaagtatgcagagaagtggtctcagagcaggtttctgtatgtgacattcaacaagagcatcgcaaagcaggccgaacgcgtcttccccagcaacgtcatctgcaaaaccttccactccatggcctacgggcacatagggcggaagtaccagtcaaagaagaagttgaatctcttcaagttaacacccttcatggtcaactccgtccttgctgaagggaagggtggattcataagagccaagcttgtgtgtaagactctagaaaacttctttgcctcggctgacgaagagctgaccattgatcacgtgcctatttggtgtaagaacagccaaggacagagagtcatggttgagcagagtgaaaaactgaatggtgtccttgaagcgagccgcctctgggataacatgcggaagctgggggagtgcacagaagaggcgcaccagatgactcatgacggctacttgaaactctggcagctgagcaagccttcgctggcctcttttgacgccatctttgtggatgaggcccaggactgcacaccagctatcatgaacatagttctgtctcagccatgtgggaaaatctttgtaggggacccgcaccagcagatctataccttccggggtgcggtcaacgccctgttcacagtgccccacacccacgtcttctatctcacgcagagttttcggtttggtgtggaaatagcttatgtgggagctactatcttggatgtttgcaagagagtcaggaaaaagactttggttggaggaaaccatcagagtggcattagaggtgacgcaaaggggcaagtggccttgttgtcccggaccaacgccaacgtgtttgatgaggccgtacgggtgacggaaggggaattcccttcaaggatacatttgattggggggattaaatcatttggattggacagaatcattgatatttggatccttcttcagccagaggaagaacggaggaaacaaaacctcgtcattaaagacaaatttatcagaagatgggtgcacaaagaaggctttagtggcttcaagaggtatgtgaccgctgccgaggacaaggagcttgaagccaagatcgcagttgttgaaaagtataacatcaggattccagagctggtgcaaaggatagaaaaatgccatatagaagatttggactttgcagagtacattctgggcactgtgcacaaagccaaaggcctggagtttgacactgtgcatgttttggatgattttgtgaaagtgccttgtgcccggcataacctgccccagcttccgcacttcagagttgagtcattttctgaggatgaatggaatttactgtatgttgcagtaactcgagccaagaagcgtctcatcatgaccaaatcattggaaaacattttgactttggctggggagtacttcttgcaagcagagctgacaagcaacgtcttaaaaacaggcgtggtgcgctgctgcgtgggacagtgcaacaatgccatccctgttgacaccgtccttaccatgaagaagctgcccatcacctatagcaacaggaaggaaaacaaggggggctacctctgccactcctgtgcggagcagcgcatcgggcccctggcgttcctgacagcctccccggagcaggtgcgcgccatggagcgcactgtggagaacatcgtactgccccggcatgaggccctgctcttcctcgtcttctgaggacaaggcgcacgttctccgcagtgcagagcagcttgccgaggaccccgcgtgaagaaagccagcgaggggggcttctgctccctgagactctgggttcacccacagcactttctgaggaagaggacaccagcccaagctggacctgccatttctccactccctacagacagccagtctccacttgcctcccctctggatgtatctggtcagggaagtgggggatgttcttttgataaaaaaaaaaaaattttatgtatttaaacttttattacaagatttcaattaaacaggcaccatagcactg

SEQ ID NO: 438307 - DNA, 3839 bp, Homo sapiens
aggtcgcggccagaggaggagctcgctgccgggggacgctgggctgagcggccggcggcgcgggcccggcggcggcggcagcggggtccgggtccggagcgccacatgagacggtttaagcggaagcatcttactgccattgactgccagcatttggctcggagtcacttggctgtgacccagcccttcggtcaaagatggacaaacagagatccgaaccatggtctctatcctaaaccgagaacaaaaagagggagtaggggtcagggaagtcaaagatgcatccctgagttcttcctagcaggcaagcagccgtgcaccaatgacatggccaaaagcaattctgttggccaggacagctgtcaggactctgagggtgacatgatctttcctgcagagagcagctgtgcactgcctcaggaaggcagtgcagggccgggctcaccagggtctgccccgccctccaggaagcggtcttggtcctctgaggaagagagtaaccaggctaccgggaccagccggtgggatggagtttctaagaaagctccacggcaccatttgtctgtgccatgcacaaggcctagggaggccaggcaagaagcagaggacagtacgtctcggctctctgcggagtctggtgaaaccgaccaagatgctggggacgtgggtcctgatcccattcctgactcatactatgggcttcttgggaccttgccctgccaggaagcactgagccacatttgcagcctgcctagtgaggtcctgaggcacgtgtttgccttcctcccggtggaagacctctattggaacctgagcttggtgtgccacttgtggagggagatcatcagtgacccgctgttcattccttggaagaagctgtaccatcgatacctgatgaatgaagagcaagctgtcagcaaagtggacggcatcctgtctaactgtggcatagaaaaggagtcagacctgtgtgtgctgaacctcatacgatacacagccaccactaagtgctctccgagtgtggatcccgagagggtgctgtggagtctgagggaccaccccctcctccccgaggctgaggcgtgtgtgcggcaacacctccccgacctctacgctgctgccgggggtgtcaacatctgggccctggtggcggctgtggtgctcctctccagcagtgtgaatgacatccagcgactgctcttctgcctccggagacccagctccacggtgaccatgccagatgtcaccgagaccctgtactgcatagccgtgcttctctacgccatgagggagaaggggattaacatcagcaataggattcactacaacattttctattgcctatatcttcaggagaattcctgcactcaggccacaaaagttaaagaggagccatctgtctggccaggcaagaaaaccatccaacttacacatgaacaacagctgattctgaatcacaagatggaacctctccaggtggtgaaaattatggcctttgccggcactgggaagacctcaacgctggtcaagtatgcagagaagtggtctcagagcaggtttctgtatgtgacattcaacaagagcatcgcaaagcaggccgaacgcgtcttccccagcaacgtcatctgcaaaaccttccactccatggcctacgggcacatagggcggaagtaccagtcaaagaagaagttgaatctcttcaagttaacacccttcatggtcaactccgtccttgctgaagggaagggtggattcataagagccaagcttgtgtgtaagactctagaaaacttctttgcctcggctgacgaagagctgaccattgatcacgtgcctatttggtgtaagaacagccaaggacagagagtcatggttgagcagagtgaaaaactgaatggtgtccttgaagcgagccgcctctgggataacatgcggaagctgggggagtgcacagaagaggcgcaccagatgactcatgacggctacttgaaactctggcagctgagcaagccttcgctggcctcttttgacgccatctttgtggatgaggcccaggactgcacaccagctatcatgaacatagttctgtctcagccatgtgggaaaatctttgtaggggacccgcaccagcagatctataccttccggggtgcggtcaacgccctgttcacagtgccccacacccacgtcttctatctcacgcagagttttcggtttggtgtggaaatagcttatgtgggagctactatcttggatgtttgcaagagagtcaggaaaaagactttggttggaggaaaccatcagagtggcattagaggtgacgcaaaggggcaagtggccttgttgtcccggaccaacgccaacgtgtttgatgaggccgtacgggtgacggaaggggaattcccttcaaggatacatttgattggggggattaaatcatttggattggacagaatcattgatatttggatccttcttcagccagaggaagaacggaggaaacaaaacctcgtcattaaagacaaatttatcagaagatgggtgcacaaagaaggctttagtggcttcaagaggtatgtgaccgctgccgaggacaaggagcttgaagccaagatcgcagttgttgaaaagtataacatcaggattccagagctggtgcaaaggatagaaaaatgccatatagaagatttggactttgcaggtaagggaagcagttggtttttacctcccccctaagaggaggaacagatggtcttctgctgttcttttttttttttggagacagagtatggctctgttgcccaggctggagtgcagtggcgtgatctgggctcactgcaatgcccaccttctgggttcaagcaattatcctgcctcagcctcgtgagtagctgggactacaggccccaccaccagcccggctagttggtggtattttttggtagagatggagtctcaccatgtgggccaggctggtctcgaactcccaacctcagagtacattctgggcactgtgcacaaagccaaaggcctggagtttgacactgtgcatgttttggatgattttgtgaaagtgccttgtgcccggcataacctgccccagcttccgcacttcagagttgagtcattttctgaggatgaatggaatttactgtatgttgcagtaactcgagccaagaagcgtctcatcatgaccaaatcattggaaaacattttgactttggctggggagtacttcttgcaagcagagctgacaagcaacgtcttaaaaacaggcgtggtgcgctgctgcgtgggacagtgcaacaatgccatccctgttgacaccgtccttaccatgaagaagctgcccatcacctatagcaacaggaaggaaaacaaggggggctacctctgccactcctgtgcggagcagcgcatcgggcccctggcgttcctgacagcctccccggagcaggtgcgcgccatggagcgcactgtggagaacatcgtactgccccggcatgaggccctgctcttcctcgtcttctgaggacaaggcgcacgttctccgcagtgcagagcagcttgccgaggaccccgcgtgaagaaagccagcgaggggggcttctgctccctgagactctgggttcacccacagcactttctgaggaagaggacaccagcccaagctggacctgccatttctccactccctacagacagccagtctccacttgcctcccctctggatgtatctggtcagggaagtgggggatgttcttttgataaaaaaaaaaaaattttatgtatttaaacttttattacaagatttcaattaaacaggcaccatagcactg

SEQ ID NO: 438308 - DNA, 946 bp, Homo sapiens
gaaatgttcgagttcagagtcaagtgggaaacatgtatgtttttgtcatcttgtttctttccctttgaagcaccatctaacgtgtgctgtgtttttatcctagagtacattctgggcactgtgcacaaagccaaaggcctggagtttgacactgtgcatgttttggatgattttgtgaaagtgccttgtgcccggcataacctgccccagcttccgcacttcagagttgagtcattttctgaggatgaatggaatttactgtatgttgcagtaactcgagccaagaagcgtctcatcatgaccaaatcattggaaaacattttgactttggctggggagtacttcttgcaagcagagctgacaagcaacgtcttaaaaacaggcgtggtgcgctgctgcgtgggacagtgcaacaatgccatccctgttgacaccgtccttaccatgaagaagctgcccatcacctatagcaacaggaaggaaaacaaggggggctacctctgccactcctgtgcggagcagcgcatcgggcccctggcgttcctgacagcctccccggagcaggtgcgcgccatggagcgcactgtggagaacatcgtactgccccggcatgaggccctgctcttcctcgtcttctgaggacaaggcgcacgttctccgcagtgcagagcagcttgccgaggaccccgcgtgaagaaagccagcgaggggggcttctgctccctgagactctgggttcacccacagcactttctgaggaagaggacaccagcccaagctggacctgccatttctccactccctacagacagccagtctccacttgcctcccctctggatgtatctggtcagggaagtgggggatgttcttttgataaaaaaaaaaaaattttatgtatttaaacttttattacaagatttcaattaaacaggcaccatagcactg

SEQ ID NO: 438309 - DNA, 3452 bp, Homo sapiens
aggtcgcggccagaggaggagctcgctgccgggggacgctgggctgagcggccggcggcgcgggcccggcggcggcggcagcggggtccgggtccggagcgccacatgagacggtttaagcggaagcatcttactgccattgactgccagcatttggctcggagtcacttggctgtgacccagcccttcggtcaaagatggacaaacagagatccgaaccatggtctctatcctaaaccgagaacaaaaagagggagtaggggtcagggaagtcaaagatgcatccctgagttcttcctagcaggcaagcagccgtgcaccaatgacatggccaaaagcaattctgttggccaggacagctgtcaggactctgagggtgacatgatctttcctgcagagagcagctgtgcactgcctcaggaaggcagtgcagggccgggctcaccagggtctgccccgccctccaggaagcggtcttggtcctctgaggaagagagtaaccaggctaccgggaccagccggtgggatggagtttctaagaaagctccacggcaccatttgtctgtgccatgcacaaggcctagggaggccaggcaagaagcagaggacagtacgtctcggctctctgcggagtctggtgaaaccgaccaagatgctggggacgtgggtcctgatcccattcctgactcatactatgggcttcttgggaccttgccctgccaggaagcactgagccacatttgcagcctgcctagtgaggtcctgaggcacgtgtttgccttcctcccggtggaagacctctattggaacctgagcttggtgtgccacttgtggagggagatcatcagtgacccgctgttcattccttggaagaagctgtaccatcgatacctgatgaatgaagagcaagctgtcagcaaagtggacggcatcctgtctaactgtggcatagaaaaggagtcagacctgtgtgtgctgaacctcatacgatacacagccaccactaagtgctctccgagtgtggatcccgagagggtgctgtggagtctgagggaccaccccctcctccccgaggctgaggcgtgtgtgcggcaacacctccccgacctctacgctgctgccgggggtgtcaacatctgggccctggtggcggctgtggtgctcctctccagcagtgtgaatgacatccagcgactgctcttctgcctccggagacccagctccacggtgaccatgccagatgtcaccgagaccctgtactgcatagccgtgcttctctacgccatgagggagaaggggattaacatcagcaataggattcactacaacattttctattgcctatatcttcaggagaattcctgcactcaggccacaaaagttaaagaggagccatctgtctggccaggcaagaaaaccatccaacttacacatgaacaacagctgattctgaatcacaagatggaacctctccaggtggtgaaaattatggcctttgccggcactgggaagacctcaacgctggtcaagtatgcagagaagtggtctcagagcaggtttctgtatgtgacattcaacaagagcatcgcaaagcaggccgaacgcgtcttccccagcaacgtcatctgcaaaaccttccactccatggcctacgggcacatagggcggaagtaccagtcaaagaagaagttgaatctcttcaagttaacacccttcatggtcaactccgtccttgctgaagggaagggtggattcataagagccaagcttgtgtgtaagactctagaaaacttctttgcctcggctgacgaagagctgaccattgatcacgtgcctatttggtgtaagaacagccaaggacagagagtcatggttgagcagagtgaaaaactgaatggtgtccttgaagcgagccgcctctgggataacatgcggaagctgggggagtgcacagaagaggcgcaccagatgactcatgacggctacttgaaactctggcagctgagcaagccttcgctggcctcttttgacgccatctttgtggatgaggcccaggactgcacaccagctatcatgaacatagttctgtctcagccatgtgggaaaatctttgtaggggacccgcaccagcagatctataccttccggggtgcggtcaacgccctgttcacagtgccccacacccacgtcttctatctcacgcagagttttcggtttggtgtggaaatagcttatgtgggagctactatcttggatgtttgcaagagagtcaggaaaaagactttggttggaggaaaccatcagagtggcattagaggtgacgcaaaggggcaagtggccttgttgtcccggaccaacgccaacgtgtttgatgaggccgtacgggtgacggaaggggaattcccttcaaggatacatttgattggggggattaaatcatttggattggacagaatcattgatatttggatccttcttcagccagaggaagaacggaggaaacaaaacctcgtcattaaagacaaatttatcagaagatgggtgcacaaagaaggctttagtggcttcaagaggtatgtgaccgctgccgaggacaaggagcttgaagccaagatcgcagttgttgaaaagtataacatcaggattccagagctggtgcaaaggatagaaaaatgccatatagaagatttggactttgcaggtaagggaagcagttggtttttacctcccccctaagaggaggaacagatggtcttctgctgttcttttttttttttggagacagagtatggctctgttgcccaggctggagtgcagtggcgtgatctgggctcactgcaatgcccaccttctgggttcaagcaattatcctgcctcagcctcgtgagtagctgggactacaggccccaccaccagcccggctagttggtggtattttttggtagagatggagtctcaccatgtgggccaggctggtctcgaactcccaacctcaggtaatctgcccacctcgacctcccaaagtgctagaattacaggcgtgagccactgcgcccagcctcttctgctgtttcttccctgtgtggaatatctttgagcaaggatggctttatggcttaagggacaggggagcagagtcctggttcttcctcaggggctctttattctgttctactttcaagcccgtacaatgggattttctagtcccagctctgccacgtgtaatgtcaggcaagccgtgcagccctcttctgggctctgtcccttcatgtgttagatccagacggtgggtggagccactctgtcctctgggatgtgattccgagaggcgttaactctcctgcaactaattttcgacttttcccctcgtctttttcttttttctgttcccgacagttgtctgttcccgacagttgtttcctctttcccccttttcctacaaaactgcactg

SEQ ID NO: 438310 - DNA, 2182 bp, Homo sapiens
aggtcgcggccagaggaggagctcgctgccgggggacgctgggctgagcggccggcggcgcgggcccggcggcggcggcagcggggtccgggtccggagcgccacatgagacggtttaagcggaagcatcttactgccattgactgccagcatttggctcggagtcacttggctgtgacccagcccttcggtcaaagatggacaaacagagatccgaaccatggtctctatcctaaaccgagaacaaaaagagggagtaggggtcagggaagtcaaagatgcatccctgagttcttcctagcaggcaagcagccgtgcaccaatgacatggccaaaagcaattctgttggccaggacagctgtcaggactctgagggtgacatgatctttcctgcagagagcagctgtgcactgcctcaggaaggcagtgcagggccgggctcaccagggtctgccccgccctccaggaagcggtcttggtcctctgaggaagagagtaaccaggctaccgggaccagccggtgggatggagtttctaagaaagctccacggcaccatttgtctgtgccatgcacaaggcctagggaggccaggcaagaagcagaggacagtacgtctcggctctctgcggagtctggtgaaaccgaccaagatgctggggacgtgggtcctgatcccattcctgactcatactatgggcttcttgggaccttgccctgccaggaagcactgagccacatttgcagcctgcctagtgaggtcctgaggcacgtgtttgccttcctcccggtggaagacctctattggaacctgagcttggtgtgccacttgtggagggagatcatcagtgacccgctgttcattccttggaagaagctgtaccatcgatacctgatgaatgaagagcaagctgtcagcaaagtggacggcatcctgtctaactgtggcatagaaaaggagtcagacctgtgtgtgctgaacctcatacgatacacagccaccactaagtgctctccgagtgtggatcccgagagggtgctgtggagtctgagggaccaccccctcctccccgaggctgaggcgtgtgtgcggcaacacctccccgacctctacgctgctgccgggggtgtcaacatctgggccctggtggcggctgtggtgctcctctccagcagtgtgaatgacatccagcgactgctcttctgcctccggagacccagctccacggtgaccatgccagatgtcaccgagaccctgtactgcatagccgtgcttctctacgccatgagggagaaggggattaacatcagcaataggattcactacaacattttctattgcctatatcttcaggagaattcctgcactcaggccacaaaagttaaagaggagccatctgtctggccaggcaagaaaaccatccaacttacacatgaacaacagctgattctgaatcacaagatggaacctctccaggtggtgaaaattatggcctttgccggcactgggaagacctcaacgctggtcaagtatgcagagaagtggtctcagagcaggtttctgtatgtgacattcaacaagagcatcgcaaagcaggccgaacgcgtcttccccagcaacgtcatctgcaaaaccttccactccatggcctacgggcacatagggcggaagtaccagtcaaagaagaagttgaatctcttcaagttaacacccttcatggtcaactccgtccttgctgaagggaagggtggattcataagagccaagcttgtgtgtaagactctagaaaacttctttgcctcggctgacgaagagctgaccattgatcacgtgcctatttggtgtaagaacagccaaggacagagagtcatggttgagcagagtgaaaaactgactggtgagtgtctaagtgtctgaagtgttagggatctgaggatgggggaacaggggaagtgttagggatctgaggatggggaaacaggggaagtgttaggggtctgaggatggggaaacaggggaagtgttaggggtctgaggatggggaaacgggaagtgttagggatctgaggatggggaaatgggaagtgttaggggtctgaggatgggggatcaggggaagtgttagggatctgaggatgggggaacgggaagtgttagggatctgaggatgggcaaacaggga

SEQ ID NO: 438311 - DNA, 1630 bp, Homo sapiens
aggtcgcggccagaggaggagctcgctgccgggggacgctgggctgagcggccggcggcgcgggcccggcggcggcggcagcggggtccgggtccggagcgccacatgagacggtttaagcggaagcatcttactgccattgactgccagcatttggctcggagtcacttggctgtgacccagcccttcggtcaaagatggacaaacagagatccgaaccatggtctctatcctaaaccgagaacaaaaagagggagtaggggtcagggaagtcaaagatgcatccctgagttcttcctagcaggcaagcagccgtgcaccaatgacatggccaaaagcaattctgttggccaggacagctgtcaggactctgagggtgacatgatctttcctgcagagagcagctgtgcactgcctcaggaaggcagtgcagggccgggctcaccagggtctgccccgccctccaggaagcggtcttggtcctctgaggaagagagtaaccaggctaccgggaccagccggtgggatggagtttctaagaaagctccacggcaccatttgtctgtgccatgcacaaggcctagggaggccaggcaagaagcagaggacagtacgtctcggctctctgcggagtctggtgaaaccgaccaagatgctggggacgtgggtcctgatcccattcctgactcatactatgggcttcttgggaccttgccctgccaggaagcactgagccacatttgcagcctgcctagtgaggtcctgaggcacgtgtttgccttcctcccggtggaagacctctattggaacctgagcttggtgtgccacttgtggagggagatcatcagtgacccgctgttcattccttggaagaagctgtaccatcgatacctgatgaatgaagagcaagctgtcagcaaagtggacggcatcctgtctaactgtggcatagaaaaggagtcagacctgtgtgtgctgaacctcatacgatacacagccaccactaagtgctctccgagtgtggatcccgagagggtgctgtggagtctgagggaccaccccctcctccccgaggctgaggcgtgtgtgcggcaacacctccccgacctctacgctgctgccgggggtgtcaacatctgggccctggtggcggctgtggtgctcctctccagcagtgtgaatgacatccagcgactgctcttctgcctccggagacccagctccacggtgaccatgccagatgtcaccgagaccctgtactgcatagccgtgcttctctacgccatgagggagaaggggattaacatcagcaataggtaatgccccgggaggaggggaggggatgctgtgataatgggagagtcccagacacagcagcaggtccagccctgccacttagcagtgttagcacctggcaggctgtgggacccacctgctccacctcagtgtcatcttctgcaggagccaggggctgagagtttgatgtggaaaggctggtaagagcgccttatgaacgtgcagttctgagcggctgcgagataccactaaggctgattttaccatcatgggtcctgcagccttaggggaagcccctcgccaagagaagcctttcttattcacccgtggcctc

SEQ ID NO: 438312 - DNA, 466 bp, Homo sapiens
tggaaaatccatgttctttggttgttccccttagctctctctcttgtccatcaccacagagcaacaggaaggaaaacaaggggggctacctctgccactcctgtgcggagcagcgcatcgggcccctggcgttcctgacagcctccccggagcaggtgcgcgccatggagcgcactgtggagaacatcgtactgccccggcatgaggccctgctcttcctcgtcttctgaggacaaggcgcacgttctccgcagtgcagagcagcttgccgaggaccccgcgtgaagaaagccagcgaggggggcttctgctccctgagactctgggttcacccacagcactttctgaggaagaggacaccagcccaagctggacctgccatttctccactccctacagacagccagtctccacttgcctcccctctggatgtatctggtcagggaagtgggggatgttcttttga

SEQ ID NO: 438313 - DNA, 1277 bp, Homo sapiens
agtgactagtcattgattcgaagcatgtgagggtgaggaaatactgactttaacctttgtgaagaaatcgaacctccacccccttcctatttacctgacccctggggtttaaaggaactggcctccaagcgcgaccctgtgtgctggagccgcgggggaactttctgatggggcagcaccgccatctagtggccgtctgtcatcactgcagctggactcaggacccagatgttctttttcttcaattgttcagaaaattcctctcaactacagtggaaacctccagaaattcttttctagggagtttgttaagttagttacgcttaatgcttaatgaactttgccttaagtatttggtagtcttagagtcacggaattacggcgtgttcaagctaaaaaagcattagagatagtactatttgcgtaatgttgtcatctcttaatttgccagagggtctctcatgcagattttctgagccccattacttgacacttgtcactcccttccctgtgcctcagatgagatattcaagacatgccagccaatttaaacattagcctcagcaaaaacataatggagaagtcaaatctataaaggaaaattaagtataaagtcaattaaaaaataatttgagttgaattaccatttttaattctctatgccactgcccctctctgcccagaattggctgtccttgggagagctatttctgctatgtggctgacgtatttctccccacgttagaagatgcgacccgattcaagcacctccggaagtacacatacaactatgaggctgagagttccagtggagtccctgggactgctgattcaagaagtgccaccaggatcaactgcaaggtatggaggatgcaggcaggagggacctagagcccacagctttcccccagccctgttccagcgggcgcccaacacgcgaccttcccggagggtgtgtactgagcaaacgcagaacatcccagaactgttgtaatctgatcaaagcactgggactttgcctctgtttgtaagtcagccacattgctgagatgtggtctgcccccaccaaatttcgcaagtcagaagtattttcccgttaacttcccagatgcaataggaatccatgatctagattagcagcagtgtgggtctgtagatttcagcgtgagagaggcccagtaggtgagctatgggaggcaggcaactcggaatcgcactgtgaaatgcagtttttataatttaagtcaaacagaatctgttgctgaaaaatgaatgga

SEQ ID NO: 438314 - DNA, 14039 bp, Homo sapiens
tttgagactgcatagggctcggccgccccaccgcagctggcgatggacccgccgaggcccgcgctgctggcgctgctggcgctgcctgcgctgctgctgctgctgctggcgggcgccagggccgaagaggaaatgctggaaaatgtcagcctggtctgtccaaaagatgcgacccgattcaagcacctccggaagtacacatacaactatgaggctgagagttccagtggagtccctgggactgctgattcaagaagtgccaccaggatcaactgcaaggttgagctggaggttccccagctctgcagcttcatcctgaagaccagccagtgcaccctgaaagaggtgtatggcttcaaccctgagggcaaagccttgctgaagaaaaccaagaactctgaggagtttgctgcagccatgtccaggtatgagctcaagctggccattccagaagggaagcaggttttcctttacccggagaaagatgaacctacttacatcctgaacatcaagaggggcatcatttctgccctcctggttcccccagagacagaagaagccaagcaagtgttgtttctggataccgtgtatggaaactgctccactcactttaccgtcaagacgaggaagggcaatgtggcaacagaaatatccactgaaagagacctggggcagtgtgatcgcttcaagcccatccgcacaggcatcagcccacttgctctcatcaaaggcatgacccgccccttgtcaactctgatcagcagcagccagtcctgtcagtacacactggacgctaagaggaagcatgtggcagaagccatctgcaaggagcaacacctcttcctgcctttctcctacaagaataagtatgggatggtagcacaagtgacacagactttgaaacttgaagacacaccaaagatcaacagccgcttctttggtgaaggtactaagaagatgggcctcgcatttgagagcaccaaatccacatcacctccaaagcaggccgaagctgttttgaagactctccaggaactgaaaaaactaaccatctctgagcaaaatatccagagagctaatctcttcaataagctggttactgagctgagaggcctcagtgatgaagcagtcacatctctcttgccacagctgattgaggtgtccagccccatcactttacaagccttggttcagtgtggacagcctcagtgctccactcacatcctccagtggctgaaacgtgtgcatgccaacccccttctgatagatgtggtcacctacctggtggccctgatccccgagccctcagcacagcagctgcgagagatcttcaacatggcgagggatcagcgcagccgagccaccttgtatgcgctgagccacgcggtcaacaactatcataagacaaaccctacagggacccaggagctgctggacattgctaattacctgatggaacagattcaagatgactgcactggggatgaagattacacctatttgattctgcgggtcattggaaatatgggccaaaccatggagcagttaactccagaactcaagtcttcaatcctgaaatgtgtccaaagtacaaagccatcactgatgatccagaaagctgccatccaggctctgcggaaaatggagcctaaagacaaggaccaggaggttcttcttcagactttccttgatgatgcttctccgggagataagcgactggctgcctatcttatgttgatgaggagtccttcacaggcagatattaacaaaattgtccaaattctaccatgggaacagaatgagcaagtgaagaactttgtggcttcccatattgccaatatcttgaactcagaagaattggatatccaagatctgaaaaagttagtgaaagaagctctgaaagaatctcaacttccaactgtcatggacttcagaaaattctctcggaactatcaactctacaaatctgtttctcttccatcacttgacccagcctcagccaaaatagaagggaatcttatatttgatccaaataactaccttcctaaagaaagcatgctgaaaactaccctcactgcctttggatttgcttcagctgacctcatcgagattggcttggaaggaaaaggctttgagccaacattggaagctctttttgggaagcaaggatttttcccagacagtgtcaacaaagctttgtactgggttaatggtcaagttcctgatggtgtctctaaggtcttagtggaccactttggctataccaaagatgataaacatgagcaggatatggtaaatggaataatgctcagtgttgagaagctgattaaagatttgaaatccaaagaagtcccggaagccagagcctacctccgcatcttgggagaggagcttggttttgccagtctccatgacctccagctcctgggaaagctgcttctgatgggtgcccgcactctgcaggggatcccccagatgattggagaggtcatcaggaagggctcaaagaatgacttttttcttcactacatcttcatggagaatgcctttgaactccccactggagctggattacagttgcaaatatcttcatctggagtcattgctcccggagccaaggctggagtaaaactggaagtagccaacatgcaggctgaactggtggcaaaaccctccgtgtctgtggagtttgtgacaaatatgggcatcatcattccggacttcgctaggagtggggtccagatgaacaccaacttcttccacgagtcgggtctggaggctcatgttgccctaaaagctgggaagctgaagtttatcattccttccccaaagagaccagtcaagctgctcagtggaggcaacacattacatttggtctctaccaccaaaacggaggtgatcccacctctcattgagaacaggcagtcctggtcagtttgcaagcaagtctttcctggcctgaattactgcacctcaggcgcttactccaacgccagctccacagactccgcctcctactatccgctgaccggggacaccagattagagctggaactgaggcctacaggagagattgagcagtattctgtcagcgcaacctatgagctccagagagaggacagagccttggtggataccctgaagtttgtaactcaagcagaaggtgcgaagcagactgaggctaccatgacattcaaatataatcggcagagtatgaccttgtccagtgaagtccaaattccggattttgatgttgacctcggaacaatcctcagagttaatgatgaatctactgagggcaaaacgtcttacagactcaccctggacattcagaacaagaaaattactgaggtcgccctcatgggccacctaagttgtgacacaaaggaagaaagaaaaatcaagggtgttatttccataccccgtttgcaagcagaagccagaagtgagatcctcgcccactggtcgcctgccaaactgcttctccaaatggactcatctgctacagcttatggctccacagtttccaagagggtggcatggcattatgatgaagagaagattgaatttgaatggaacacaggcaccaatgtagataccaaaaaaatgacttccaatttccctgtggatctctccgattatcctaagagcttgcatatgtatgctaatagactcctggatcacagagtccctcaaacagacatgactttccggcacgtgggttccaaattaatagttgcaatgagctcatggcttcagaaggcatctgggagtcttccttatacccagactttgcaagaccacctcaatagcctgaaggagttcaacctccagaacatgggattgccagacttccacatcccagaaaacctcttcttaaaaagcgatggccgggtcaaatataccttgaacaagaacagtttgaaaattgagattcctttgccttttggtggcaaatcctccagagatctaaagatgttagagactgttaggacaccagccctccacttcaagtctgtgggattccatctgccatctcgagagttccaagtccctacttttaccattcccaagttgtatcaactgcaagtgcctctcctgggtgttctagacctctccacgaatgtctacagcaacttgtacaactggtccgcctcctacagtggtggcaacaccagcacagaccatttcagccttcgggctcgttaccacatgaaggctgactctgtggttgacctgctttcctacaatgtgcaaggatctggagaaacaacatatgaccacaagaatacgttcacactatcatgtgatgggtctctacgccacaaatttctagattcgaatatcaaattcagtcatgtagaaaaacttggaaacaacccagtctcaaaaggtttactaatattcgatgcatctagttcctggggaccacagatgtctgcttcagttcatttggactccaaaaagaaacagcatttgtttgtcaaagaagtcaagattgatgggcagttcagagtctcttcgttctatgctaaaggcacatatggcctgtcttgtcagagggatcctaacactggccggctcaatggagagtccaacctgaggtttaactcctcctacctccaaggcaccaaccagataacaggaagatatgaagatggaaccctctccctcacctccacctctgatctgcaaagtggcatcattaaaaatactgcttccctaaagtatgagaactacgagctgactttaaaatctgacaccaatgggaagtataagaactttgccacttctaacaagatggatatgaccttctctaagcaaaatgcactgctgcgttctgaatatcaggctgattacgagtcattgaggttcttcagcctgctttctggatcactaaattcccatggtcttgagttaaatgctgacatcttaggcactgacaaaattaatagtggtgctcacaaggcgacactaaggattggccaagatggaatatctaccagtgcaacgaccaacttgaagtgtagtctcctggtgctggagaatgagctgaatgcagagcttggcctctctggggcatctatgaaattaacaacaaatggccgcttcagggaacacaatgcaaaattcagtctggatgggaaagccgccctcacagagctatcactgggaagtgcttatcaggccatgattctgggtgtcgacagcaaaaacattttcaacttcaaggtcagtcaagaaggacttaagctctcaaatgacatgatgggctcatatgctgaaatgaaatttgaccacacaaacagtctgaacattgcaggcttatcactggacttctcttcaaaacttgacaacatttacagctctgacaagttttataagcaaactgttaatttacagctacagccctattctctggtaactactttaaacagtgacctgaaatacaatgctctggatctcaccaacaatgggaaactacggctagaacccctgaagctgcatgtggctggtaacctaaaaggagcctaccaaaataatgaaataaaacacatctatgccatctcttctgctgccttatcagcaagctataaagcagacactgttgctaaggttcagggtgtggagtttagccatcggctcaacacagacatcgctgggctggcttcagccattgacatgagcacaaactataattcagactcactgcatttcagcaatgtcttccgttctgtaatggccccgtttaccatgaccatcgatgcacatacaaatggcaatgggaaactcgctctctggggagaacatactgggcagctgtatagcaaattcctgttgaaagcagaacctctggcatttactttctctcatgattacaaaggctccacaagtcatcatctcgtgtctaggaaaagcatcagtgcagctcttgaacacaaagtcagtgccctgcttactccagctgagcagacaggcacctggaaactcaagacccaatttaacaacaatgaatacagccaggacttggatgcttacaacactaaagataaaattggcgtggagcttactggacgaactctggctgacctaactctactagactccccaattaaagtgccacttttactcagtgagcccatcaatatcattgatgctttagagatgagagatgccgttgagaagccccaagaatttacaattgttgcttttgtaaagtatgataaaaaccaagatgttcactccattaacctcccattttttgagaccttgcaagaatattttgagaggaatcgacaaaccattatagttgtactggaaaacgtacagagaaacctgaagcacatcaatattgatcaatttgtaagaaaatacagagcagccctgggaaaactcccacagcaagctaatgattatctgaattcattcaattgggagagacaagtttcacatgccaaggagaaactgactgctctcacaaaaaagtatagaattacagaaaatgatatacaaattgcattagatgatgccaaaatcaactttaatgaaaaactatctcaactgcagacatatatgatacaatttgatcagtatattaaagatagttatgatttacatgatttgaaaatagctattgctaatattattgatgaaatcattgaaaaattaaaaagtcttgatgagcactatcatatccgtgtaaatttagtaaaaacaatccatgatctacatttgtttattgaaaatattgattttaacaaaagtggaagtagtactgcatcctggattcaaaatgtggatactaagtaccaaatcagaatccagatacaagaaaaactgcagcagcttaagagacacatacagaatatagacatccagcacctagctggaaagttaaaacaacacattgaggctattgatgttagagtgcttttagatcaattgggaactacaatttcatttgaaagaataaatgatgttcttgagcatgtcaaacactttgttataaatcttattggggattttgaagtagctgagaaaatcaatgccttcagagccaaagtccatgagttaatcgagaggtatgaagtagaccaacaaatccaggttttaatggataaattagtagagttggcccaccaatacaagttgaaggagactattcagaagctaagcaatgtcctacaacaagttaagataaaagattactttgagaaattggttggatttattgatgatgctgtcaagaagcttaatgaattatcttttaaaacattcattgaagatgttaacaaattccttgacatgttgataaagaaattaaagtcatttgattaccaccagtttgtagatgaaaccaatgacaaaatccgtgaggtgactcagagactcaatggtgaaattcaggctctggaactaccacaaaaagctgaagcattaaaactgtttttagaggaaaccaaggccacagttgcagtgtatctggaaagcctacaggacaccaaaataaccttaatcatcaattggttacaggaggctttaagttcagcatctttggctcacatgaaggccaaattccgagagactctagaagatacacgagaccgaatgtatcaaatggacattcagcaggaacttcaacgatacctgtctctggtaggccaggtttatagcacacttgtcacctacatttctgattggtggactcttgctgctaagaaccttactgactttgcagagcaatattctatccaagattgggctaaacgtatgaaagcattggtagagcaagggttcactgttcctgaaatcaagaccatccttgggaccatgcctgcctttgaagtcagtcttcaggctcttcagaaagctaccttccagacacctgattttatagtccccctaacagatttgaggattccatcagttcagataaacttcaaagacttaaaaaatataaaaatcccatccaggttttccacaccagaatttaccatccttaacaccttccacattccttcctttacaattgactttgtagaaatgaaagtaaagatcatcagaaccattgaccagatgctgaacagtgagctgcagtggcccgttccagatatatatctcagggatctgaaggtggaggacattcctctagcgagaatcaccctgccagacttccgtttaccagaaatcgcaattccagaattcataatcccaactctcaaccttaatgattttcaagttcctgaccttcacataccagaattccagcttccccacatctcacacacaattgaagtacctacttttggcaagctatacagtattctgaaaatccaatctcctcttttcacattagatgcaaatgctgacatagggaatggaaccacctcagcaaacgaagcaggtatcgcagcttccatcactgccaaaggagagtccaaattagaagttctcaattttgattttcaagcaaatgcacaactctcaaaccctaagattaatccgctggctctgaaggagtcagtgaagttctccagcaagtacctgagaacggagcatgggagtgaaatgctgttttttggaaatgctattgagggaaaatcaaacacagtggcaagtttacacacagaaaaaaatacactggagcttagtaatggagtgattgtcaagataaacaatcagcttaccctggatagcaacactaaatacttccacaaattgaacatccccaaactggacttctctagtcaggctgacctgcgcaacgagatcaagacactgttgaaagctggccacatagcatggacttcttctggaaaagggtcatggaaatgggcctgccccagattctcagatgagggaacacatgaatcacaaattagtttcaccatagaaggacccctcacttcctttggactgtccaataagatcaatagcaaacacctaagagtaaaccaaaacttggtttatgaatctggctccctcaacttttctaaacttgaaattcaatcacaagtcgattcccagcatgtgggccacagtgttctaactgctaaaggcatggcactgtttggagaagggaaggcagagtttactgggaggcatgatgctcatttaaatggaaaggttattggaactttgaaaaattctcttttcttttcagcccagccatttgagatcacggcatccacaaacaatgaagggaatttgaaagttcgttttccattaaggttaacagggaagatagacttcctgaataactatgcactgtttctgagtcccagtgcccagcaagcaagttggcaagtaagtgctaggttcaatcagtataagtacaaccaaaatttctctgctggaaacaacgagaacattatggaggcccatgtaggaataaatggagaagcaaatctggatttcttaaacattcctttaacaattcctgaaatgcgtctaccttacacaataatcacaactcctccactgaaagatttctctctatgggaaaaaacaggcttgaaggaattcttgaaaacgacaaagcaatcatttgatttaagtgtaaaagctcagtataagaaaaacaaacacaggcattccatcacaaatcctttggctgtgctttgtgagtttatcagtcagagcatcaaatcctttgacaggcattttgaaaaaaacagaaacaatgcattagattttgtcaccaaatcctataatgaaacaaaaattaagtttgataagtacaaagctgaaaaatctcacgacgagctccccaggacctttcaaattcctggatacactgttccagttgtcaatgttgaagtgtctccattcaccatagagatgtcggcattcggctatgtgttcccaaaagcagtcagcatgcctagtttctccatcctaggttctgacgtccgtgtgccttcatacacattaatcctgccatcattagagctgccagtccttcatgtccctagaaatctcaagctttctcttccacatttcaaggaattgtgtaccataagccatatttttattcctgccatgggcaatattacctatgatttctcctttaaatcaagtgtcatcacactgaataccaatgctgaactttttaaccagtcagatattgttgctcatctcctttcttcatcttcatctgtcattgatgcactgcagtacaaattagagggcaccacaagattgacaagaaaaaggggattgaagttagccacagctctgtctctgagcaacaaatttgtggagggtagtcataacagtactgtgagcttaaccacgaaaaatatggaagtgtcagtggcaaaaaccacaaaagccgaaattccaattttgagaatgaatttcaagcaagaacttaatggaaataccaagtcaaaacctactgtctcttcctccatggaatttaagtatgatttcaattcttcaatgctgtactctaccgctaaaggagcagttgaccacaagcttagcttggaaagcctcacctcttacttttccattgagtcatctaccaaaggagatgtcaagggttcggttctttctcgggaatattcaggaactattgctagtgaggccaacacttacttgaattccaagagcacacggtcttcagtgaagctgcagggcacttccaaaattgatgatatctggaaccttgaagtaaaagaaaattttgctggagaagccacactccaacgcatatattccctctgggagcacagtacgaaaaaccacttacagctagagggcctctttttcaccaacggagaacatacaagcaaagccaccctggaactctctccatggcaaatgtcagctcttgttcaggtccatgcaagtcagcccagttccttccatgatttccctgaccttggccaggaagtggccctgaatgctaacactaagaaccagaagatcagatggaaaaatgaagtccggattcattctgggtctttccagagccaggtcgagctttccaatgaccaagaaaaggcacaccttgacattgcaggatccttagaaggacacctaaggttcctcaaaaatatcatcctaccagtctatgacaagagcttatgggatttcctaaagctggatgtaaccaccagcattggtaggagacagcatcttcgtgtttcaactgcctttgtgtacaccaaaaaccccaatggctattcattctccatccctgtaaaagttttggctgataaattcattattcctgggctgaaactaaatgatctaaattcagttcttgtcatgcctacgttccatgtcccatttacagatcttcaggttccatcgtgcaaacttgacttcagagaaatacaaatctataagaagctgagaacttcatcatttgccctcaacctaccaacactccccgaggtaaaattccctgaagttgatgtgttaacaaaatattctcaaccagaagactccttgattcccttttttgagataaccgtgcctgaatctcagttaactgtgtcccagttcacgcttccaaaaagtgtttcagatggcattgctgctttggatctaaatgcagtagccaacaagatcgcagactttgagttgcccaccatcatcgtgcctgagcagaccattgagattccctccattaagttctctgtacctgctggaattgtcattccttcctttcaagcactgactgcacgctttgaggtagactctcccgtgtataatgccacttggagtgccagtttgaaaaacaaagcagattatgttgaaacagtcctggattccacatgcagctcaaccgtacagttcctagaatatgaactaaatgttttgggaacacacaaaatcgaagatggtacgttagcctctaagactaaaggaacatttgcacaccgtgacttcagtgcagaatatgaagaagatggcaaatatgaaggacttcaggaatgggaaggaaaagcgcacctcaatatcaaaagcccagcgttcaccgatctccatctgcgctaccagaaagacaagaaaggcatctccacctcagcagcctccccagccgtaggcaccgtgggcatggatatggatgaagatgacgacttttctaaatggaacttctactacagccctcagtcctctccagataaaaaactcaccatattcaaaactgagttgagggtccgggaatctgatgaggaaactcagatcaaagttaattgggaagaagaggcagcttctggcttgctaacctctctgaaagacaacgtgcccaaggccacaggggtcctttatgattatgtcaacaagtaccactgggaacacacagggctcaccctgagagaagtgtcttcaaagctgagaagaaatctgcagaacaatgctgagtgggtttatcaaggggccattaggcaaattgatgatatcgacgtgaggttccagaaagcagccagtggcaccactgggacctaccaagagtggaaggacaaggcccagaatctgtaccaggaactgttgactcaggaaggccaagccagtttccagggactcaaggataacgtgtttgatggcttggtacgagttactcaagaattccatatgaaagtcaagcatctgattgactcactcattgattttctgaacttccccagattccagtttccggggaaacctgggatatacactagggaggaactttgcactatgttcataagggaggtagggacggtactgtcccaggtatattcgaaagtccataatggttcagaaatactgttttcctatttccaagacctagtgattacacttcctttcgagttaaggaaacataaactaatagatgtaatctcgatgtatagggaactgttgaaagatttatcaaaagaagcccaagaggtatttaaagccattcagtctctcaagaccacagaggtgctacgtaatcttcaggaccttttacaattcattttccaactaatagaagataacattaaacagctgaaagagatgaaatttacttatcttattaattatatccaagatgagatcaacacaatcttcagtgattatatcccatatgtttttaaattgttgaaagaaaacctatgccttaatcttcataagttcaatgaatttattcaaaacgagcttcaggaagcttctcaagagttacagcagatccatcaatacattatggcccttcgtgaagaatattttgatccaagtatagttggctggacagtgaaatattatgaacttgaagaaaagatagtcagtctgatcaagaacctgttagttgctcttaaggacttccattctgaatatattgtcagtgcctctaactttacttcccaactctcaagtcaagttgagcaatttctgcacagaaatattcaggaatatcttagcatccttaccgatccagatggaaaagggaaagagaagattgcagagctttctgccactgctcaggaaataattaaaagccaggccattgcgacgaagaaaataatttctgattaccaccagcagtttagatataaactgcaagatttttcagaccaactctctgattactatgaaaaatttattgctgaatccaaaagattgattgacctgtccattcaaaactaccacacatttctgatatacatcacggagttactgaaaaagctgcaatcaaccacagtcatgaacccctacatgaagcttgctccaggagaacttactatcatcctctaattttttaaaagaaatcttcatttattcttcttttccaattgaactttcacatagcacagaaaaaattcaaactgcctatattgataaaaccatacagtgagccagccttgcagtaggcagtagactataagcagaagcacatatgaactggacctgcaccaaagctggcaccagggctcggaaggtctctgaactcagaaggatggcattttttgcaagttaaagaaaatcaggatctgagttattttgctaaacttgggggaggaggaacaaataaatggagtctttattgtgtatcataacac

SEQ ID NO: 438315 - DNA, 14561 bp, Homo sapiens
agtgactagtcattgattcgaagcatgtgagggtgaggaaatactgactttaacctttgtgaagaaatcgaacctccacccccttcctatttacctgacccctggggtttaaaggaactggcctccaagcgcgaccctgtgtgctggagccgcgggggaactttctgatggggcagcaccgccatctagtggccgtctgtcatcactgcagctggactcaggacccagatgttctttttcttcaattgttcagaaaattcctctcaactacagtggaaacctccagaaattcttttctagggagtttgttaagttagttacgcttaatgcttaatgaactttgccttaagtatttggtagtcttagagtcacggaattacggcgtgttcaagctaaaaaagcattagagatagtactatttgcgtaatgttgtcatctcttaatttgccagagggtctctcatgcagattttctgagccccattacttgacacttgtcactcccttccctgtgcctcagatgagatattcaagacatgccagccaatttaaacattagcctcagcaaaaacataatggagaagtcaaatctataaaggaaaattaagtataaagtcaattaaaaaataatttgagttgaattaccatttttaattctctatgccactgcccctctctgcccagaattggctgtccttgggagagctatttctgctatgtggctgacgtatttctccccacgttagaagatgcgacccgattcaagcacctccggaagtacacatacaactatgaggctgagagttccagtggagtccctgggactgctgattcaagaagtgccaccaggatcaactgcaaggttgagctggaggttccccagctctgcagcttcatcctgaagaccagccagtgcaccctgaaagaggtgtatggcttcaaccctgagggcaaagccttgctgaagaaaaccaagaactctgaggagtttgctgcagccatgtccaggtatgagctcaagctggccattccagaagggaagcaggttttcctttacccggagaaagatgaacctacttacatcctgaacatcaagaggggcatcatttctgccctcctggttcccccagagacagaagaagccaagcaagtgttgtttctggataccgtgtatggaaactgctccactcactttaccgtcaagacgaggaagggcaatgtggcaacagaaatatccactgaaagagacctggggcagtgtgatcgcttcaagcccatccgcacaggcatcagcccacttgctctcatcaaaggcatgacccgccccttgtcaactctgatcagcagcagccagtcctgtcagtacacactggacgctaagaggaagcatgtggcagaagccatctgcaaggagcaacacctcttcctgcctttctcctacaagaataagtatgggatggtagcacaagtgacacagactttgaaacttgaagacacaccaaagatcaacagccgcttctttggtgaaggtactaagaagatgggcctcgcatttgagagcaccaaatccacatcacctccaaagcaggccgaagctgttttgaagactctccaggaactgaaaaaactaaccatctctgagcaaaatatccagagagctaatctcttcaataagctggttactgagctgagaggcctcagtgatgaagcagtcacatctctcttgccacagctgattgaggtgtccagccccatcactttacaagccttggttcagtgtggacagcctcagtgctccactcacatcctccagtggctgaaacgtgtgcatgccaacccccttctgatagatgtggtcacctacctggtggccctgatccccgagccctcagcacagcagctgcgagagatcttcaacatggcgagggatcagcgcagccgagccaccttgtatgcgctgagccacgcggtcaacaactatcataagacaaaccctacagggacccaggagctgctggacattgctaattacctgatggaacagattcaagatgactgcactggggatgaagattacacctatttgattctgcgggtcattggaaatatgggccaaaccatggagcagttaactccagaactcaagtcttcaatcctgaaatgtgtccaaagtacaaagccatcactgatgatccagaaagctgccatccaggctctgcggaaaatggagcctaaagacaaggaccaggaggttcttcttcagactttccttgatgatgcttctccgggagataagcgactggctgcctatcttatgttgatgaggagtccttcacaggcagatattaacaaaattgtccaaattctaccatgggaacagaatgagcaagtgaagaactttgtggcttcccatattgccaatatcttgaactcagaagaattggatatccaagatctgaaaaagttagtgaaagaagctctgaaagaatctcaacttccaactgtcatggacttcagaaaattctctcggaactatcaactctacaaatctgtttctcttccatcacttgacccagcctcagccaaaatagaagggaatcttatatttgatccaaataactaccttcctaaagaaagcatgctgaaaactaccctcactgcctttggatttgcttcagctgacctcatcgagattggcttggaaggaaaaggctttgagccaacattggaagctctttttgggaagcaaggatttttcccagacagtgtcaacaaagctttgtactgggttaatggtcaagttcctgatggtgtctctaaggtcttagtggaccactttggctataccaaagatgataaacatgagcaggatatggtaaatggaataatgctcagtgttgagaagctgattaaagatttgaaatccaaagaagtcccggaagccagagcctacctccgcatcttgggagaggagcttggttttgccagtctccatgacctccagctcctgggaaagctgcttctgatgggtgcccgcactctgcaggggatcccccagatgattggagaggtcatcaggaagggctcaaagaatgacttttttcttcactacatcttcatggagaatgcctttgaactccccactggagctggattacagttgcaaatatcttcatctggagtcattgctcccggagccaaggctggagtaaaactggaagtagccaacatgcaggctgaactggtggcaaaaccctccgtgtctgtggagtttgtgacaaatatgggcatcatcattccggacttcgctaggagtggggtccagatgaacaccaacttcttccacgagtcgggtctggaggctcatgttgccctaaaagctgggaagctgaagtttatcattccttccccaaagagaccagtcaagctgctcagtggaggcaacacattacatttggtctctaccaccaaaacggaggtgatcccacctctcattgagaacaggcagtcctggtcagtttgcaagcaagtctttcctggcctgaattactgcacctcaggcgcttactccaacgccagctccacagactccgcctcctactatccgctgaccggggacaccagattagagctggaactgaggcctacaggagagattgagcagtattctgtcagcgcaacctatgagctccagagagaggacagagccttggtggataccctgaagtttgtaactcaagcagaaggtgcgaagcagactgaggctaccatgacattcaaatataatcggcagagtatgaccttgtccagtgaagtccaaattccggattttgatgttgacctcggaacaatcctcagagttaatgatgaatctactgagggcaaaacgtcttacagactcaccctggacattcagaacaagaaaattactgaggtcgccctcatgggccacctaagttgtgacacaaaggaagaaagaaaaatcaagggtgttatttccataccccgtttgcaagcagaagccagaagtgagatcctcgcccactggtcgcctgccaaactgcttctccaaatggactcatctgctacagcttatggctccacagtttccaagagggtggcatggcattatgatgaagagaagattgaatttgaatggaacacaggcaccaatgtagataccaaaaaaatgacttccaatttccctgtggatctctccgattatcctaagagcttgcatatgtatgctaatagactcctggatcacagagtccctcaaacagacatgactttccggcacgtgggttccaaattaatagttgcaatgagctcatggcttcagaaggcatctgggagtcttccttatacccagactttgcaagaccacctcaatagcctgaaggagttcaacctccagaacatgggattgccagacttccacatcccagaaaacctcttcttaaaaagcgatggccgggtcaaatataccttgaacaagaacagtttgaaaattgagattcctttgccttttggtggcaaatcctccagagatctaaagatgttagagactgttaggacaccagccctccacttcaagtctgtgggattccatctgccatctcgagagttccaagtccctacttttaccattcccaagttgtatcaactgcaagtgcctctcctgggtgttctagacctctccacgaatgtctacagcaacttgtacaactggtccgcctcctacagtggtggcaacaccagcacagaccatttcagccttcgggctcgttaccacatgaaggctgactctgtggttgacctgctttcctacaatgtgcaaggatctggagaaacaacatatgaccacaagaatacgttcacactatcatgtgatgggtctctacgccacaaatttctagattcgaatatcaaattcagtcatgtagaaaaacttggaaacaacccagtctcaaaaggtttactaatattcgatgcatctagttcctggggaccacagatgtctgcttcagttcatttggactccaaaaagaaacagcatttgtttgtcaaagaagtcaagattgatgggcagttcagagtctcttcgttctatgctaaaggcacatatggcctgtcttgtcagagggatcctaacactggccggctcaatggagagtccaacctgaggtttaactcctcctacctccaaggcaccaaccagataacaggaagatatgaagatggaaccctctccctcacctccacctctgatctgcaaagtggcatcattaaaaatactgcttccctaaagtatgagaactacgagctgactttaaaatctgacaccaatgggaagtataagaactttgccacttctaacaagatggatatgaccttctctaagcaaaatgcactgctgcgttctgaatatcaggctgattacgagtcattgaggttcttcagcctgctttctggatcactaaattcccatggtcttgagttaaatgctgacatcttaggcactgacaaaattaatagtggtgctcacaaggcgacactaaggattggccaagatggaatatctaccagtgcaacgaccaacttgaagtgtagtctcctggtgctggagaatgagctgaatgcagagcttggcctctctggggcatctatgaaattaacaacaaatggccgcttcagggaacacaatgcaaaattcagtctggatgggaaagccgccctcacagagctatcactgggaagtgcttatcaggccatgattctgggtgtcgacagcaaaaacattttcaacttcaaggtcagtcaagaaggacttaagctctcaaatgacatgatgggctcatatgctgaaatgaaatttgaccacacaaacagtctgaacattgcaggcttatcactggacttctcttcaaaacttgacaacatttacagctctgacaagttttataagcaaactgttaatttacagctacagccctattctctggtaactactttaaacagtgacctgaaatacaatgctctggatctcaccaacaatgggaaactacggctagaacccctgaagctgcatgtggctggtaacctaaaaggagcctaccaaaataatgaaataaaacacatctatgccatctcttctgctgccttatcagcaagctataaagcagacactgttgctaaggttcagggtgtggagtttagccatcggctcaacacagacatcgctgggctggcttcagccattgacatgagcacaaactataattcagactcactgcatttcagcaatgtcttccgttctgtaatggccccgtttaccatgaccatcgatgcacatacaaatggcaatgggaaactcgctctctggggagaacatactgggcagctgtatagcaaattcctgttgaaagcagaacctctggcatttactttctctcatgattacaaaggctccacaagtcatcatctcgtgtctaggaaaagcatcagtgcagctcttgaacacaaagtcagtgccctgcttactccagctgagcagacaggcacctggaaactcaagacccaatttaacaacaatgaatacagccaggacttggatgcttacaacactaaagataaaattggcgtggagcttactggacgaactctggctgacctaactctactagactccccaattaaagtgccacttttactcagtgagcccatcaatatcattgatgctttagagatgagagatgccgttgagaagccccaagaatttacaattgttgcttttgtaaagtatgataaaaaccaagatgttcactccattaacctcccattttttgagaccttgcaagaatattttgagaggaatcgacaaaccattatagttgtactggaaaacgtacagagaaacctgaagcacatcaatattgatcaatttgtaagaaaatacagagcagccctgggaaaactcccacagcaagctaatgattatctgaattcattcaattgggagagacaagtttcacatgccaaggagaaactgactgctctcacaaaaaagtatagaattacagaaaatgatatacaaattgcattagatgatgccaaaatcaactttaatgaaaaactatctcaactgcagacatatatgatacaatttgatcagtatattaaagatagttatgatttacatgatttgaaaatagctattgctaatattattgatgaaatcattgaaaaattaaaaagtcttgatgagcactatcatatccgtgtaaatttagtaaaaacaatccatgatctacatttgtttattgaaaatattgattttaacaaaagtggaagtagtactgcatcctggattcaaaatgtggatactaagtaccaaatcagaatccagatacaagaaaaactgcagcagcttaagagacacatacagaatatagacatccagcacctagctggaaagttaaaacaacacattgaggctattgatgttagagtgcttttagatcaattgggaactacaatttcatttgaaagaataaatgatgttcttgagcatgtcaaacactttgttataaatcttattggggattttgaagtagctgagaaaatcaatgccttcagagccaaagtccatgagttaatcgagaggtatgaagtagaccaacaaatccaggttttaatggataaattagtagagttggcccaccaatacaagttgaaggagactattcagaagctaagcaatgtcctacaacaagttaagataaaagattactttgagaaattggttggatttattgatgatgctgtcaagaagcttaatgaattatcttttaaaacattcattgaagatgttaacaaattccttgacatgttgataaagaaattaaagtcatttgattaccaccagtttgtagatgaaaccaatgacaaaatccgtgaggtgactcagagactcaatggtgaaattcaggctctggaactaccacaaaaagctgaagcattaaaactgtttttagaggaaaccaaggccacagttgcagtgtatctggaaagcctacaggacaccaaaataaccttaatcatcaattggttacaggaggctttaagttcagcatctttggctcacatgaaggccaaattccgagagactctagaagatacacgagaccgaatgtatcaaatggacattcagcaggaacttcaacgatacctgtctctggtaggccaggtttatagcacacttgtcacctacatttctgattggtggactcttgctgctaagaaccttactgactttgcagagcaatattctatccaagattgggctaaacgtatgaaagcattggtagagcaagggttcactgttcctgaaatcaagaccatccttgggaccatgcctgcctttgaagtcagtcttcaggctcttcagaaagctaccttccagacacctgattttatagtccccctaacagatttgaggattccatcagttcagataaacttcaaagacttaaaaaatataaaaatcccatccaggttttccacaccagaatttaccatccttaacaccttccacattccttcctttacaattgactttgtagaaatgaaagtaaagatcatcagaaccattgaccagatgctgaacagtgagctgcagtggcccgttccagatatatatctcagggatctgaaggtggaggacattcctctagcgagaatcaccctgccagacttccgtttaccagaaatcgcaattccagaattccagcttccccacatctcacacacaattgaagtacctacttttggcaagctatacagtattctgaaaatccaatctcctcttttcacattagatgcaaatgctgacatagggaatggaaccacctcagcaaacgaagcaggtatcgcagcttccatcactgccaaaggagagtccaaattagaagttctcaattttgattttcaagcaaatgcacaactctcaaaccctaagattaatccgctggctctgaaggagtcagtgaagttctccagcaagtacctgagaacggagcatgggagtgaaatgctgttttttggaaatgctattgagggaaaatcaaacacagtggcaagtttacacacagaaaaaaatacactggagcttagtaatggagtgattgtcaagataaacaatcagcttaccctggatagcaacactaaatacttccacaaattgaacatccccaaactggacttctctagtcaggctgacctgcgcaacgagatcaagacactgttgaaagctggccacatagcatggacttcttctggaaaagggtcatggaaatgggcctgccccagattctcagatgagggaacacatgaatcacaaattagtttcaccatagaaggacccctcacttcctttggactgtccaataagatcaatagcaaacacctaagagtaaaccaaaacttggtttatgaatctggctccctcaacttttctaaacttgaaattcaatcacaagtcgattcccagcatgtgggccacagtgttctaactgctaaaggcatggcactgtttggagaagggaaggcagagtttactgggaggcatgatgctcatttaaatggaaaggttattggaactttgaaaaattctcttttcttttcagcccagccatttgagatcacggcatccacaaacaatgaagggaatttgaaagttcgttttccattaaggttaacagggaagatagacttcctgaataactatgcactgtttctgagtcccagtgcccagcaagcaagttggcaagtaagtgctaggttcaatcagtataagtacaaccaaaatttctctgctggaaacaacgagaacattatggaggcccatgtaggaataaatggagaagcaaatctggatttcttaaacattcctttaacaattcctgaaatgcgtctaccttacacaataatcacaactcctccactgaaagatttctctctatgggaaaaaacaggcttgaaggaattcttgaaaacgacaaagcaatcatttgatttaagtgtaaaagctcagtataagaaaaacaaacacaggcattccatcacaaatcctttggctgtgctttgtgagtttatcagtcagagcatcaaatcctttgacaggcattttgaaaaaaacagaaacaatgcattagattttgtcaccaaatcctataatgaaacaaaaattaagtttgataagtacaaagctgaaaaatctcacgacgagctccccaggacctttcaaattcctggatacactgttccagttgtcaatgttgaagtgtctccattcaccatagagatgtcggcattcggctatgtgttcccaaaagcagtcagcatgcctagtttctccatcctaggttctgacgtccgtgtgccttcatacacattaatcctgccatcattagagctgccagtccttcatgtccctagaaatctcaagctttctcttccacatttcaaggaattgtgtaccataagccatatttttattcctgccatgggcaatattacctatgatttctcctttaaatcaagtgtcatcacactgaataccaatgctgaactttttaaccagtcagatattgttgctcatctcctttcttcatcttcatctgtcattgatgcactgcagtacaaattagagggcaccacaagattgacaagaaaaaggggattgaagttagccacagctctgtctctgagcaacaaatttgtggagggtagtcataacagtactgtgagcttaaccacgaaaaatatggaagtgtcagtggcaaaaaccacaaaagccgaaattccaattttgagaatgaatttcaagcaagaacttaatggaaataccaagtcaaaacctactgtctcttcctccatggaatttaagtatgatttcaattcttcaatgctgtactctaccgctaaaggagcagttgaccacaagcttagcttggaaagcctcacctcttacttttccattgagtcatctaccaaaggagatgtcaagggttcggttctttctcgggaatattcaggaactattgctagtgaggccaacacttacttgaattccaagagcacacggtcttcagtgaagctgcagggcacttccaaaattgatgatatctggaaccttgaagtaaaagaaaattttgctggagaagccacactccaacgcatatattccctctgggagcacagtacgaaaaaccacttacagctagagggcctctttttcaccaacggagaacatacaagcaaagccaccctggaactctctccatggcaaatgtcagctcttgttcaggtccatgcaagtcagcccagttccttccatgatttccctgaccttggccaggaagtggccctgaatgctaacactaagaaccagaagatcagatggaaaaatgaagtccggattcattctgggtctttccagagccaggtcgagctttccaatgaccaagaaaaggcacaccttgacattgcaggatccttagaaggacacctaaggttcctcaaaaatatcatcctaccagtctatgacaagagcttatgggatttcctaaagctggatgtaaccaccagcattggtaggagacagcatcttcgtgtttcaactgcctttgtgtacaccaaaaaccccaatggctattcattctccatccctgtaaaagttttggctgataaattcattattcctgggctgaaactaaatgatctaaattcagttcttgtcatgcctacgttccatgtcccatttacagatcttcaggttccatcgtgcaaacttgacttcagagaaatacaaatctataagaagctgagaacttcatcatttgccctcaacctaccaacactccccgaggtaaaattccctgaagttgatgtgttaacaaaatattctcaaccagaagactccttgattcccttttttgagataaccgtgcctgaatctcagttaactgtgtcccagttcacgcttccaaaaagtgtttcagatggcattgctgctttggatctaaatgcagtagccaacaagatcgcagactttgagttgcccaccatcatcgtgcctgagcagaccattgagattccctccattaagttctctgtacctgctggaattgtcattccttcctttcaagcactgactgcacgctttgaggtagactctcccgtgtataatgccacttggagtgccagtttgaaaaacaaagcagattatgttgaaacagtcctggattccacatgcagctcaaccgtacagttcctagaatatgaactaaatgttttgggaacacacaaaatcgaagatggtacgttagcctctaagactaaaggaacatttgcacaccgtgacttcagtgcagaatatgaagaagatggcaaatatgaaggacttcaggaatgggaaggaaaagcgcacctcaatatcaaaagcccagcgttcaccgatctccatctgcgctaccagaaagacaagaaaggcatctccacctcagcagcctccccagccgtaggcaccgtgggcatggatatggatgaagatgacgacttttctaaatggaacttctactacagccctcagtcctctccagataaaaaactcaccatattcaaaactgagttgagggtccgggaatctgatgaggaaactcagatcaaagttaattgggaagaagaggcagcttctggcttgctaacctctctgaaagacaacgtgcccaaggccacaggggtcctttatgattatgtcaacaagtaccactgggaacacacagggctcaccctgagagaagtgtcttcaaagctgagaagaaatctgcagaacaatgctgagtgggtttatcaaggggccattaggcaaattgatgatatcgacgtgaggttccagaaagcagccagtggcaccactgggacctaccaagagtggaaggacaaggcccagaatctgtaccaggaactgttgactcaggaaggccaagccagtttccagggactcaaggataacgtgtttgatggcttggtacgagttactcaagaattccatatgaaagtcaagcatctgattgactcactcattgattttctgaacttccccagattccagtttccggggaaacctgggatatacactagggaggaactttgcactatgttcataagggaggtagggacggtactgtcccaggtatattcgaaagtccataatggttcagaaatactgttttcctatttccaagacctagtgattacacttcctttcgagttaaggaaacataaactaatagatgtaatctcgatgtatagggaactgttgaaagatttatcaaaagaagcccaagaggtatttaaagccattcagtctctcaagaccacagaggtgctacgtaatcttcaggaccttttacaattcattttccaactaatagaagataacattaaacagctgaaagagatgaaatttacttatcttattaattatatccaagatgagatcaacacaatcttcagtgattatatcccatatgtttttaaattgttgaaagaaaacctatgccttaatcttcataagttcaatgaatttattcaaaacgagcttcaggaagcttctcaagagttacagcagatccatcaatacattatggcccttcgtgaagaatattttgatccaagtatagttggctggacagtgaaatattatgaacttgaagaaaagatagtcagtctgatcaagaacctgttagttgctcttaaggacttccattctgaatatattgtcagtgcctctaactttacttcccaactctcaagtcaagttgagcaatttctgcacagaaatattcaggaatatcttagcatccttaccgatccagatggaaaagggaaagagaagattgcagagctttctgccactgctcaggaaataattaaaagccaggccattgcgacgaagaaaataatttctgattaccaccagcagtttagatataaactgcaagatttttcagaccaactctctgattactatgaaaaatttattgctgaatccaaaagattgattgacctgtccattcaaaactaccacacatttctgatatacatcacggagttactgaaaaagctgcaatcaaccacagtcatgaacccctacatgaagcttgctccaggagaacttactatcatcctctaattttttaaaagaaatcttcatttattcttcttttccaattgaactttcacatagcacagaaaaaattcaaactgcctatattgataaaaccatacagtgagccagccttgcagtaggcagtagactataagcagaagcacatatgaactggacctgcaccaaagctggcaccagggctcggaaggtctctgaactcagaaggatggcattttttgcaagttaaagaaaatcaggatctgagttattttgctaaacttgggggaggaggaacaaataaatggagtctttattgtgtatcataacac

SEQ ID NO: 438316 - DNA, 14012 bp, Homo sapiens
cattcccaccgggacctgcggggctgagtgcccttctcggttgctgccgctgaggagcccgcccagccagccagggccgcgaggccgaggccaggccgcagcccaggagccgccccaccgcagctggcgatggacccgccgaggcccgcgctgctggcgctgctggcgctgcctgcgctgctgctgctgctgctggcgggcgccagggccgaagaggaaatgctggaaaatgtcagcctggtctgtccaaaagatgcgacccgattcaagcacctccggaagtacacatacaactatgaggctgagagttccagtggagtccctgggactgctgattcaagaagtgccaccaggatcaactgcaaggttgagctggaggttccccagctctgcagcttcatcctgaagaccagccagtgcaccctgaaagaggtgtatggcttcaaccctgagggcaaagccttgctgaagaaaaccaagaactctgaggagtttgctgcagccatgtccaggtatgagctcaagctggccattccagaagggaagcaggttttcctttacccggagaaagatgaacctacttacatcctgaacatcaagaggggcatcatttctgccctcctggttcccccagagacagaagaagccaagcaagtgttgtttctggataccgtgtatggaaactgctccactcactttaccgtcaagacgaggaagggcaatgtggcaacagaaatatccactgaaagagacctggggcagtgtgatcgcttcaagcccatccgcacaggcatcagcccacttgctctcatcaaaggcatgacccgccccttgtcaactctgatcagcagcagccagtcctgtcagtacacactggacgctaagaggaagcatgtggcagaagccatctgcaaggagcaacacctcttcctgcctttctcctacaagaataagtatgggatggtagcacaagtgacacagactttgaaacttgaagacacaccaaagatcaacagccgcttctttggtgaaggtactaagaagatgggcctcgcatttgagagcaccaaatccacatcacctccaaagcaggccgaagctgttttgaagactctccaggaactgaaaaaactaaccatctctgagcaaaatatccagagagctaatctcttcaataagctggttactgagctgagaggcctcagtgatgaagcagtcacatctctcttgccacagctgattgaggtgtccagccccatcactttacaagccttggttcagtgtggacagcctcagtgctccactcacatcctccagtggctgaaacgtgtgcatgccaacccccttctgatagatgtggtcacctacctggtggccctgatccccgagccctcagcacagcagctgcgagagatcttcaacatggcgagggatcagcgcagccgagccaccttgtatgcgctgagccacgcggtcaacaactatcataagacaaaccctacagggacccaggagctgctggacattgctaattacctgatggaacagattcaagatgactgcactggggatgaagattacacctatttgattctgcgggtcattggaaatatgggccaaaccatggagcagttaactccagaactcaagtcttcaatcctgaaatgtgtccaaagtacaaagccatcactgatgatccagaaagctgccatccaggctctgcggaaaatggagcctaaagacaaggaccaggaggttcttcttcagactttccttgatgatgcttctccgggagataagcgactggctgcctatcttatgttgatgaggagtccttcacaggcagatattaacaaaattgtccaaattctaccatgggaacagaatgagcaagtgaagaactttgtggcttcccatattgccaatatcttgaactcagaagaattggatatccaagatctgaaaaagttagtgaaagaagctctgaaagaatctcaacttccaactgtcatggacttcagaaaattctctcggaactatcaactctacaaatctgtttctcttccatcacttgacccagcctcagccaaaatagaagggaatcttatatttgatccaaataactaccttcctaaagaaagcatgctgaaaactaccctcactgcctttggatttgcttcagctgacctcatcgagattggcttggaaggaaaaggctttgagccaacattggaagctctttttgggaagcaaggatttttcccagacagtgtcaacaaagctttgtactgggttaatggtcaagttcctgatggtgtctctaaggtcttagtggaccactttggctataccaaagatgataaacatgagcaggatatggtaaatggaataatgctcagtgttgagaagctgattaaagatttgaaatccaaagaagtcccggaagccagagcctacctccgcatcttgggagaggagcttggttttgccagtctccatgacctccagctcctgggaaagctgcttctgatgggtgcccgcactctgcaggggatcccccagatgattggagaggtcatcaggaagggctcaaagaatgacttttttcttcactacatcttcatggagaatgcctttgaactccccactggagctggattacagttgcaaatatcttcatctggagtcattgctcccggagccaaggctggagtaaaactggaagtagccaacatgcaggctgaactggtggcaaaaccctccgtgtctgtggagtttgtgacaaatatgggcatcatcattccggacttcgctaggagtggggtccagatgaacaccaacttcttccacgagtcgggtctggaggctcatgttgccctaaaagctgggaagctgaagtttatcattccttccccaaagagaccagtcaagctgctcagtggaggcaacacattacatttggtctctaccaccaagcaagtctttcctggcctgaattactgcacctcaggcgcttactccaacgccagctccacagactccgcctcctactatccgctgaccggggacaccagattagagctggaactgaggcctacaggagagattgagcagtattctgtcagcgcaacctatgagctccagagagaggacagagccttggtggataccctgaagtttgtaactcaagcagaaggtgcgaagcagactgaggctaccatgacattcaaatataatcggcagagtatgaccttgtccagtgaagtccaaattccggattttgatgttgacctcggaacaatcctcagagttaatgatgaatctactgagggcaaaacgtcttacagactcaccctggacattcagaacaagaaaattactgaggtcgccctcatgggccacctaagttgtgacacaaaggaagaaagaaaaatcaagggtgttatttccataccccgtttgcaagcagaagccagaagtgagatcctcgcccactggtcgcctgccaaactgcttctccaaatggactcatctgctacagcttatggctccacagtttccaagagggtggcatggcattatgatgaagagaagattgaatttgaatggaacacaggcaccaatgtagataccaaaaaaatgacttccaatttccctgtggatctctccgattatcctaagagcttgcatatgtatgctaatagactcctggatcacagagtccctcaaacagacatgactttccggcacgtgggttccaaattaatagttgcaatgagctcatggcttcagaaggcatctgggagtcttccttatacccagactttgcaagaccacctcaatagcctgaaggagttcaacctccagaacatgggattgccagacttccacatcccagaaaacctcttcttaaaaagcgatggccgggtcaaatataccttgaacaagaacagtttgaaaattgagattcctttgccttttggtggcaaatcctccagagatctaaagatgttagagactgttaggacaccagccctccacttcaagtctgtgggattccatctgccatctcgagagttccaagtccctacttttaccattcccaagttgtatcaactgcaagtgcctctcctgggtgttctagacctctccacgaatgtctacagcaacttgtacaactggtccgcctcctacagtggtggcaacaccagcacagaccatttcagccttcgggctcgttaccacatgaaggctgactctgtggttgacctgctttcctacaatgtgcaaggatctggagaaacaacatatgaccacaagaatacgttcacactatcatgtgatgggtctctacgccacaaatttctagattcgaatatcaaattcagtcatgtagaaaaacttggaaacaacccagtctcaaaaggtttactaatattcgatgcatctagttcctggggaccacagatgtctgcttcagttcatttggactccaaaaagaaacagcatttgtttgtcaaagaagtcaagattgatgggcagttcagagtctcttcgttctatgctaaaggcacatatggcctgtcttgtcagagggatcctaacactggccggctcaatggagagtccaacctgaggtttaactcctcctacctccaaggcaccaaccagataacaggaagatatgaagatggaaccctctccctcacctccacctctgatctgcaaagtggcatcattaaaaatactgcttccctaaagtatgagaactacgagctgactttaaaatctgacaccaatgggaagtataagaactttgccacttctaacaagatggatatgaccttctctaagcaaaatgcactgctgcgttctgaatatcaggctgattacgagtcattgaggttcttcagcctgctttctggatcactaaattcccatggtcttgagttaaatgctgacatcttaggcactgacaaaattaatagtggtgctcacaaggcgacactaaggattggccaagatggaatatctaccagtgcaacgaccaacttgaagtgtagtctcctggtgctggagaatgagctgaatgcagagcttggcctctctggggcatctatgaaattaacaacaaatggccgcttcagggaacacaatgcaaaattcagtctggatgggaaagccgccctcacagagctatcactgggaagtgcttatcaggccatgattctgggtgtcgacagcaaaaacattttcaacttcaaggtcagtcaagaaggacttaagctctcaaatgacatgatgggctcatatgctgaaatgaaatttgaccacacaaacagtctgaacattgcaggcttatcactggacttctcttcaaaacttgacaacatttacagctctgacaagttttataagcaaactgttaatttacagctacagccctattctctggtaactactttaaacagtgacctgaaatacaatgctctggatctcaccaacaatgggaaactacggctagaacccctgaagctgcatgtggctggtaacctaaaaggagcctaccaaaataatgaaataaaacacatctatgccatctcttctgctgccttatcagcaagctataaagcagacactgttgctaaggttcagggtgtggagtttagccatcggctcaacacagacatcgctgggctggcttcagccattgacatgagcacaaactataattcagactcactgcatttcagcaatgtcttccgttctgtaatggccccgtttaccatgaccatcgatgcacatacaaatggcaatgggaaactcgctctctggggagaacatactgggcagctgtatagcaaattcctgttgaaagcagaacctctggcatttactttctctcatgattacaaaggctccacaagtcatcatctcgtgtctaggaaaagcatcagtgcagctcttgaacacaaagtcagtgccctgcttactccagctgagcagacaggcacctggaaactcaagacccaatttaacaacaatgaatacagccaggacttggatgcttacaacactaaagataaaattggcgtggagcttactggacgaactctggctgacctaactctactagactccccaattaaagtgccacttttactcagtgagcccatcaatatcattgatgctttagagatgagagatgccgttgagaagccccaagaatttacaattgttgcttttgtaaagtatgataaaaaccaagatgttcactccattaacctcccattttttgagaccttgcaagaatattttgagaggaatcgacaaaccattatagttgtactggaaaacgtacagagaaacctgaagcacatcaatattgatcaatttgtaagaaaatacagagcagccctgggaaaactcccacagcaagctaatgattatctgaattcattcaattgggagagacaagtttcacatgccaaggagaaactgactgctctcacaaaaaagtatagaattacagaaaatgatatacaaattgcattagatgatgccaaaatcaactttaatgaaaaactatctcaactgcagacatatatgatacaatttgatcagtatattaaagatagttatgatttacatgatttgaaaatagctattgctaatattattgatgaaatcattgaaaaattaaaaagtcttgatgagcactatcatatccgtgtaaatttagtaaaaacaatccatgatctacatttgtttattgaaaatattgattttaacaaaagtggaagtagtactgcatcctggattcaaaatgtggatactaagtaccaaatcagaatccagatacaagaaaaactgcagcagcttaagagacacatacagaatatagacatccagcacctagctggaaagttaaaacaacacattgaggctattgatgttagagtgcttttagatcaattgggaactacaatttcatttgaaagaataaatgatgttcttgagcatgtcaaacactttgttataaatcttattggggattttgaagtagctgagaaaatcaatgccttcagagccaaagtccatgagttaatcgagaggtatgaagtagaccaacaaatccaggttttaatggataaattagtagagttggcccaccaatacaagttgaaggagactattcagaagctaagcaatgtcctacaacaagttaagataaaagattactttgagaaattggttggatttattgatgatgctgtcaagaagcttaatgaattatcttttaaaacattcattgaagatgttaacaaattccttgacatgttgataaagaaattaaagtcatttgattaccaccagtttgtagatgaaaccaatgacaaaatccgtgaggtgactcagagactcaatggtgaaattcaggctctggaactaccacaaaaagctgaagcattaaaactgtttttagaggaaaccaaggccacagttgcagtgtatctggaaagcctacaggacaccaaaataaccttaatcatcaattggttacaggaggctttaagttcagcatctttggctcacatgaaggccaaattccgagagactctagaagatacacgagaccgaatgtatcaaatggacattcagcaggaacttcaacgatacctgtctctggtaggccaggtttatagcacacttgtcacctacatttctgattggtggactcttgctgctaagaaccttactgactttgcagagcaatattctatccaagattgggctaaacgtatgaaagcattggtagagcaagggttcactgttcctgaaatcaagaccatccttgggaccatgcctgcctttgaagtcagtcttcaggctcttcagaaagctaccttccagacacctgattttatagtccccctaacagatttgaggattccatcagttcagataaacttcaaagacttaaaaaatataaaaatcccatccaggttttccacaccagaatttaccatccttaacaccttccacattccttcctttacaattgactttgtagaaatgaaagtaaagatcatcagaaccattgaccagatgctgaacagtgagctgcagtggcccgttccagatatatatctcagggatctgaaggtggaggacattcctctagcgagaatcaccctgccagacttccgtttaccagaaatcgcaattccagaattccagcttccccacatctcacacacaattgaagtacctacttttggcaagctatacagtattctgaaaatccaatctcctcttttcacattagatgcaaatgctgacatagggaatggaaccacctcagcaaacgaagcaggtatcgcagcttccatcactgccaaaggagagtccaaattagaagttctcaattttgattttcaagcaaatgcacaactctcaaaccctaagattaatccgctggctctgaaggagtcagtgaagttctccagcaagtacctgagaacggagcatgggagtgaaatgctgttttttggaaatgctattgagggaaaatcaaacacagtggcaagtttacacacagaaaaaaatacactggagcttagtaatggagtgattgtcaagataaacaatcagcttaccctggatagcaacactaaatacttccacaaattgaacatccccaaactggacttctctagtcaggctgacctgcgcaacgagatcaagacactgttgaaagctggccacatagcatggacttcttctggaaaagggtcatggaaatgggcctgccccagattctcagatgagggaacacatgaatcacaaattagtttcaccatagaaggacccctcacttcctttggactgtccaataagatcaatagcaaacacctaagagtaaaccaaaacttggtttatgaatctggctccctcaacttttctaaacttgaaattcaatcacaagtcgattcccagcatgtgggccacagtgttctaactgctaaaggcatggcactgtttggagaagggaaggcagagtttactgggaggcatgatgctcatttaaatggaaaggttattggaactttgaaaaattctcttttcttttcagcccagccatttgagatcacggcatccacaaacaatgaagggaatttgaaagttcgttttccattaaggttaacagggaagatagacttcctgaataactatgcactgtttctgagtcccagtgcccagcaagcaagttggcaagtaagtgctaggttcaatcagtataagtacaaccaaaatttctctgctggaaacaacgagaacattatggaggcccatgtaggaataaatggagaagcaaatctggatttcttaaacattcctttaacaattcctgaaatgcgtctaccttacacaataatcacaactcctccactgaaagatttctctctatgggaaaaaacaggcttgaaggaattcttgaaaacgacaaagcaatcatttgatttaagtgtaaaagctcagtataagaaaaacaaacacaggcattccatcacaaatcctttggctgtgctttgtgagtttatcagtcagagcatcaaatcctttgacaggcattttgaaaaaaacagaaacaatgcattagattttgtcaccaaatcctataatgaaacaaaaattaagtttgataagtacaaagctgaaaaatctcacgacgagctccccaggacctttcaaattcctggatacactgttccagttgtcaatgttgaagtgtctccattcaccatagagatgtcggcattcggctatgtgttcccaaaagcagtcagcatgcctagtttctccatcctaggttctgacgtccgtgtgccttcatacacattaatcctgccatcattagagctgccagtccttcatgtccctagaaatctcaagctttctcttccacatttcaaggaattgtgtaccataagccatatttttattcctgccatgggcaatattacctatgatttctcctttaaatcaagtgtcatcacactgaataccaatgctgaactttttaaccagtcagatattgttgctcatctcctttcttcatcttcatctgtcattgatgcactgcagtacaaattagagggcaccacaagattgacaagaaaaaggggattgaagttagccacagctctgtctctgagcaacaaatttgtggagggtagtcataacagtactgtgagcttaaccacgaaaaatatggaagtgtcagtggcaaaaaccacaaaagccgaaattccaattttgagaatgaatttcaagcaagaacttaatggaaataccaagtcaaaacctactgtctcttcctccatggaatttaagtatgatttcaattcttcaatgctgtactctaccgctaaaggagcagttgaccacaagcttagcttggaaagcctcacctcttacttttccattgagtcatctaccaaaggagatgtcaagggttcggttctttctcgggaatattcaggaactattgctagtgaggccaacacttacttgaattccaagagcacacggtcttcagtgaagctgcagggcacttccaaaattgatgatatctggaaccttgaagtaaaagaaaattttgctggagaagccacactccaacgcatatattccctctgggagcacagtacgaaaaaccacttacagctagagggcctctttttcaccaacggagaacatacaagcaaagccaccctggaactctctccatggcaaatgtcagctcttgttcaggtccatgcaagtcagcccagttccttccatgatttccctgaccttggccaggaagtggccctgaatgctaacactaagaaccagaagatcagatggaaaaatgaagtccggattcattctgggtctttccagagccaggtcgagctttccaatgaccaagaaaaggcacaccttgacattgcaggatccttagaaggacacctaaggttcctcaaaaatatcatcctaccagtctatgacaagagcttatgggatttcctaaagctggatgtaaccaccagcattggtaggagacagcatcttcgtgtttcaactgcctttgtgtacaccaaaaaccccaatggctattcattctccatccctgtaaaagttttggctgataaattcattattcctgggctgaaactaaatgatctaaattcagttcttgtcatgcctacgttccatgtcccatttacagatcttcaggttccatcgtgcaaacttgacttcagagaaatacaaatctataagaagctgagaacttcatcatttgccctcaacctaccaacactccccgaggtaaaattccctgaagttgatgtgttaacaaaatattctcaaccagaagactccttgattcccttttttgagataaccgtgcctgaatctcagttaactgtgtcccagttcacgcttccaaaaagtgtttcagatggcattgctgctttggatctaaatgcagtagccaacaagatcgcagactttgagttgcccaccatcatcgtgcctgagcagaccattgagattccctccattaagttctctgtacctgctggaattgtcattccttcctttcaagcactgactgcacgctttgaggtagactctcccgtgtataatgccacttggagtgccagtttgaaaaacaaagcagattatgttgaaacagtcctggattccacatgcagctcaaccgtacagttcctagaatatgaactaaatgttttgggaacacacaaaatcgaagatggtacgttagcctctaagactaaaggaacatttgcacaccgtgacttcagtgcagaatatgaagaagatggcaaatatgaaggacttcaggaatgggaaggaaaagcgcacctcaatatcaaaagcccagcgttcaccgatctccatctgcgctaccagaaagacaagaaaggcatctccacctcagcagcctccccagccgtaggcaccgtgggcatggatatggatgaagatgacgacttttctaaatggaacttctactacagccctcagtcctctccagataaaaaactcaccatattcaaaactgagttgagggtccgggaatctgatgaggaaactcagatcaaagttaattgggaagaagaggcagcttctggcttgctaacctctctgaaagacaacgtgcccaaggccacaggggtcctttatgattatgtcaacaagtaccactgggaacacacagggctcaccctgagagaagtgtcttcaaagctgagaagaaatctgcagaacaatgctgagtgggtttatcaaggggccattaggcaaattgatgatatcgacgtgaggttccagaaagcagccagtggcaccactgggacctaccaagagtggaaggacaaggcccagaatctgtaccaggaactgttgactcaggaaggccaagccagtttccagggactcaaggataacgtgtttgatggcttggtacgagttactcaagaattccatatgaaagtcaagcatctgattgactcactcattgattttctgaacttccccagattccagtttccggggaaacctgggatatacactagggaggaactttgcactatgttcataagggaggtagggacggtactgtcccaggtatattcgaaagtccataatggttcagaaatactgttttcctatttccaagacctagtgattacacttcctttcgagttaaggaaacataaactaatagatgtaatctcgatgtatagggaactgttgaaagatttatcaaaagaagcccaagaggtatttaaagccattcagtctctcaagaccacagaggtgctacgtaatcttcaggaccttttacaattcattttccaactaatagaagataacattaaacagctgaaagagatgaaatttacttatcttattaattatatccaagatgagatcaacacaatcttcagtgattatatcccatatgtttttaaattgttgaaagaaaacctatgccttaatcttcataagttcaatgaatttattcaaaacgagcttcaggaagcttctcaagagttacagcagatccatcaatacattatggcccttcgtgaagaatattttgatccaagtatagttggctggacagtgaaatattatgaacttgaagaaaagatagtcagtctgatcaagaacctgttagttgctcttaaggacttccattctgaatatattgtcagtgcctctaactttacttcccaactctcaagtcaagttgagcaatttctgcacagaaatattcaggaatatcttagcatccttaccgatccagatggaaaagggaaagagaagattgcagagctttctgccactgctcaggaaataattaaaagccaggccattgcgacgaagaaaataatttctgattaccaccagcagtttagatataaactgcaagatttttcagaccaactctctgattactatgaaaaatttattgctgaatccaaaagattgattgacctgtccattcaaaactaccacacatttctgatatacatcacggagttactgaaaaagctgcaatcaaccacagtcatgaacccctacatgaagcttgctccaggagaacttactatcatcctctaattttttaaaagaaatcttcatttattcttcttttccaattgaactttcacatagcacagaaaaaattcaaactgcctatattgataaaaccatacagtgagccagccttgcagtaggcagtagactataagcagaagcacatatgaactggacctgcaccaaagctggcaccagggctcggaaggtctctgaactcagaaggatggcattttttgcaagttaaagaaaatcaggatctgagttattttgctaaacttgggggaggaggaacaaataaatggagtctttattgtgtatcataacac

SEQ ID NO: 438317 - DNA, 14075 bp, Homo sapiens
cattcccaccgggacctgcggggctgagtgcccttctcggttgctgccgctgaggagcccgcccagccagccagggccgcgaggccgaggccaggccgcagcccaggagccgccccaccgcagctggcgatggacccgccgaggcccgcgctgctggcgctgctggcgctgcctgcgctgctgctgctgctgctggcgggcgccagggccgaagaggaaatgctggaaaatgtcagcctggtctgtccaaaagatgcgacccgattcaagcacctccggaagtacacatacaactatgaggctgagagttccagtggagtccctgggactgctgattcaagaagtgccaccaggatcaactgcaaggttgagctggaggttccccagctctgcagcttcatcctgaagaccagccagtgcaccctgaaagaggtgtatggcttcaaccctgagggcaaagccttgctgaagaaaaccaagaactctgaggagtttgctgcagccatgtccaggtatgagctcaagctggccattccagaagggaagcaggttttcctttacccggagaaagatgaacctacttacatcctgaacatcaagaggggcatcatttctgccctcctggttcccccagagacagaagaagccaagcaagtgttgtttctggataccgtgtatggaaactgctccactcactttaccgtcaagacgaggaagggcaatgtggcaacagaaatatccactgaaagagacctggggcagtgtgatcgcttcaagcccatccgcacaggcatcagcccacttgctctcatcaaaggcatgacccgccccttgtcaactctgatcagcagcagccagtcctgtcagtacacactggacgctaagaggaagcatgtggcagaagccatctgcaaggagcaacacctcttcctgcctttctcctacaagaataagtatgggatggtagcacaagtgacacagactttgaaacttgaagacacaccaaagatcaacagccgcttctttggtgaaggtactaagaagatgggcctcgcatttgagagcaccaaatccacatcacctccaaagcaggccgaagctgttttgaagactctccaggaactgaaaaaactaaccatctctgagcaaaatatccagagagctaatctcttcaataagctggttactgagctgagaggcctcagtgatgaagcagtcacatctctcttgccacagctgattgaggtgtccagccccatcactttacaagccttggttcagtgtggacagcctcagtgctccactcacatcctccagtggctgaaacgtgtgcatgccaacccccttctgatagatgtggtcacctacctggtggccctgatccccgagccctcagcacagcagctgcgagagatcttcaacatggcgagggatcagcgcagccgagccaccttgtatgcgctgagccacgcggtcaacaactatcataagacaaaccctacagggacccaggagctgctggacattgctaattacctgatggaacagattcaagatgactgcactggggatgaagattacacctatttgattctgcgggtcattggaaatatgggccaaaccatggagcagttaactccagaactcaagtcttcaatcctgaaatgtgtccaaagtacaaagccatcactgatgatccagaaagctgccatccaggctctgcggaaaatggagcctaaagacaaggaccaggaggttcttcttcagactttccttgatgatgcttctccgggagataagcgactggctgcctatcttatgttgatgaggagtccttcacaggcagatattaacaaaattgtccaaattctaccatgggaacagaatgagcaagtgaagaactttgtggcttcccatattgccaatatcttgaactcagaagaattggatatccaagatctgaaaaagttagtgaaagaagctctgaaagaatctcaacttccaactgtcatggacttcagaaaattctctcggaactatcaactctacaaatctgtttctcttccatcacttgacccagcctcagccaaaatagaagggaatcttatatttgatccaaataactaccttcctaaagaaagcatgctgaaaactaccctcactgcctttggatttgcttcagctgacctcatcgagattggcttggaaggaaaaggctttgagccaacattggaagctctttttgggaagcaaggatttttcccagacagtgtcaacaaagctttgtactgggttaatggtcaagttcctgatggtgtctctaaggtcttagtggaccactttggctataccaaagatgataaacatgagcaggatatggtaaatggaataatgctcagtgttgagaagctgattaaagatttgaaatccaaagaagtcccggaagccagagcctacctccgcatcttgggagaggagcttggttttgccagtctccatgacctccagctcctgggaaagctgcttctgatgggtgcccgcactctgcaggggatcccccagatgattggagaggtcatcaggaagggctcaaagaatgacttttttcttcactacatcttcatggagaatgcctttgaactccccactggagctggattacagttgcaaatatcttcatctggagtcattgctcccggagccaaggctggagtaaaactggaagtagccaacatgcaggctgaactggtggcaaaaccctccgtgtctgtggagtttgtgacaaatatgggcatcatcattccggacttcgctaggagtggggtccagatgaacaccaacttcttccacgagtcgggtctggaggctcatgttgccctaaaagctgggaagctgaagtttatcattccttccccaaagagaccagtcaagctgctcagtggaggcaacacattacatttggtctctaccaccaaaacggaggtgatcccacctctcattgagaacaggcagtcctggtcagtttgcaagcaagtctttcctggcctgaattactgcacctcaggcgcttactccaacgccagctccacagactccgcctcctactatccgctgaccggggacaccagattagagctggaactgaggcctacaggagagattgagcagtattctgtcagcgcaacctatgagctccagagagaggacagagccttggtggataccctgaagtttgtaactcaagcagaaggtgcgaagcagactgaggctaccatgacattcaaatataatcggcagagtatgaccttgtccagtgaagtccaaattccggattttgatgttgacctcggaacaatcctcagagttaatgatgaatctactgagggcaaaacgtcttacagactcaccctggacattcagaacaagaaaattactgaggtcgccctcatgggccacctaagttgtgacacaaaggaagaaagaaaaatcaagggtgttatttccataccccgtttgcaagcagaagccagaagtgagatcctcgcccactggtcgcctgccaaactgcttctccaaatggactcatctgctacagcttatggctccacagtttccaagagggtggcatggcattatgatgaagagaagattgaatttgaatggaacacaggcaccaatgtagataccaaaaaaatgacttccaatttccctgtggatctctccgattatcctaagagcttgcatatgtatgctaatagactcctggatcacagagtccctcaaacagacatgactttccggcacgtgggttccaaattaatagttgcaatgagctcatggcttcagaaggcatctgggagtcttccttatacccagactttgcaagaccacctcaatagcctgaaggagttcaacctccagaacatgggattgccagacttccacatcccagaaaacctcttcttaaaaagcgatggccgggtcaaatataccttgaacaagaacagtttgaaaattgagattcctttgccttttggtggcaaatcctccagagatctaaagatgttagagactgttaggacaccagccctccacttcaagtctgtgggattccatctgccatctcgagagttccaagtccctacttttaccattcccaagttgtatcaactgcaagtgcctctcctgggtgttctagacctctccacgaatgtctacagcaacttgtacaactggtccgcctcctacagtggtggcaacaccagcacagaccatttcagccttcgggctcgttaccacatgaaggctgactctgtggttgacctgctttcctacaatgtgcaaggatctggagaaacaacatatgaccacaagaatacgttcacactatcatgtgatgggtctctacgccacaaatttctagattcgaatatcaaattcagtcatgtagaaaaacttggaaacaacccagtctcaaaaggtttactaatattcgatgcatctagttcctggggaccacagatgtctgcttcagttcatttggactccaaaaagaaacagcatttgtttgtcaaagaagtcaagattgatgggcagttcagagtctcttcgttctatgctaaaggcacatatggcctgtcttgtcagagggatcctaacactggccggctcaatggagagtccaacctgaggtttaactcctcctacctccaaggcaccaaccagataacaggaagatatgaagatggaaccctctccctcacctccacctctgatctgcaaagtggcatcattaaaaatactgcttccctaaagtatgagaactacgagctgactttaaaatctgacaccaatgggaagtataagaactttgccacttctaacaagatggatatgaccttctctaagcaaaatgcactgctgcgttctgaatatcaggctgattacgagtcattgaggttcttcagcctgctttctggatcactaaattcccatggtcttgagttaaatgctgacatcttaggcactgacaaaattaatagtggtgctcacaaggcgacactaaggattggccaagatggaatatctaccagtgcaacgaccaacttgaagtgtagtctcctggtgctggagaatgagctgaatgcagagcttggcctctctggggcatctatgaaattaacaacaaatggccgcttcagggaacacaatgcaaaattcagtctggatgggaaagccgccctcacagagctatcactgggaagtgcttatcaggccatgattctgggtgtcgacagcaaaaacattttcaacttcaaggtcagtcaagaaggacttaagctctcaaatgacatgatgggctcatatgctgaaatgaaatttgaccacacaaacagtctgaacattgcaggcttatcactggacttctcttcaaaacttgacaacatttacagctctgacaagttttataagcaaactgttaatttacagctacagccctattctctggtaactactttaaacagtgacctgaaatacaatgctctggatctcaccaacaatgggaaactacggctagaacccctgaagctgcatgtggctggtaacctaaaaggagcctaccaaaataatgaaataaaacacatctatgccatctcttctgctgccttatcagcaagctataaagcagacactgttgctaaggttcagggtgtggagtttagccatcggctcaacacagacatcgctgggctggcttcagccattgacatgagcacaaactataattcagactcactgcatttcagcaatgtcttccgttctgtaatggccccgtttaccatgaccatcgatgcacatacaaatggcaatgggaaactcgctctctggggagaacatactgggcagctgtatagcaaattcctgttgaaagcagaacctctggcatttactttctctcatgattacaaaggctccacaagtcatcatctcgtgtctaggaaaagcatcagtgcagctcttgaacacaaagtcagtgccctgcttactccagctgagcagacaggcacctggaaactcaagacccaatttaacaacaatgaatacagccaggacttggatgcttacaacactaaagataaaattggcgtggagcttactggacgaactctggctgacctaactctactagactccccaattaaagtgccacttttactcagtgagcccatcaatatcattgatgctttagagatgagagatgccgttgagaagccccaagaatttacaattgttgcttttgtaaagtatgataaaaaccaagatgttcactccattaacctcccattttttgagaccttgcaagaatattttgagaggaatcgacaaaccattatagttgtactggaaaacgtacagagaaacctgaagcacatcaatattgatcaatttgtaagaaaatacagagcagccctgggaaaactcccacagcaagctaatgattatctgaattcattcaattgggagagacaagtttcacatgccaaggagaaactgactgctctcacaaaaaagtatagaattacagaaaatgatatacaaattgcattagatgatgccaaaatcaactttaatgaaaaactatctcaactgcagacatatatgatacaatttgatcagtatattaaagatagttatgatttacatgatttgaaaatagctattgctaatattattgatgaaatcattgaaaaattaaaaagtcttgatgagcactatcatatccgtgtaaatttagtaaaaacaatccatgatctacatttgtttattgaaaatattgattttaacaaaagtggaagtagtactgcatcctggattcaaaatgtggatactaagtaccaaatcagaatccagatacaagaaaaactgcagcagcttaagagacacatacagaatatagacatccagcacctagctggaaagttaaaacaacacattgaggctattgatgttagagtgcttttagatcaattgggaactacaatttcatttgaaagaataaatgatgttcttgagcatgtcaaacactttgttataaatcttattggggattttgaagtagctgagaaaatcaatgccttcagagccaaagtccatgagttaatcgagaggtatgaagtagaccaacaaatccaggttttaatggataaattagtagagttggcccaccaatacaagttgaaggagactattcagaagctaagcaatgtcctacaacaagttaagataaaagattactttgagaaattggttggatttattgatgatgctgtcaagaagcttaatgaattatcttttaaaacattcattgaagatgttaacaaattccttgacatgttgataaagaaattaaagtcatttgattaccaccagtttgtagatgaaaccaatgacaaaatccgtgaggtgactcagagactcaatggtgaaattcaggctctggaactaccacaaaaagctgaagcattaaaactgtttttagaggaaaccaaggccacagttgcagtgtatctggaaagcctacaggacaccaaaataaccttaatcatcaattggttacaggaggctttaagttcagcatctttggctcacatgaaggccaaattccgagagactctagaagatacacgagaccgaatgtatcaaatggacattcagcaggaacttcaacgatacctgtctctggtaggccaggtttatagcacacttgtcacctacatttctgattggtggactcttgctgctaagaaccttactgactttgcagagcaatattctatccaagattgggctaaacgtatgaaagcattggtagagcaagggttcactgttcctgaaatcaagaccatccttgggaccatgcctgcctttgaagtcagtcttcaggctcttcagaaagctaccttccagacacctgattttatagtccccctaacagatttgaggattccatcagttcagataaacttcaaagacttaaaaaatataaaaatcccatccaggttttccacaccagaatttaccatccttaacaccttccacattccttcctttacaattgactttgtagaaatgaaagtaaagatcatcagaaccattgaccagatgctgaacagtgagctgcagtggcccgttccagatatatatctcagggatctgaaggtggaggacattcctctagcgagaatcaccctgccagacttccgtttaccagaaatcgcaattccagaattcataatcccaactctcaaccttaatgattttcaagttcctgaccttcacataccagaattccagcttccccacatctcacacacaattgaagtacctacttttggcaagctatacagtattctgaaaatccaatctcctcttttcacattagatgcaaatgctgacatagggaatggaaccacctcagcaaacgaagcaggtatcgcagcttccatcactgccaaaggagagtccaaattagaagttctcaattttgattttcaagcaaatgcacaactctcaaaccctaagattaatccgctggctctgaaggagtcagtgaagttctccagcaagtacctgagaacggagcatgggagtgaaatgctgttttttggaaatgctattgagggaaaatcaaacacagtggcaagtttacacacagaaaaaaatacactggagcttagtaatggagtgattgtcaagataaacaatcagcttaccctggatagcaacactaaatacttccacaaattgaacatccccaaactggacttctctagtcaggctgacctgcgcaacgagatcaagacactgttgaaagctggccacatagcatggacttcttctggaaaagggtcatggaaatgggcctgccccagattctcagatgagggaacacatgaatcacaaattagtttcaccatagaaggacccctcacttcctttggactgtccaataagatcaatagcaaacacctaagagtaaaccaaaacttggtttatgaatctggctccctcaacttttctaaacttgaaattcaatcacaagtcgattcccagcatgtgggccacagtgttctaactgctaaaggcatggcactgtttggagaagggaaggcagagtttactgggaggcatgatgctcatttaaatggaaaggttattggaactttgaaaaattctcttttcttttcagcccagccatttgagatcacggcatccacaaacaatgaagggaatttgaaagttcgttttccattaaggttaacagggaagatagacttcctgaataactatgcactgtttctgagtcccagtgcccagcaagcaagttggcaagtaagtgctaggttcaatcagtataagtacaaccaaaatttctctgctggaaacaacgagaacattatggaggcccatgtaggaataaatggagaagcaaatctggatttcttaaacattcctttaacaattcctgaaatgcgtctaccttacacaataatcacaactcctccactgaaagatttctctctatgggaaaaaacaggcttgaaggaattcttgaaaacgacaaagcaatcatttgatttaagtgtaaaagctcagtataagaaaaacaaacacaggcattccatcacaaatcctttggctgtgctttgtgagtttatcagtcagagcatcaaatcctttgacaggcattttgaaaaaaacagaaacaatgcattagattttgtcaccaaatcctataatgaaacaaaaattaagtttgataagtacaaagctgaaaaatctcacgacgagctccccaggacctttcaaattcctggatacactgttccagttgtcaatgttgaagtgtctccattcaccatagagatgtcggcattcggctatgtgttcccaaaagcagtcagcatgcctagtttctccatcctaggttctgacgtccgtgtgccttcatacacattaatcctgccatcattagagctgccagtccttcatgtccctagaaatctcaagctttctcttccacatttcaaggaattgtgtaccataagccatatttttattcctgccatgggcaatattacctatgatttctcctttaaatcaagtgtcatcacactgaataccaatgctgaactttttaaccagtcagatattgttgctcatctcctttcttcatcttcatctgtcattgatgcactgcagtacaaattagagggcaccacaagattgacaagaaaaaggggattgaagttagccacagctctgtctctgagcaacaaatttgtggagggtagtcataacagtactgtgagcttaaccacgaaaaatatggaagtgtcagtggcaaaaaccacaaaagccgaaattccaattttgagaatgaatttcaagcaagaacttaatggaaataccaagtcaaaacctactgtctcttcctccatggaatttaagtatgatttcaattcttcaatgctgtactctaccgctaaaggagcagttgaccacaagcttagcttggaaagcctcacctcttacttttccattgagtcatctaccaaaggagatgtcaagggttcggttctttctcgggaatattcaggaactattgctagtgaggccaacacttacttgaattccaagagcacacggtcttcagtgaagctgcagggcacttccaaaattgatgatatctggaaccttgaagtaaaagaaaattttgctggagaagccacactccaacgcatatattccctctgggagcacagtacgaaaaaccacttacagctagagggcctctttttcaccaacggagaacatacaagcaaagccaccctggaactctctccatggcaaatgtcagctcttgttcaggtccatgcaagtcagcccagttccttccatgatttccctgaccttggccaggaagtggccctgaatgctaacactaagaaccagaagatcagatggaaaaatgaagtccggattcattctgggtctttccagagccaggtcgagctttccaatgaccaagaaaaggcacaccttgacattgcaggatccttagaaggacacctaaggttcctcaaaaatatcatcctaccagtctatgacaagagcttatgggatttcctaaagctggatgtaaccaccagcattggtaggagacagcatcttcgtgtttcaactgcctttgtgtacaccaaaaaccccaatggctattcattctccatccctgtaaaagttttggctgataaattcattattcctgggctgaaactaaatgatctaaattcagttcttgtcatgcctacgttccatgtcccatttacagatcttcaggttccatcgtgcaaacttgacttcagagaaatacaaatctataagaagctgagaacttcatcatttgccctcaacctaccaacactccccgaggtaaaattccctgaagttgatgtgttaacaaaatattctcaaccagaagactccttgattcccttttttgagataaccgtgcctgaatctcagttaactgtgtcccagttcacgcttccaaaaagtgtttcagatggcattgctgctttggatctaaatgcagtagccaacaagatcgcagactttgagttgcccaccatcatcgtgcctgagcagaccattgagattccctccattaagttctctgtacctgctggaattgtcattccttcctttcaagcactgactgcacgctttgaggtagactctcccgtgtataatgccacttggagtgccagtttgaaaaacaaagcagattatgttgaaacagtcctggattccacatgcagctcaaccgtacagttcctagaatatgaactaaatggaacatttgcacaccgtgacttcagtgcagaatatgaagaagatggcaaatatgaaggacttcaggaatgggaaggaaaagcgcacctcaatatcaaaagcccagcgttcaccgatctccatctgcgctaccagaaagacaagaaaggcatctccacctcagcagcctccccagccgtaggcaccgtgggcatggatatggatgaagatgacgacttttctaaatggaacttctactacagccctcagtcctctccagataaaaaactcaccatattcaaaactgagttgagggtccgggaatctgatgaggaaactcagatcaaagttaattgggaagaagaggcagcttctggcttgctaacctctctgaaagacaacgtgcccaaggccacaggggtcctttatgattatgtcaacaagtaccactgggaacacacagggctcaccctgagagaagtgtcttcaaagctgagaagaaatctgcagaacaatgctgagtgggtttatcaaggggccattaggcaaattgatgatatcgacgtgaggttccagaaagcagccagtggcaccactgggacctaccaagagtggaaggacaaggcccagaatctgtaccaggaactgttgactcaggaaggccaagccagtttccagggactcaaggataacgtgtttgatggcttggtacgagttactcaagaattccatatgaaagtcaagcatctgattgactcactcattgattttctgaacttccccagattccagtttccggggaaacctgggatatacactagggaggaactttgcactatgttcataagggaggtagggacggtactgtcccaggtatattcgaaagtccataatggttcagaaatactgttttcctatttccaagacctagtgattacacttcctttcgagttaaggaaacataaactaatagatgtaatctcgatgtatagggaactgttgaaagatttatcaaaagaagcccaagaggtatttaaagccattcagtctctcaagaccacagaggtgctacgtaatcttcaggaccttttacaattcattttccaactaatagaagataacattaaacagctgaaagagatgaaatttacttatcttattaattatatccaagatgagatcaacacaatcttcagtgattatatcccatatgtttttaaattgttgaaagaaaacctatgccttaatcttcataagttcaatgaatttattcaaaacgagcttcaggaagcttctcaagagttacagcagatccatcaatacattatggcccttcgtgaagaatattttgatccaagtatagttggctggacagtgaaatattatgaacttgaagaaaagatagtcagtctgatcaagaacctgttagttgctcttaaggacttccattctgaatatattgtcagtgcctctaactttacttcccaactctcaagtcaagttgagcaatttctgcacagaaatattcaggaatatcttagcatccttaccgatccagatggaaaagggaaagagaagattgcagagctttctgccactgctcaggaaataattaaaagccaggccattgcgacgaagaaaataatttctgattaccaccagcagtttagatataaactgcaagatttttcagaccaactctctgattactatgaaaaatttattgctgaatccaaaagattgattgacctgtccattcaaaactaccacacatttctgatatacatcacggagttactgaaaaagctgcaatcaaccacagtcatgaacccctacatgaagcttgctccaggagaacttactatcatcctctaattttttaaaagaaatcttcatttattcttcttttccaattgaactttcacatagcacagaaaaaattcaaactgcctatattgataaaaccatacagtgagccagccttgcagtaggcagtagactataagcagaagcacatatgaactggacctgcaccaaagctggcaccagggctcggaaggtctctgaactcagaaggatggcattttttgcaagttaaagaaaatcaggatctgagttattttgctaaacttgggggaggaggaacaaataaatggagtctttattgtgtatcataacac

SEQ ID NO: 438318 - DNA, 14072 bp, Homo sapiens
cattcccaccgggacctgcggggctgagtgcccttctcggttgctgccgctgaggagcccgcccagccagccagggccgcgaggccgaggccaggccgcagcccaggagccgccccaccgcagctggcgatggacccgccgaggcccgcgctgctggcgctgctggcgctgcctgcgctgctgctgctgctgctggcgggcgccagggccgaagaggaaatgctggaaaatgtcagcctggtctgtccaaaagatgcgacccgattcaagcacctccggaagtacacatacaactatgaggctgagagttccagtggagtccctgggactgctgattcaagaagtgccaccaggatcaactgcaaggttgagctggaggttccccagctctgcagcttcatcctgaagaccagccagtgcaccctgaaagaggtgtatggcttcaaccctgagggcaaagccttgctgaagaaaaccaagaactctgaggagtttgctgcagccatgtccaggtatgagctcaagctggccattccagaagggaagcaggttttcctttacccggagaaagatgaacctacttacatcctgaacatcaagaggggcatcatttctgccctcctggttcccccagagacagaagaagccaagcaagtgttgtttctggataccgtgtatggaaactgctccactcactttaccgtcaagacgaggaagggcaatgtggcaacagaaatatccactgaaagagacctggggcagtgtgatcgcttcaagcccatccgcacaggcatcagcccacttgctctcatcaaaggcatgacccgccccttgtcaactctgatcagcagcagccagtcctgtcagtacacactggacgctaagaggaagcatgtggcagaagccatctgcaaggagcaacacctcttcctgcctttctcctacaagaataagtatgggatggtagcacaagtgacacagactttgaaacttgaagacacaccaaagatcaacagccgcttctttggtgaaggtactaagaagatgggcctcgcatttgagagcaccaaatccacatcacctccaaagcaggccgaagctgttttgaagactctccaggaactgaaaaaactaaccatctctgagcaaaatatccagagagctaatctcttcaataagctggttactgagctgagaggcctcagtgatgaagcagtcacatctctcttgccacagctgattgaggtgtccagccccatcactttacaagccttggttcagtgtggacagcctcagtgctccactcacatcctccagtggctgaaacgtgtgcatgccaacccccttctgatagatgtggtcacctacctggtggccctgatccccgagccctcagcacagcagctgcgagagatcttcaacatggcgagggatcagcgcagccgagccaccttgtatgcgctgagccacgcggtcaacaactatcataagacaaaccctacagggacccaggagctgctggacattgctaattacctgatggaacagattcaagatgactgcactggggatgaagattacacctatttgattctgcgggtcattggaaatatgggccaaaccatggagcagttaactccagaactcaagtcttcaatcctgaaatgtgtccaaagtacaaagccatcactgatgatccagaaagctgccatccaggctctgcggaaaatggagcctaaagacaaggaccaggaggttcttcttcagactttccttgatgatgcttctccgggagataagcgactggctgcctatcttatgttgatgaggagtccttcacaggcagatattaacaaaattgtccaaattctaccatgggaacagaatgagcaagtgaagaactttgtggcttcccatattgccaatatcttgaactcagaagaattggatatccaagatctgaaaaagttagtgaaagaagctctgaaagaatctcaacttccaactgtcatggacttcagaaaattctctcggaactatcaactctacaaatctgtttctcttccatcacttgacccagcctcagccaaaatagaagggaatcttatatttgatccaaataactaccttcctaaagaaagcatgctgaaaactaccctcactgcctttggatttgcttcagctgacctcatcgagattggcttggaaggaaaaggctttgagccaacattggaagctctttttgggaagcaaggatttttcccagacagtgtcaacaaagctttgtactgggttaatggtcaagttcctgatggtgtctctaaggtcttagtggaccactttggctataccaaagatgataaacatgagcaggatatggtaaatggaataatgctcagtgttgagaagctgattaaagatttgaaatccaaagaagtcccggaagccagagcctacctccgcatcttgggagaggagcttggttttgccagtctccatgacctccagctcctgggaaagctgcttctgatgggtgcccgcactctgcaggggatcccccagatgattggagaggtcatcaggaagggctcaaagaatgacttttttcttcactacatcttcatggagaatgcctttgaactccccactggagctggattacagttgcaaatatcttcatctggagtcattgctcccggagccaaggctggagtaaaactggaagtagccaacatgcaggctgaactggtggcaaaaccctccgtgtctgtggagtttgtgacaaatatgggcatcatcattccggacttcgctaggagtggggtccagatgaacaccaacttcttccacgagtcgggtctggaggctcatgttgccctaaaagctgggaagctgaagtttatcattccttccccaaagagaccagtcaagctgctcagtggaggcaacacattacatttggtctctaccaccaaaacggaggtgatcccacctctcattgagaacaggcagtcctggtcagtttgcaagcaagtctttcctggcctgaattactgcacctcaggcgcttactccaacgccagctccacagactccgcctcctactatccgctgaccggggacaccagattagagctggaactgaggcctacaggagagattgagcagtattctgtcagcgcaacctatgagctccagagagaggacagagccttggtggataccctgaagtttgtaactcaagcagaaggtgcgaagcagactgaggctaccatgacattcaaatataatcggcagagtatgaccttgtccagtgaagtccaaattccggattttgatgttgacctcggaacaatcctcagagttaatgatgaatctactgagggcaaaacgtcttacagactcaccctggacattcagaacaagaaaattactgaggtcgccctcatgggccacctaagttgtgacacaaaggaagaaagaaaaatcaagggtgttatttccataccccgtttgcaagcagaagccagaagtgagatcctcgcccactggtcgcctgccaaactgcttctccaaatggactcatctgctacagcttatggctccacagtttccaagagggtggcatggcattatgatgaagagaagattgaatttgaatggaacacaggcaccaatgtagataccaaaaaaatgacttccaatttccctgtggatctctccgattatcctaagagcttgcatatgtatgctaatagactcctggatcacagagtccctcaaacagacatgactttccggcacgtgggttccaaattaatagttgcaatgagctcatggcttcagaaggcatctgggagtcttccttatacccagactttgcaagaccacctcaatagcctgaaggagttcaacctccagaacatgggattgccagacttccacatcccagaaaacctcttcttaaaaagcgatggccgggtcaaatataccttgaacaagaacagtttgaaaattgagattcctttgccttttggtggcaaatcctccagagatctaaagatgttagagactgttaggacaccagccctccacttcaagtctgtgggattccatctgccatctcgagagttccaagtccctacttttaccattcccaagttgtatcaactgcaagtgcctctcctgggtgttctagacctctccacgaatgtctacagcaacttgtacaactggtccgcctcctacagtggtggcaacaccagcacagaccatttcagccttcgggctcgttaccacatgaaggctgactctgtggttgacctgctttcctacaatgtgcaaggatctggagaaacaacatatgaccacaagaatacgttcacactatcatgtgatgggtctctacgccacaaatttctagattcgaatatcaaattcagtcatgtagaaaaacttggaaacaacccagtctcaaaaggtttactaatattcgatgcatctagttcctggggaccacagatgtctgcttcagttcatttggactccaaaaagaaacagcatttgtttgtcaaagaagtcaagattgatgggcagttcagagtctcttcgttctatgctaaaggcacatatggcctgtcttgtcagagggatcctaacactggccggctcaatggagagtccaacctgaggtttaactcctcctacctccaaggcaccaaccagataacaggaagatatgaagatggaaccctctccctcacctccacctctgatctgcaaagtggcatcattaaaaatactgcttccctaaagtatgagaactacgagctgactttaaaatctgacaccaatgggaagtataagaactttgccacttctaacaagatggatatgaccttctctaagcaaaatgcactgctgcgttctgaatatcaggctgattacgagtcattgaggttcttcagcctgctttctggatcactaaattcccatggtcttgagttaaatgctgacatcttaggcactgacaaaattaatagtggtgctcacaaggcgacactaaggattggccaagatggaatatctaccagtgcaacgaccaacttgaagtgtagtctcctggtgctggagaatgagctgaatgcagagcttggcctctctggggcatctatgaaattaacaacaaatggccgcttcagggaacacaatgcaaaattcagtctggatgggaaagccgccctcacagagctatcactgggaagtgcttatcaggccatgattctgggtgtcgacagcaaaaacattttcaacttcaaggtcagtcaagaaggacttaagctctcaaatgacatgatgggctcatatgctgaaatgaaatttgaccacacaaacagtctgaacattgcaggcttatcactggacttctcttcaaaacttgacaacatttacagctctgacaagttttataagcaaactgttaatttacagctacagccctattctctggtaactactttaaacagtgacctgaaatacaatgctctggatctcaccaacaatgggaaactacggctagaacccctgaagctgcatgtggctggtaacctaaaaggagcctaccaaaataatgaaataaaacacatctatgccatctcttctgctgccttatcagcaagctataaagcagacactgttgctaaggttcagggtgtggagtttagccatcggctcaacacagacatcgctgggctggcttcagccattgacatgagcacaaactataattcagactcactgcatttcagcaatgtcttccgttctgtaatggccccgtttaccatgaccatcgatgcacatacaaatggcaatgggaaactcgctctctggggagaacatactgggcagctgtatagcaaattcctgttgaaagcagaacctctggcatttactttctctcatgattacaaaggctccacaagtcatcatctcgtgtctaggaaaagcatcagtgcagctcttgaacacaaagtcagtgccctgcttactccagctgagcagacaggcacctggaaactcaagacccaatttaacaacaatgaatacagccaggacttggatgcttacaacactaaagataaaattggcgtggagcttactggacgaactctggctgacctaactctactagactccccaattaaagtgccacttttactcagtgagcccatcaatatcattgatgctttagagatgagagatgccgttgagaagccccaagaatttacaattgttgcttttgtaaagtatgataaaaaccaagatgttcactccattaacctcccattttttgagaccttgcaagaatattttgagaggaatcgacaaaccattatagttgtactggaaaacgtacagagaaacctgaagcacatcaatattgatcaatttgtaagaaaatacagagcagccctgggaaaactcccacagcaagctaatgattatctgaattcattcaattgggagagacaagtttcacatgccaaggagaaactgactgctctcacaaaaaagtatagaattacagaaaatgatatacaaattgcattagatgatgccaaaatcaactttaatgaaaaactatctcaactgcagacatatatgatacaatttgatcagtatattaaagatagttatgatttacatgatttgaaaatagctattgctaatattattgatgaaatcattgaaaaattaaaaagtcttgatgagcactatcatatccgtgtaaatttagtaaaaacaatccatgatctacatttgtttattgaaaatattgattttaacaaaagtggaagtagtactgcatcctggattcaaaatgtggatactaagtaccaaatcagaatccagatacaagaaaaactgcagcagcttaagagacacatacagaatatagacatccagcacctagctggaaagttaaaacaacacattgaggctattgatgttagagtgcttttagatcaattgggaactacaatttcatttgaaagaataaatgatgttcttgagcatgtcaaacactttgttataaatcttattggggattttgaagtagctgagaaaatcaatgccttcagagccaaagtccatgagttaatcgagaggtatgaagtagaccaacaaatccaggttttaatggataaattagtagagttggcccaccaatacaagttgaaggagactattcagaagctaagcaatgtcctacaacaagttaagataaaagattactttgagaaattggttggatttattgatgatgctgtcaagaagcttaatgaattatcttttaaaacattcattgaagatgttaacaaattccttgacatgttgataaagaaattaaagtcatttgattaccaccagtttgtagatgaaaccaatgacaaaatccgtgaggtgactcagagactcaatggtgaaattcaggctctggaactaccacaaaaagctgaagcattaaaactgtttttagaggaaaccaaggccacagttgcagtgtatctggaaagcctacaggacaccaaaataaccttaatcatcaattggttacaggaggctttaagttcagcatctttggctcacatgaaggccaaattccgagagactctagaagatacacgagaccgaatgtatcaaatggacattcagcaggaacttcaacgatacctgtctctggtaggccaggtttatagcacacttgtcacctacatttctgattggtggactcttgctgctaagaaccttactgactttgcagagcaatattctatccaagattgggctaaacgtatgaaagcattggtagagcaagggttcactgttcctgaaatcaagaccatccttgggaccatgcctgcctttgaagtcagtcttcaggctcttcagaaagctaccttccagacacctgattttatagtccccctaacagatttgaggattccatcagttcagataaacttcaaagacttaaaaaatataaaaatcccatccaggttttccacaccagaatttaccatccttaacaccttccacattccttcctttacaattgactttgtagaaatgaaagtaaagatcatcagaaccattgaccagatgctgaacagtgagctgcagtggcccgttccagatatatatctcagggatctgaaggtggaggacattcctctagcgagaatcaccctgccagacttccgtttaccagaaatcgcaattccagaattcataatcccaactctcaaccttaatgattttcaagttcctgaccttcacataccagaattccagcttccccacatctcacacacaattgaagtacctacttttggcaagctatacagtattctgaaaatccaatctcctcttttcacattagatgcaaatgctgacatagggaatggaaccacctcagcaaacgaagcaggtatcgcagcttccatcactgccaaaggagagtccaaattagaagttctcaattttgattttcaagcaaatgcacaactctcaaaccctaagattaatccgctggctctgaaggagtcagtgaagttctccagcaagtacctgagaacggagcatgggagtgaaatgctgttttttggaaatgctattgagggaaaatcaaacacagtggcaagtttacacacagaaaaaaatacactggagcttagtaatggagtgattgtcaagataaacaatcagcttaccctggatagcaacactaaatacttccacaaattgaacatccccaaactggacttctctagtcaggctgacctgcgcaacgagatcaagacactgttgaaagctggccacatagcatggacttcttctggaaaagggtcatggaaatgggcctgccccagattctcagatgagggaacacatgaatcacaaattagtttcaccatagaaggacccctcacttcctttggactgtccaataagatcaatagcaaacacctaagagtaaaccaaaacttggtttatgaatctggctccctcaacttttctaaacttgaaattcaatcacaagtcgattcccagcatgtgggccacagtgttctaactgctaaaggcatggcactgtttggagaagggaaggcagagtttactgggaggcatgatgctcatttaaatggaaaggttattggaactttgaaaaattctcttttcttttcagcccagccatttgagatcacggcatccacaaacaatgaagggaatttgaaagttcgttttccattaaggttaacagggaagatagacttcctgaataactatgcactgtttctgagtcccagtgcccagcaagcaagttggcaagtaagtgctaggttcaatcagtataagtacaaccaaaatttctctgctggaaacaacgagaacattatggaggcccatgtaggaataaatggagaagcaaatctggatttcttaaacattcctttaacaattcctgaaatgcgtctaccttacacaataatcacaactcctccactgaaagatttctctctatgggaaaaaacaggcttgaaggaattcttgaaaacgacaaagcaatcatttgatttaagtgtaaaagctcagtataagaaaaacaaacacaggcattccatcacaaatcctttggctgtgctttgtgagtttatcagtcagagcatcaaatcctttgacaggcattttgaaaaaaacagaaacaatgcattagattttgtcaccaaatcctataatgaaacaaaaattaagtttgataagtacaaagctgaaaaatctcacgacgagctccccaggacctttcaaattcctggatacactgttccagttgtcaatgttgaagtgtctccattcaccatagagatgtcggcattcggctatgtgttcccaaaagcagtcagcatgcctagtttctccatcctaggttctgacgtccgtgtgccttcatacacattaatcctgccatcattagagctgccagtccttcatgtccctagaaatctcaagctttctcttccacatttcaaggaattgtgtaccataagccatatttttattcctgccatgggcaatattacctatgatttctcctttaaatcaagtgtcatcacactgaataccaatgctgaactttttaaccagtcagatattgttgctcatctcctttcttcatcttcatctgtcattgatgcactgcagtacaaattagagggcaccacaagattgacaagaaaaaggggattgaagttagccacagctctgtctctgagcaacaaatttgtggagggtagtcataacagtactgtgagcttaaccacgaaaaatatggaagtgtcagtggcaaaaaccacaaaagccgaaattccaattttgagaatgaatttcaagcaagaacttaatggaaataccaagtcaaaacctactgtctcttcctccatggaatttaagtatgatttcaattcttcaatgctgtactctaccgctaaaggagcagttgaccacaagcttagcttggaaagcctcacctcttacttttccattgagtcatctaccaaaggagatgtcaagggttcggttctttctcgggaatattcaggaactattgctagtgaggccaacacttacttgaattccaagagcacacggtcttcagtgaagctgcagggcacttccaaaattgatgatatctggaaccttgaagtaaaagaaaattttgctggagaagccacactccaacgcatatattccctctgggagcacagtacgaaaaaccacttacagctagagggcctctttttcaccaacggagaacatacaagcaaagccaccctggaactctctccatggcaaatgtcagctcttgttcaggtccatgcaagtcagcccagttccttccatgatttccctgaccttggccaggaagtggccctgaatgctaacactaagaaccagaagatcagatggaaaaatgaagtccggattcattctgggtctttccagagccaggtcgagctttccaatgaccaagaaaaggcacaccttgacattgcaggatccttagaaggacacctaaggttcctcaaaaatatcatcctaccagtctatgacaagagcttatgggatttcctaaagctggatgtaaccaccagcattggtaggagacagcatcttcgtgtttcaactgcctttgtgtacaccaaaaaccccaatggctattcattctccatccctgtaaaagttttggctgataaattcattattcctgggctgaaactaaatgatctaaattcagttcttgtcatgcctacgttccatgtcccatttacagatcttcaggttccatcgtgcaaacttgacttcagagaaatacaaatctataagaagctgagaacttcatcatttgccctcaacctaccaacactccccgaggtaaaattccctgaagttgatgtgttaacaaaatattctcaaccagaagactccttgattcccttttttgagataaccgtgcctgaatctcagttaactgtgtcccagttcacgcttccaaaaagtgtttcagatggcattgctgctttggatctaaatgcagtagccaacaagatcgcagactttgagttgcccaccatcatcgtgcctgagcagaccattgagattccctccattaagttctctgtacctgctggaattgtcattccttcctttcaagcactgactgcacgctttgaggtagactctcccgtgtataatgccacttggagtgccagtttgaaaaacaaagcagattatgttgaaacagtcctggattccacatgcagctcaaccgtacagttcctagaatatgaactaaatgttttgggaacacacaaaatcgaagatggtacgttagcctctaagactaaaggaacatttgcacaccgtgacttcagtgcagaatatgaagaagatggcaaatatgaaggacttcaggaatgggaaggaaaagcgcacctcaatatcaaaagcccagcgttcaccgatctccatctgcgctaccagaaagacaagaaaggcatctccacctcagcagcctccccagccgtaggcaccgtgggcatggatatggatgaagatgacgacttttctaaatggaacttctactacagccctcagtcctctccagataaaaaactcaccatattctgggaagaagaggcagcttctggcttgctaacctctctgaaagacaacgtgcccaaggccacaggggtcctttatgattatgtcaacaagtaccactgggaacacacagggctcaccctgagagaagtgtcttcaaagctgagaagaaatctgcagaacaatgctgagtgggtttatcaaggggccattaggcaaattgatgatatcgacgtgaggttccagaaagcagccagtggcaccactgggacctaccaagagtggaaggacaaggcccagaatctgtaccaggaactgttgactcaggaaggccaagccagtttccagggactcaaggataacgtgtttgatggcttggtacgagttactcaagaattccatatgaaagtcaagcatctgattgactcactcattgattttctgaacttccccagattccagtttccggggaaacctgggatatacactagggaggaactttgcactatgttcataagggaggtagggacggtactgtcccaggtatattcgaaagtccataatggttcagaaatactgttttcctatttccaagacctagtgattacacttcctttcgagttaaggaaacataaactaatagatgtaatctcgatgtatagggaactgttgaaagatttatcaaaagaagcccaagaggtatttaaagccattcagtctctcaagaccacagaggtgctacgtaatcttcaggaccttttacaattcattttccaactaatagaagataacattaaacagctgaaagagatgaaatttacttatcttattaattatatccaagatgagatcaacacaatcttcagtgattatatcccatatgtttttaaattgttgaaagaaaacctatgccttaatcttcataagttcaatgaatttattcaaaacgagcttcaggaagcttctcaagagttacagcagatccatcaatacattatggcccttcgtgaagaatattttgatccaagtatagttggctggacagtgaaatattatgaacttgaagaaaagatagtcagtctgatcaagaacctgttagttgctcttaaggacttccattctgaatatattgtcagtgcctctaactttacttcccaactctcaagtcaagttgagcaatttctgcacagaaatattcaggaatatcttagcatccttaccgatccagatggaaaagggaaagagaagattgcagagctttctgccactgctcaggaaataattaaaagccaggccattgcgacgaagaaaataatttctgattaccaccagcagtttagatataaactgcaagatttttcagaccaactctctgattactatgaaaaatttattgctgaatccaaaagattgattgacctgtccattcaaaactaccacacatttctgatatacatcacggagttactgaaaaagctgcaatcaaccacagtcatgaacccctacatgaagcttgctccaggagaacttactatcatcctctaattttttaaaagaaatcttcatttattcttcttttccaattgaactttcacatagcacagaaaaaattcaaactgcctatattgataaaaccatacagtgagccagccttgcagtaggcagtagactataagcagaagcacatatgaactggacctgcaccaaagctggcaccagggctcggaaggtctctgaactcagaaggatggcattttttgcaagttaaagaaaatcaggatctgagttattttgctaaacttgggggaggaggaacaaataaatggagtctttattgtgtatcataacac

SEQ ID NO: 438319 - DNA, 14072 bp, Homo sapiens
cattcccaccgggacctgcggggctgagtgcccttctcggttgctgccgctgaggagcccgcccagccagccagggccgcgaggccgaggccaggccgcagcccaggagccgccccaccgcagctggcgatggacccgccgaggcccgcgctgctggcgctgctggcgctgcctgcgctgctgctgctgctgctggcgggcgccagggccgaagaggaaatgctggaaaatgtcagcctggtctgtccaaaagatgcgacccgattcaagcacctccggaagtacacatacaactatgaggctgagagttccagtggagtccctgggactgctgattcaagaagtgccaccaggatcaactgcaaggttgagctggaggttccccagctctgcagcttcatcctgaagaccagccagtgcaccctgaaagaggtgtatggcttcaaccctgagggcaaagccttgctgaagaaaaccaagaactctgaggagtttgctgcagccatgtccaggtatgagctcaagctggccattccagaagggaagcaggttttcctttacccggagaaagatgaacctacttacatcctgaacatcaagaggggcatcatttctgccctcctggttcccccagagacagaagaagccaagcaagtgttgtttctggataccgtgtatggaaactgctccactcactttaccgtcaagacgaggaagggcaatgtggcaacagaaatatccactgaaagagacctggggcagtgtgatcgcttcaagcccatccgcacaggcatcagcccacttgctctcatcaaaggcatgacccgccccttgtcaactctgatcagcagcagccagtcctgtcagtacacactggacgctaagaggaagcatgtggcagaagccatctgcaaggagcaacacctcttcctgcctttctcctacaagaataagtatgggatggtagcacaagtgacacagactttgaaacttgaagacacaccaaagatcaacagccgcttctttggtgaaggtactaagaagatgggcctcgcatttgagagcaccaaatccacatcacctccaaagcaggccgaagctgttttgaagactctccaggaactgaaaaaactaaccatctctgagcaaaatatccagagagctaatctcttcaataagctggttactgagctgagaggcctcagtgatgaagcagtcacatctctcttgccacagctgattgaggtgtccagccccatcactttacaagccttggttcagtgtggacagcctcagtgctccactcacatcctccagtggctgaaacgtgtgcatgccaacccccttctgatagatgtggtcacctacctggtggccctgatccccgagccctcagcacagcagctgcgagagatcttcaacatggcgagggatcagcgcagccgagccaccttgtatgcgctgagccacgcggtcaacaactatcataagacaaaccctacagggacccaggagctgctggacattgctaattacctgatggaacagattcaagatgactgcactggggatgaagattacacctatttgattctgcgggtcattggaaatatgggccaaaccatggagcagttaactccagaactcaagtcttcaatcctgaaatgtgtccaaagtacaaagccatcactgatgatccagaaagctgccatccaggctctgcggaaaatggagcctaaagacaaggaccaggaggttcttcttcagactttccttgatgatgcttctccgggagataagcgactggctgcctatcttatgttgatgaggagtccttcacaggcagatattaacaaaattgtccaaattctaccatgggaacagaatgagcaagtgaagaactttgtggcttcccatattgccaatatcttgaactcagaagaattggatatccaagatctgaaaaagttagtgaaagaagctctgaaagaatctcaacttccaactgtcatggacttcagaaaattctctcggaactatcaactctacaaatctgtttctcttccatcacttgacccagcctcagccaaaatagaagggaatcttatatttgatccaaataactaccttcctaaagaaagcatgctgaaaactaccctcactgcctttggatttgcttcagctgacctcatcgagattggcttggaaggaaaaggctttgagccaacattggaagctctttttgggaagcaaggatttttcccagacagtgtcaacaaagctttgtactgggttaatggtcaagttcctgatggtgtctctaaggtcttagtggaccactttggctataccaaagatgataaacatgagcaggatatggtaaatggaataatgctcagtgttgagaagctgattaaagatttgaaatccaaagaagtcccggaagccagagcctacctccgcatcttgggagaggagcttggttttgccagtctccatgacctccagctcctgggaaagctgcttctgatgggtgcccgcactctgcaggggatcccccagatgattggagaggtcatcaggaagggctcaaagaatgacttttttcttcactacatcttcatggagaatgcctttgaactccccactggagctggattacagttgcaaatatcttcatctggagtcattgctcccggagccaaggctggagtaaaactggaagtagccaacatgcaggctgaactggtggcaaaaccctccgtgtctgtggagtttgtgacaaatatgggcatcatcattccggacttcgctaggagtggggtccagatgaacaccaacttcttccacgagtcgggtctggaggctcatgttgccctaaaagctgggaagctgaagtttatcattccttccccaaagagaccagtcaagctgctcagtggaggcaacacattacatttggtctctaccaccaaaacggaggtgatcccacctctcattgagaacaggcagtcctggtcagtttgcaagcaagtctttcctggcctgaattactgcacctcaggcgcttactccaacgccagctccacagactccgcctcctactatccgctgaccggggacaccagattagagctggaactgaggcctacaggagagattgagcagtattctgtcagcgcaacctatgagctccagagagaggacagagccttggtggataccctgaagtttgtaactcaagcagaaggtgcgaagcagactgaggctaccatgacattcaaatataatcggcagagtatgaccttgtccagtgaagtccaaattccggattttgatgttgacctcggaacaatcctcagagttaatgatgaatctactgagggcaaaacgtcttacagactcaccctggacattcagaacaagaaaattactgaggtcgccctcatgggccacctaagttgtgacacaaaggaagaaagaaaaatcaagggtgttatttccataccccgtttgcaagcagaagccagaagtgagatcctcgcccactggtcgcctgccaaactgcttctccaaatggactcatctgctacagcttatggctccacagtttccaagagggtggcatggcattatgatgaagagaagattgaatttgaatggaacacaggcaccaatgtagataccaaaaaaatgacttccaatttccctgtggatctctccgattatcctaagagcttgcatatgtatgctaatagactcctggatcacagagtccctcaaacagacatgactttccggcacgtgggttccaaattaatagttgcaatgagctcatggcttcagaaggcatctgggagtcttccttatacccagactttgcaagaccacctcaatagcctgaaggagttcaacctccagaacatgggattgccagacttccacatcccagaaaacctcttcttaaaaagcgatggccgggtcaaatataccttgaacaagaacagtttgaaaattgagattcctttgccttttggtggcaaatcctccagagatctaaagatgttagagactgttaggacaccagccctccacttcaagtctgtgggattccatctgccatctcgagagttccaagtccctacttttaccattcccaagttgtatcaactgcaagtgcctctcctgggtgttctagacctctccacgaatgtctacagcaacttgtacaactggtccgcctcctacagtggtggcaacaccagcacagaccatttcagccttcgggctcgttaccacatgaaggctgactctgtggttgacctgctttcctacaatgtgcaaggatctggagaaacaacatatgaccacaagaatacgttcacactatcatgtgatgggtctctacgccacaaatttctagattcgaatatcaaattcagtcatgtagaaaaacttggaaacaacccagtctcaaaaggtttactaatattcgatgcatctagttcctggggaccacagatgtctgcttcagttcatttggactccaaaaagaaacagcatttgtttgtcaaagaagtcaagattgatgggcagttcagagtctcttcgttctatgctaaaggcacatatggcctgtcttgtcagagggatcctaacactggccggctcaatggagagtccaacctgaggtttaactcctcctacctccaaggcaccaaccagataacaggaagatatgaagatggaaccctctccctcacctccacctctgatctgcaaagtggcatcattaaaaatactgcttccctaaagtatgagaactacgagctgactttaaaatctgacaccaatgggaagtataagaactttgccacttctaacaagatggatatgaccttctctaagcaaaatgcactgctgcgttctgaatatcaggctgattacgagtcattgaggttcttcagcctgctttctggatcactaaattcccatggtcttgagttaaatgctgacatcttaggcactgacaaaattaatagtggtgctcacaaggcgacactaaggattggccaagatggaatatctaccagtgcaacgaccaacttgaagtgtagtctcctggtgctggagaatgagctgaatgcagagcttggcctctctggggcatctatgaaattaacaacaaatggccgcttcagggaacacaatgcaaaattcagtctggatgggaaagccgccctcacagagctatcactgggaagtgcttatcaggccatgattctgggtgtcgacagcaaaaacattttcaacttcaaggtcagtcaagaaggacttaagctctcaaatgacatgatgggctcatatgctgaaatgaaatttgaccacacaaacagtctgaacattgcaggcttatcactggacttctcttcaaaacttgacaacatttacagctctgacaagttttataagcaaactgttaatttacagctacagccctattctctggtaactactttaaacagtgacctgaaatacaatgctctggatctcaccaacaatgggaaactacggctagaacccctgaagctgcatgtggctggtaacctaaaaggagcctaccaaaataatgaaataaaacacatctatgccatctcttctgctgccttatcagcaagctataaagcagacactgttgctaaggttcagggtgtggagtttagccatcggctcaacacagacatcgctgggctggcttcagccattgacatgagcacaaactataattcagactcactgcatttcagcaatgtcttccgttctgtaatggccccgtttaccatgaccatcgatgcacatacaaatggcaatgggaaactcgctctctggggagaacatactgggcagctgtatagcaaattcctgttgaaagcagaacctctggcatttactttctctcatgattacaaaggctccacaagtcatcatctcgtgtctaggaaaagcatcagtgcagctcttgaacacaaagtcagtgccctgcttactccagctgagcagacaggcacctggaaactcaagacccaatttaacaacaatgaatacagccaggacttggatgcttacaacactaaagataaaattggcgtggagcttactggacgaactctggctgacctaactctactagactccccaattaaagtgccacttttactcagtgagcccatcaatatcattgatgctttagagatgagagatgccgttgagaagccccaagaatttacaattgttgcttttgtaaagtatgataaaaaccaagatgttcactccattaacctcccattttttgagaccttgcaagaatattttgagaggaatcgacaaaccattatagttgtactggaaaacgtacagagaaacctgaagcacatcaatattgatcaatttgtaagaaaatacagagcagccctgggaaaactcccacagcaagctaatgattatctgaattcattcaattgggagagacaagtttcacatgccaaggagaaactgactgctctcacaaaaaagtatagaattacagaaaatgatatacaaattgcattagatgatgccaaaatcaactttaatgaaaaactatctcaactgcagacatatatgatacaatttgatcagtatattaaagatagttatgatttacatgatttgaaaatagctattgctaatattattgatgaaatcattgaaaaattaaaaagtcttgatgagcactatcatatccgtgtaaatttagtaaaaacaatccatgatctacatttgtttattgaaaatattgattttaacaaaagtggaagtagtactgcatcctggattcaaaatgtggatactaagtaccaaatcagaatccagatacaagaaaaactgcagcagcttaagagacacatacagaatatagacatccagcacctagctggaaagttaaaacaacacattgaggctattgatgttagagtgcttttagatcaattgggaactacaatttcatttgaaagaataaatgatgttcttgagcatgtcaaacactttgttataaatcttattggggattttgaagtagctgagaaaatcaatgccttcagagccaaagtccatgagttaatcgagaggtatgaagtagaccaacaaatccaggttttaatggataaattagtagagttggcccaccaatacaagttgaaggagactattcagaagctaagcaatgtcctacaacaagttaagataaaagattactttgagaaattggttggatttattgatgatgctgtcaagaagcttaatgaattatcttttaaaacattcattgaagatgttaacaaattccttgacatgttgataaagaaattaaagtcatttgattaccaccagtttgtagatgaaaccaatgacaaaatccgtgaggtgactcagagactcaatggtgaaattcaggctctggaactaccacaaaaagctgaagcattaaaactgtttttagaggaaaccaaggccacagttgcagtgtatctggaaagcctacaggacaccaaaataaccttaatcatcaattggttacaggaggctttaagttcagcatctttggctcacatgaaggccaaattccgagagactctagaagatacacgagaccgaatgtatcaaatggacattcagcaggaacttcaacgatacctgtctctggtaggccaggtttatagcacacttgtcacctacatttctgattggtggactcttgctgctaagaaccttactgactttgcagagcaatattctatccaagattgggctaaacgtatgaaagcattggtagagcaagggttcactgttcctgaaatcaagaccatccttgggaccatgcctgcctttgaagtcagtcttcaggctcttcagaaagctaccttccagacacctgattttatagtccccctaacagatttgaggattccatcagttcagataaacttcaaagacttaaaaaatataaaaatcccatccaggttttccacaccagaatttaccatccttaacaccttccacattccttcctttacaattgactttgtagaaatgaaagtaaagatcatcagaaccattgaccagatgctgaacagtgagctgcagtggcccgttccagatatatatctcagggatctgaaggtggaggacattcctctagcgagaatcaccctgccagacttccgtttaccagaaatcgcaattccagaattcataatcccaactctcaaccttaatgattttcaagttcctgaccttcacataccagaattccagcttccccacatctcacacacaattgaagtacctacttttggcaagctatacagtattctgaaaatccaatctcctcttttcacattagatgcaaatgctgacatagggaatggaaccacctcagcaaacgaagcaggtatcgcagcttccatcactgccaaaggagagtccaaattagaagttctcaattttgattttcaagcaaatgcacaactctcaaaccctaagattaatccgctggctctgaaggagtcagtgaagttctccagcaagtacctgagaacggagcatgggagtgaaatgctgttttttggaaatgctattgagggaaaatcaaacacagtggcaagtttacacacagaaaaaaatacactggagcttagtaatggagtgattgtcaagataaacaatcagcttaccctggatagcaacactaaatacttccacaaattgaacatccccaaactggacttctctagtcaggctgacctgcgcaacgagatcaagacactgttgaaagctggccacatagcatggacttcttctggaaaagggtcatggaaatgggcctgccccagattctcagatgagggaacacatgaatcacaaattagtttcaccatagaaggacccctcacttcctttggactgtccaataagatcaatagcaaacacctaagagtaaaccaaaacttggtttatgaatctggctccctcaacttttctaaacttgaaattcaatcacaagtcgattcccagcatgtgggccacagtgttctaactgctaaaggcatggcactgtttggagaagggaaggcagagtttactgggaggcatgatgctcatttaaatggaaaggttattggaactttgaaaaattctcttttcttttcagcccagccatttgagatcacggcatccacaaacaatgaagggaatttgaaagttcgttttccattaaggttaacagggaagatagacttcctgaataactatgcactgtttctgagtcccagtgcccagcaagcaagttggcaagtaagtgctaggttcaatcagtataagtacaaccaaaatttctctgctggaaacaacgagaacattatggaggcccatgtaggaataaatggagaagcaaatctggatttcttaaacattcctttaacaattcctgaaatgcgtctaccttacacaataatcacaactcctccactgaaagatttctctctatgggaaaaaacaggcttgaaggaattcttgaaaacgacaaagcaatcatttgatttaagtgtaaaagctcagtataagaaaaacaaacacaggcattccatcacaaatcctttggctgtgctttgtgagtttatcagtcagagcatcaaatcctttgacaggcattttgaaaaaaacagaaacaatgcattagattttgtcaccaaatcctataatgaaacaaaaattaagtttgataagtacaaagctgaaaaatctcacgacgagctccccaggacctttcaaattcctggatacactgttccagttgtcaatgttgaagtgtctccattcaccatagagatgtcggcattcggctatgtgttcccaaaagcagtcagcatgcctagtttctccatcctaggttctgacgtccgtgtgccttcatacacattaatcctgccatcattagagctgccagtccttcatgtccctagaaatctcaagctttctcttccacatttcaaggaattgtgtaccataagccatatttttattcctgccatgggcaatattacctatgatttctcctttaaatcaagtgtcatcacactgaataccaatgctgaactttttaaccagtcagatattgttgctcatctcctttcttcatcttcatctgtcattgatgcactgcagtacaaattagagggcaccacaagattgacaagaaaaaggggattgaagttagccacagctctgtctctgagcaacaaatttgtggagggtagtcataacagtactgtgagcttaaccacgaaaaatatggaagtgtcagtggcaaaaaccacaaaagccgaaattccaattttgagaatgaatttcaagcaagaacttaatggaaataccaagtcaaaacctactgtctcttcctccatggaatttaagtatgatttcaattcttcaatgctgtactctaccgctaaaggagcagttgaccacaagcttagcttggaaagcctcacctcttacttttccattgagtcatctaccaaaggagatgtcaagggttcggttctttctcgggaatattcaggaactattgctagtgaggccaacacttacttgaattccaagagcacacggtcttcagtgaagctgcagggcacttccaaaattgatgatatctggaaccttgaagtaaaagaaaattttgctggagaagccacactccaacgcatatattccctctgggagcacagtacgaaaaaccacttacagctagagggcctctttttcaccaacggagaacatacaagcaaagccaccctggaactctctccatggcaaatgtcagctcttgttcaggtccatgcaagtcagcccagttccttccatgatttccctgaccttggccaggaagtggccctgaatgctaacactaagaaccagaagatcagatggaaaaatgaagtccggattcattctgggtctttccagagccaggtcgagctttccaatgaccaagaaaaggcacaccttgacattgcaggatccttagaaggacacctaaggttcctcaaaaatatcatcctaccagtctatgacaagagcttatgggatttcctaaagctggatgtaaccaccagcattggtaggagacagcatcttcgtgtttcaactgcctttgtgtacaccaaaaaccccaatggctattcattctccatccctgtaaaagttttggctgataaattcattattcctgggctgaaactaaatgatctaaattcagttcttgtcatgcctacgttccatgtcccatttacagatcttcaggttccatcgtgcaaacttgacttcagagaaatacaaatctataagaagctgagaacttcatcatttgccctcaacctaccaacactccccgaggtaaaattccctgaagttgatgtgttaacaaaatattctcaaccagaagactccttgattcccttttttgagataaccgtgcctgaatctcagttaactgtgtcccagttcacgcttccaaaaagtgtttcagatggcattgctgctttggatctaaatgcagtagccaacaagatcgcagactttgagttgcccaccatcatcgtgcctgagcagaccattgagattccctccattaagttctctgtacctgctggaattgtcattccttcctttcaagcactgactgcacgctttgaggtagactctcccgtgtataatgccacttggagtgccagtttgaaaaacaaagcagattatgttgaaacagtcctggattccacatgcagctcaaccgtacagttcctagaatatgaactaaatgttttgggaacacacaaaatcgaagatggtacgttagcctctaagactaaaggaacatttgcacaccgtgacttcagtgcagaatatgaagaagatggcaaatatgaaggacttcaggaatgggaaggaaaagcgcacctcaatatcaaaagcccagcgttcaccgatctccatctgcgctaccagaaagacaagaaaggcatctccacctcagcagcctccccagccgtaggcaccgtgggcatggatatggatgaagatgacgacttttctaaatggaacttctactacagccctcagtcctctccagataaaaaactcaccatattcaaaactgagttgagggtccgggaatctgatgaggaaactcagatcaaagttaattgggaagaagaggcagcttctggcttgctaacctctctgaaagacaacgtgcccaaggccacaggggtcctttatgattatgtcaacaagtaccactgggaacacacagggctcaccctgagagaagtgtcttcaaagctgagaagaaatctgcagaacaatgctgagtgggtttatcaaggggccattaggcaaattgatgatatcgacgtgaggttccagaaagcagccagtggcaccactgggacctaccaagagtggaaggacaaggcccagaatctgtaccaggaactgttgactcaggaaggccaagccagtttccagggactcaaggataacgtgtttgatggcttggtacgagttactcaagaattccatatgaaagtcaagcatctgattgactcactcattgattttctgaacttccccagattccagtttccggggaaacctgggatatacactagggaggaactttgcactatgttcataagggaggtagggacggtactgtcccaggtatattcgaaagtccataatggttcagaaatactgttttcctatttccaagacctagtgattacacttcctttcgagttaaggaaacataaactaatagatgtaatctcgatgtatagggaactgttgaaagatttatcgctacgtaatcttcaggaccttttacaattcattttccaactaatagaagataacattaaacagctgaaagagatgaaatttacttatcttattaattatatccaagatgagatcaacacaatcttcagtgattatatcccatatgtttttaaattgttgaaagaaaacctatgccttaatcttcataagttcaatgaatttattcaaaacgagcttcaggaagcttctcaagagttacagcagatccatcaatacattatggcccttcgtgaagaatattttgatccaagtatagttggctggacagtgaaatattatgaacttgaagaaaagatagtcagtctgatcaagaacctgttagttgctcttaaggacttccattctgaatatattgtcagtgcctctaactttacttcccaactctcaagtcaagttgagcaatttctgcacagaaatattcaggaatatcttagcatccttaccgatccagatggaaaagggaaagagaagattgcagagctttctgccactgctcaggaaataattaaaagccaggccattgcgacgaagaaaataatttctgattaccaccagcagtttagatataaactgcaagatttttcagaccaactctctgattactatgaaaaatttattgctgaatccaaaagattgattgacctgtccattcaaaactaccacacatttctgatatacatcacggagttactgaaaaagctgcaatcaaccacagtcatgaacccctacatgaagcttgctccaggagaacttactatcatcctctaattttttaaaagaaatcttcatttattcttcttttccaattgaactttcacatagcacagaaaaaattcaaactgcctatattgataaaaccatacagtgagccagccttgcagtaggcagtagactataagcagaagcacatatgaactggacctgcaccaaagctggcaccagggctcggaaggtctctgaactcagaaggatggcattttttgcaagttaaagaaaatcaggatctgagttattttgctaaacttgggggaggaggaacaaataaatggagtctttattgtgtatcataacac

SEQ ID NO: 438320 - DNA, 4694 bp, Homo sapiens
cttctgataacgaagagatacctgtctgaggcaaacgaaacattggcacacagcacagcctcctcaatccacttgatcccaactcatctctcatttatttcggcttcttttattccaggattaatgtagtgtaacattttcatttcttttcgcttttattctgcttttgtaaaagcagtattttgagatggacattgcctcttcattgtatttctcatcaattcattatttttgtggttatagcttgacaagcaattaactttaaaatggtagattccgtaactttaaattggtagctttcatttgcttaaaattttttggcatatgcagataatgttctcatcagtagtaagaatctcagggttatgcttattccccaatggaggtatgacatataatcttttctgcctttacttatcaattcaccaaggagctgttttctctgcatctaggccatcatactgccaggctggttatgactcagaagatgttatctgaaaaaagtctatagaaaaaaaaaagtttcccctccctcatcaacaaaagcccaccctctaagagacattcaagctgaactatcacaattcttaatcagttacaatttacaaacagataagtttaaaataaacaatttacaaaatttttgaagcataccttaacatcttgttttgcagttaaacaatggaaaagtatttctcctacactaaaaaaaaacttgcttacacacaactgaaaatagaatcttacttgataatacaaaagctaccatcagaagaaatcccttcaggatcattaagccacttcctttgctctgcagtttctatagtagttttaaattattattaaatcacctgaaaaaaattccaaaagagaaccacacactaccatatccaaacaacttttgcatttcccataattgtagttaatgtcagcccagtaggccagaccaacccccagttcaatactttccttccccaaaagctctatactttgaaggaaaacagatacagtatcaaattatgacactttccttgcccaaattaatgcactggtacacccagtggctcatatttaacttcccccagcttcccaattcaaactggggggaaaaaaactaaatcattgggagttacttgccaacttggaagttgatatttctttactttttccattgagtcatctaccaaaggagatgtcaagggttcggttctttctcgggaatattcaggaactattgctagtgaggccaacacttacttgaattccaagagcacacggtcttcagtgaagctgcagggcacttccaaaattgatgatatctggaaccttgaagtaaaagaaaattttgctggagaagccacactccaacgcatatattccctctgggagcacagtacgaaaaaccacttacagctagagggcctctttttcaccaacggagaacatacaagcaaagccaccctggaactctctccatggcaaatgtcagctcttgttcaggtccatgcaagtcagcccagttccttccatgatttccctgaccttggccaggaagtggccctgaatgctaacactaagaaccagaagatcagatggaaaaatgaagtccggattcattctgggtctttccagagccaggtcgagctttccaatgaccaagaaaaggcacaccttgacattgcaggatccttagaaggacacctaaggttcctcaaaaatatcatcctaccagtctatgacaagagcttatgggatttcctaaagctggatgtaaccaccagcattggtaggagacagcatcttcgtgtttcaactgcctttgtgtacaccaaaaaccccaatggctattcattctccatccctgtaaaagttttggctgataaattcattattcctgggctgaaactaaatgatctaaattcagttcttgtcatgcctacgttccatgtcccatttacagatcttcaggttccatcgtgcaaacttgacttcagagaaatacaaatctataagaagctgagaacttcatcatttgccctcaacctaccaacactccccgaggtaaaattccctgaagttgatgtgttaacaaaatattctcaaccagaagactccttgattcccttttttgagataaccgtgcctgaatctcagttaactgtgtcccagttcacgcttccaaaaagtgtttcagatggcattgctgctttggatctaaatgcagtagccaacaagatcgcagactttgagttgcccaccatcatcgtgcctgagcagaccattgagattccctccattaagttctctgtacctgctggaattgtcattccttcctttcaagcactgactgcacgctttgaggtagactctcccgtgtataatgccacttggagtgccagtttgaaaaacaaagcagattatgttgaaacagtcctggattccacatgcagctcaaccgtacagttcctagaatatgaactaaatgttttgggaacacacaaaatcgaagatggtacgttagcctctaagactaaaggaacatttgcacaccgtgacttcagtgcagaatatgaagaagatggcaaatatgaaggacttcaggaatgggaaggaaaagcgcacctcaatatcaaaagcccagcgttcaccgatctccatctgcgctaccagaaagacaagaaaggcatctccacctcagcagcctccccagccgtaggcaccgtgggcatggatatggatgaagatgacgacttttctaaatggaacttctactacagccctcagtcctctccagataaaaaactcaccatattcaaaactgagttgagggtccgggaatctgatgaggaaactcagatcaaagttaattgggaagaagaggcagcttctggcttgctaacctctctgaaagacaacgtgcccaaggccacaggggtcctttatgattatgtcaacaagtaccactgggaacacacagggctcaccctgagagaagtgtcttcaaagctgagaagaaatctgcagaacaatgctgagtgggtttatcaaggggccattaggcaaattgatgatatcgacgtgaggttccagaaagcagccagtggcaccactgggacctaccaagagtggaaggacaaggcccagaatctgtaccaggaactgttgactcaggaaggccaagccagtttccagggactcaaggataacgtgtttgatggcttggtacgagttactcaagaattccatatgaaagtcaagcatctgattgactcactcattgattttctgaacttccccagattccagtttccggggaaacctgggatatacactagggaggaactttgcactatgttcataagggaggtagggacggtactgtcccaggtatattcgaaagtccataatggttcagaaatactgttttcctatttccaagacctagtgattacacttcctttcgagttaaggaaacataaactaatagatgtaatctcgatgtatagggaactgttgaaagatttatcaaaagaagcccaagaggtatttaaagccattcagtctctcaagaccacagaggtgctacgtaatcttcaggaccttttacaattcattttccaactaatagaagataacattaaacagctgaaagagatgaaatttacttatcttattaattatatccaagatgagatcaacacaatcttcagtgattatatcccatatgtttttaaattgttgaaagaaaacctatgccttaatcttcataagttcaatgaatttattcaaaacgagcttcaggaagcttctcaagagttacagcagatccatcaatacattatggcccttcgtgaagaatattttgatccaagtatagttggctggacagtgaaatattatgaacttgaagaaaagatagtcagtctgatcaagaacctgttagttgctcttaaggacttccattctgaatatattgtcagtgcctctaactttacttcccaactctcaagtcaagttgagcaatttctgcacagaaatattcaggaatatcttagcatccttaccgatccagatggaaaagggaaagagaagattgcagagctttctgccactgctcaggaaataattaaaagccaggccattgcgacgaagaaaataatttctgattaccaccagcagtttagatataaactgcaagatttttcagaccaactctctgattactatgaaaaatttattgctgaatccaaaagattgattgacctgtccattcaaaactaccacacatttctgatatacatcacggagttactgaaaaagctgcaatcaaccacagtcatgaacccctacatgaagcttgctccaggagaacttactatcatcctctaattttttaaaagaaatcttcatttattcttcttttccaattgaactttcacatagcacagaaaaaattcaaactgcctatattgataaaaccatacagtgagccagccttgcagtaggcagtagactataagcagaagcacatatgaactggacctgcaccaaagctggcaccagggctcggaaggtctctgaactcagaaggatggcattttttgcaagttaaagaaaatcaggatctgagttattttgctaaacttgggggaggaggaacaaataaatggagtctttattgtgtatcataacac

SEQ ID NO: 438321 - DNA, 12623 bp, Homo sapiens
cattcccaccgggacctgcggggctgagtgcccttctcggttgctgccgctgaggagcccgcccagccagccagggccgcgaggccgaggccaggccgcagcccaggagccgccccaccgcagctggcgatggacccgccgaggcccgcgctgctggcgctgctggcgctgcctgcgctgctgctgctgctgctggcgggcgccagggccgaagaggaaatgctggaaaatgtcagcctggtctgtccaaaagatgcgacccgattcaagcacctccggaagtacacatacaactatgaggctgagagttccagtggagtccctgggactgctgattcaagaagtgccaccaggatcaactgcaaggttgagctggaggttccccagctctgcagcttcatcctgaagaccagccagtgcaccctgaaagaggtgtatggcttcaaccctgagggcaaagccttgctgaagaaaaccaagaactctgaggagtttgctgcagccatgtccaggtatgagctcaagctggccattccagaagggaagcaggttttcctttacccggagaaagatgaacctacttacatcctgaacatcaagaggggcatcatttctgccctcctggttcccccagagacagaagaagccaagcaagtgttgtttctggataccgtgtatggaaactgctccactcactttaccgtcaagacgaggaagggcaatgtggcaacagaaatatccactgaaagagacctggggcagtgtgatcgcttcaagcccatccgcacaggcatcagcccacttgctctcatcaaaggcatgacccgccccttgtcaactctgatcagcagcagccagtcctgtcagtacacactggacgctaagaggaagcatgtggcagaagccatctgcaaggagcaacacctcttcctgcctttctcctacaagaataagtatgggatggtagcacaagtgacacagactttgaaacttgaagacacaccaaagatcaacagccgcttctttggtgaaggtactaagaagatgggcctcgcatttgagagcaccaaatccacatcacctccaaagcaggccgaagctgttttgaagactctccaggaactgaaaaaactaaccatctctgagcaaaatatccagagagctaatctcttcaataagctggttactgagctgagaggcctcagtgatgaagcagtcacatctctcttgccacagctgattgaggtgtccagccccatcactttacaagccttggttcagtgtggacagcctcagtgctccactcacatcctccagtggctgaaacgtgtgcatgccaacccccttctgatagatgtggtcacctacctggtggccctgatccccgagccctcagcacagcagctgcgagagatcttcaacatggcgagggatcagcgcagccgagccaccttgtatgcgctgagccacgcggtcaacaactatcataagacaaaccctacagggacccaggagctgctggacattgctaattacctgatggaacagattcaagatgactgcactggggatgaagattacacctatttgattctgcgggtcattggaaatatgggccaaaccatggagcagttaactccagaactcaagtcttcaatcctgaaatgtgtccaaagtacaaagccatcactgatgatccagaaagctgccatccaggctctgcggaaaatggagcctaaagacaaggaccaggaggttcttcttcagactttccttgatgatgcttctccgggagataagcgactggctgcctatcttatgttgatgaggagtccttcacaggcagatattaacaaaattgtccaaattctaccatgggaacagaatgagcaagtgaagaactttgtggcttcccatattgccaatatcttgaactcagaagaattggatatccaagatctgaaaaagttagtgaaagaagctctgaaagaatctcaacttccaactgtcatggacttcagaaaattctctcggaactatcaactctacaaatctgtttctcttccatcacttgacccagcctcagccaaaatagaagggaatcttatatttgatccaaataactaccttcctaaagaaagcatgctgaaaactaccctcactgcctttggatttgcttcagctgacctcatcgagattggcttggaaggaaaaggctttgagccaacattggaagctctttttgggaagcaaggatttttcccagacagtgtcaacaaagctttgtactgggttaatggtcaagttcctgatggtgtctctaaggtcttagtggaccactttggctataccaaagatgataaacatgagcaggatatggtaaatggaataatgctcagtgttgagaagctgattaaagatttgaaatccaaagaagtcccggaagccagagcctacctccgcatcttgggagaggagcttggttttgccagtctccatgacctccagctcctgggaaagctgcttctgatgggtgcccgcactctgcaggggatcccccagatgattggagaggtcatcaggaagggctcaaagaatgacttttttcttcactacatcttcatggagaatgcctttgaactccccactggagctggattacagttgcaaatatcttcatctggagtcattgctcccggagccaaggctggagtaaaactggaagtagccaacatgcaggctgaactggtggcaaaaccctccgtgtctgtggagtttgtgacaaatatgggcatcatcattccggacttcgctaggagtggggtccagatgaacaccaacttcttccacgagtcgggtctggaggctcatgttgccctaaaagctgggaagctgaagtttatcattccttccccaaagagaccagtcaagctgctcagtggaggcaacacattacatttggtctctaccaccaaaacggaggtgatcccacctctcattgagaacaggcagtcctggtcagtttgcaagcaagtctttcctggcctgaattactgcacctcaggcgcttactccaacgccagctccacagactccgcctcctactatccgctgaccggggacaccagattagagctggaactgaggcctacaggagagattgagcagtattctgtcagcgcaacctatgagctccagagagaggacagagccttggtggataccctgaagtttgtaactcaagcagaaggtgcgaagcagactgaggctaccatgacattcaaatataatcggcagagtatgaccttgtccagtgaagtccaaattccggattttgatgttgacctcggaacaatcctcagagttaatgatgaatctactgagggcaaaacgtcttacagactcaccctggacattcagaacaagaaaattactgaggtcgccctcatgggccacctaagttgtgacacaaaggaagaaagaaaaatcaagggtgttatttccataccccgtttgcaagcagaagccagaagtgagatcctcgcccactggtcgcctgccaaactgcttctccaaatggactcatctgctacagcttatggctccacagtttccaagagggtggcatggcattatgatgaagagaagattgaatttgaatggaacacaggcaccaatgtagataccaaaaaaatgacttccaatttccctgtggatctctccgattatcctaagagcttgcatatgtatgctaatagactcctggatcacagagtccctcaaacagacatgactttccggcacgtgggttccaaattaatagttgcaatgagctcatggcttcagaaggcatctgggagtcttccttatacccagactttgcaagaccacctcaatagcctgaaggagttcaacctccagaacatgggattgccagacttccacatcccagaaaacctcttcttaaaaagcgatggccgggtcaaatataccttgaacaagaacagtttgaaaattgagattcctttgccttttggtggcaaatcctccagagatctaaagatgttagagactgttaggacaccagccctccacttcaagtctgtgggattccatctgccatctcgagagttccaagtccctacttttaccattcccaagttgtatcaactgcaagtgcctctcctgggtgttctagacctctccacgaatgtctacagcaacttgtacaactggtccgcctcctacagtggtggcaacaccagcacagaccatttcagccttcgggctcgttaccacatgaaggctgactctgtggttgacctgctttcctacaatgtgcaaggatctggagaaacaacatatgaccacaagaatacgttcacactatcatgtgatgggtctctacgccacaaatttctagattcgaatatcaaattcagtcatgtagaaaaacttggaaacaacccagtctcaaaaggtttactaatattcgatgcatctagttcctggggaccacagatgtctgcttcagttcatttggactccaaaaagaaacagcatttgtttgtcaaagaagtcaagattgatgggcagttcagagtctcttcgttctatgctaaaggcacatatggcctgtcttgtcagagggatcctaacactggccggctcaatggagagtccaacctgaggtttaactcctcctacctccaaggcaccaaccagataacaggaagatatgaagatggaaccctctccctcacctccacctctgatctgcaaagtggcatcattaaaaatactgcttccctaaagtatgagaactacgagctgactttaaaatctgacaccaatgggaagtataagaactttgccacttctaacaagatggatatgaccttctctaagcaaaatgcactgctgcgttctgaatatcaggctgattacgagtcattgaggttcttcagcctgctttctggatcactaaattcccatggtcttgagttaaatgctgacatcttaggcactgacaaaattaatagtggtgctcacaaggcgacactaaggattggccaagatggaatatctaccagtgcaacgaccaacttgaagtgtagtctcctggtgctggagaatgagctgaatgcagagcttggcctctctggggcatctatgaaattaacaacaaatggccgcttcagggaacacaatgcaaaattcagtctggatgggaaagccgccctcacagagctatcactgggaagtgcttatcaggccatgattctgggtgtcgacagcaaaaacattttcaacttcaaggtcagtcaagaaggacttaagctctcaaatgacatgatgggctcatatgctgaaatgaaatttgaccacacaaacagtctgaacattgcaggcttatcactggacttctcttcaaaacttgacaacatttacagctctgacaagttttataagcaaactgttaatttacagctacagccctattctctggtaactactttaaacagtgacctgaaatacaatgctctggatctcaccaacaatgggaaactacggctagaacccctgaagctgcatgtggctggtaacctaaaaggagcctaccaaaataatgaaataaaacacatctatgccatctcttctgctgccttatcagcaagctataaagcagacactgttgctaaggttcagggtgtggagtttagccatcggctcaacacagacatcgctgggctggcttcagccattgacatgagcacaaactataattcagactcactgcatttcagcaatgtcttccgttctgtaatggccccgtttaccatgaccatcgatgcacatacaaatggcaatgggaaactcgctctctggggagaacatactgggcagctgtatagcaaattcctgttgaaagcagaacctctggcatttactttctctcatgattacaaaggctccacaagtcatcatctcgtgtctaggaaaagcatcagtgcagctcttgaacacaaagtcagtgccctgcttactccagctgagcagacaggcacctggaaactcaagacccaatttaacaacaatgaatacagccaggacttggatgcttacaacactaaagataaaattggcgtggagcttactggacgaactctggctgacctaactctactagactccccaattaaagtgccacttttactcagtgagcccatcaatatcattgatgctttagagatgagagatgccgttgagaagccccaagaatttacaattgttgcttttgtaaagtatgataaaaaccaagatgttcactccattaacctcccattttttgagaccttgcaagaatattttgagaggaatcgacaaaccattatagttgtactggaaaacgtacagagaaacctgaagcacatcaatattgatcaatttgtaagaaaatacagagcagccctgggaaaactcccacagcaagctaatgattatctgaattcattcaattgggagagacaagtttcacatgccaaggagaaactgactgctctcacaaaaaagtatagaattacagaaaatgatatacaaattgcattagatgatgccaaaatcaactttaatgaaaaactatctcaactgcagacatatatgatacaatttgatcagtatattaaagatagttatgatttacatgatttgaaaatagctattgctaatattattgatgaaatcattgaaaaattaaaaagtcttgatgagcactatcatatccgtgtaaatttagtaaaaacaatccatgatctacatttgtttattgaaaatattgattttaacaaaagtggaagtagtactgcatcctggattcaaaatgtggatactaagtaccaaatcagaatccagatacaagaaaaactgcagcagcttaagagacacatacagaatatagacatccagcacctagctggaaagttaaaacaacacattgaggctattgatgttagagtgcttttagatcaattgggaactacaatttcatttgaaagaataaatgatgttcttgagcatgtcaaacactttgttataaatcttattggggattttgaagtagctgagaaaatcaatgccttcagagccaaagtccatgagttaatcgagaggtatgaagtagaccaacaaatccaggttttaatggataaattagtagagttggcccaccaatacaagttgaaggagactattcagaagctaagcaatgtcctacaacaagttaagataaaagattactttgagaaattggttggatttattgatgatgctgtcaagaagcttaatgaattatcttttaaaacattcattgaagatgttaacaaattccttgacatgttgataaagaaattaaagtcatttgattaccaccagtttgtagatgaaaccaatgacaaaatccgtgaggtgactcagagactcaatggtgaaattcaggctctggaactaccacaaaaagctgaagcattaaaactgtttttagaggaaaccaaggccacagttgcagtgtatctggaaagcctacaggacaccaaaataaccttaatcatcaattggttacaggaggctttaagttcagcatctttggctcacatgaaggccaaattccgagagactctagaagatacacgagaccgaatgtatcaaatggacattcagcaggaacttcaacgatacctgtctctggtaggccaggtttatagcacacttgtcacctacatttctgattggtggactcttgctgctaagaaccttactgactttgcagagcaatattctatccaagattgggctaaacgtatgaaagcattggtagagcaagggttcactgttcctgaaatcaagaccatccttgggaccatgcctgcctttgaagtcagtcttcaggctcttcagaaagctaccttccagacacctgattttatagtccccctaacagatttgaggattccatcagttcagataaacttcaaagacttaaaaaatataaaaatcccatccaggttttccacaccagaatttaccatccttaacaccttccacattccttcctttacaattgactttgtagaaatgaaagtaaagatcatcagaaccattgaccagatgctgaacagtgagctgcagtggcccgttccagatatatatctcagggatctgaaggtggaggacattcctctagcgagaatcaccctgccagacttccgtttaccagaaatcgcaattccagaattcataatcccaactctcaaccttaatgattttcaagttcctgaccttcacataccagaattccagcttccccacatctcacacacaattgaagtacctacttttggcaagctatacagtattctgaaaatccaatctcctcttttcacattagatgcaaatgctgacatagggaatggaaccacctcagcaaacgaagcaggtatcgcagcttccatcactgccaaaggagagtccaaattagaagttctcaattttgattttcaagcaaatgcacaactctcaaaccctaagattaatccgctggctctgaaggagtcagtgaagttctccagcaagtacctgagaacggagcatgggagtgaaatgctgttttttggaaatgctattgagggaaaatcaaacacagtggcaagtttacacacagaaaaaaatacactggagcttagtaatggagtgattgtcaagataaacaatcagcttaccctggatagcaacactaaatacttccacaaattgaacatccccaaactggacttctctagtcaggctgacctgcgcaacgagatcaagacactgttgaaagctggccacatagcatggacttcttctggaaaagggtcatggaaatgggcctgccccagattctcagatgagggaacacatgaatcacaaattagtttcaccatagaaggacccctcacttcctttggactgtccaataagatcaatagcaaacacctaagagtaaaccaaaacttggtttatgaatctggctccctcaacttttctaaacttgaaattcaatcacaagtcgattcccagcatgtgggccacagtgttctaactgctaaaggcatggcactgtttggagaagggaaggcagagtttactgggaggcatgatgctcatttaaatggaaaggttattggaactttgaaaaattctcttttcttttcagcccagccatttgagatcacggcatccacaaacaatgaagggaatttgaaagttcgttttccattaaggttaacagggaagatagacttcctgaataactatgcactgtttctgagtcccagtgcccagcaagcaagttggcaagtaagtgctaggttcaatcagtataagtacaaccaaaatttctctgctggaaacaacgagaacattatggaggcccatgtaggaataaatggagaagcaaatctggatttcttaaacattcctttaacaattcctgaaatgcgtctaccttacacaataatcacaactcctccactgaaagatttctctctatgggaaaaaacaggcttgaaggaattcttgaaaacgacaaagcaatcatttgatttaagtgtaaaagctcagtataagaaaaacaaacacaggcattccatcacaaatcctttggctgtgctttgtgagtttatcagtcagagcatcaaatcctttgacaggcattttgaaaaaaacagaaacaatgcattagattttgtcaccaaatcctataatgaaacaaaaattaagtttgataagtacaaagctgaaaaatctcacgacgagctccccaggacctttcaaattcctggatacactgttccagttgtcaatgttgaagtgtctccattcaccatagagatgtcggcattcggctatgtgttcccaaaagcagtcagcatgcctagtttctccatcctaggttctgacgtccgtgtgccttcatacacattaatcctgccatcattagagctgccagtccttcatgtccctagaaatctcaagctttctcttccacatttcaaggaattgtgtaccataagccatatttttattcctgccatgggcaatattacctatgatttctcctttaaatcaagtgtcatcacactgaataccaatgctgaactttttaaccagtcagatattgttgctcatctcctttcttcatcttcatctgtcattgatgcactgcagtacaaattagagggcaccacaagattgacaagaaaaaggggattgaagttagccacagctctgtctctgagcaacaaatttgtggagggtagtcataacagtactgtgagcttaaccacgaaaaatatggaagtgtcagtggcaaaaaccacaaaagccgaaattccaattttgagaatgaatttcaagcaagaacttaatggaaataccaagtcaaaacctactgtctcttcctccatggaatttaagtatgatttcaattcttcaatgctgtactctaccgctaaaggagcagttgaccacaagcttagcttggaaagcctcacctcttacttttccattgagtcatctaccaaaggagatgtcaagggttcggttctttctcgggaatattcaggaactattgctagtgaggccaacacttacttgaattccaagagcacacggtcttcagtgaagctgcagggcacttccaaaattgatgatatctggaaccttgaagtaaaagaaaattttgctggagaagccacactccaacgcatatattccctctgggagcacagtacgaaaaaccacttacagctagagggcctctttttcaccaacggagaacatacaagcaaagccaccctggaactctctccatggcaaatgtcagctcttgttcaggtccatgcaagtcagcccagttccttccatgatttccctgaccttggccaggaagtggccctgaatgctaacactaagaaccagaagatcagatggaaaaatgaagtccggattcattctgggtctttccagagccaggtcgagctttccaatgaccaagaaaaggcacaccttgacattgcaggatccttagaaggacacctaaggttcctcaaaaatatcatcctaccagtctatgacaagagcttatgggatttcctaaagctggatgtaaccaccagcattggtaggagacagcatcttcgtgtttcaactgcctttgtgtacaccaaaaaccccaatggctattcattctccatccctgtaaaagttttggctgataaattcattattcctgggctgaaactaaatgatctaaattcagttcttgtcatgcctacgttccatgtcccatttacagatcttcaggttccatcgtgcaaacttgacttcagagaaatacaaatctataagaagctgagaacttcatcatttgccctcaacctaccaacactccccgaggtaaaattccctgaagttgatgtgttaacaaaatattctcaaccagaagactccttgattcccttttttgagataaccgtgcctgaatctcagttaactgtgtcccagttcacgcttccaaaaagtgtttcagatggcattgctgctttggatctaaatgcagtagccaacaagatcgcagactttgagttgcccaccatcatcgtgcctgagcagaccattgagattccctccattaagttctctgtacctgctggaattgtcattccttcctttcaagcactgactgcacgctttgaggtagactctcccgtgtataatgccacttggagtgccagtttgaaaaacaaagcagattatgttgaaacagtcctggattccacatgcagctcaaccgtacagttcctagaatatgaactaaatgttttgggaacacacaaaatcgaagatggtacgttagcctctaagactaaaggaacatttgcacaccgtgacttcagtgcagaatatgaagaagatggcaaatatgaaggacttcaggaatgggaaggaaaagcgcacctcaatatcaaaagcccagcgttcaccgatctccatctgcgctaccagaaagacaagaaaggcatctccacctcagcagcctccccagccgtaggcaccgtgggcatggatatggatgaagatgacgacttttctaaatggaacttctactacagccctcagtcctctccagtatatcacatcaacgagtaggcggatcgtagaatcagatcaagtatggagagagcagtcgtgtactctctgaagacacgtgccacaggggtcctttatgattatgtcaacaagtaccactgggaacacacagggctcaccctgagagaagtgtcttcaaagctgagaagaaatctgcagaacaatgctgagtgggtttatcaaggggccattaggcaaattgatgatatcgacgtgaggttccagaaagcagccagtggcaccactgggacctaccaagagtggaaggacaaggccaatctgtccagacgtgatcagaggcaagcattccaggatcaggataggttgatggttggagagtatcagattcattgaagtcagctctgatgatcatcttg

SEQ ID NO: 438322 - DNA, 12000 bp, Homo sapiens
cattcccaccgggacctgcggggctgagtgcccttctcggttgctgccgctgaggagcccgcccagccagccagggccgcgaggccgaggccaggccgcagcccaggagccgccccaccgcagctggcgatggacccgccgaggcccgcgctgctggcgctgctggcgctgcctgcgctgctgctgctgctgctggcgggcgccagggccgaagaggaaatgctggaaaatgtcagcctggtctgtccaaaagatgcgacccgattcaagcacctccggaagtacacatacaactatgaggctgagagttccagtggagtccctgggactgctgattcaagaagtgccaccaggatcaactgcaaggttgagctggaggttccccagctctgcagcttcatcctgaagaccagccagtgcaccctgaaagaggtgtatggcttcaaccctgagggcaaagccttgctgaagaaaaccaagaactctgaggagtttgctgcagccatgtccaggtatgagctcaagctggccattccagaagggaagcaggttttcctttacccggagaaagatgaacctacttacatcctgaacatcaagaggggcatcatttctgccctcctggttcccccagagacagaagaagccaagcaagtgttgtttctggataccgtgtatggaaactgctccactcactttaccgtcaagacgaggaagggcaatgtggcaacagaaatatccactgaaagagacctggggcagtgtgatcgcttcaagcccatccgcacaggcatcagcccacttgctctcatcaaaggcatgacccgccccttgtcaactctgatcagcagcagccagtcctgtcagtacacactggacgctaagaggaagcatgtggcagaagccatctgcaaggagcaacacctcttcctgcctttctcctacaagaataagtatgggatggtagcacaagtgacacagactttgaaacttgaagacacaccaaagatcaacagccgcttctttggtgaaggtactaagaagatgggcctcgcatttgagagcaccaaatccacatcacctccaaagcaggccgaagctgttttgaagactctccaggaactgaaaaaactaaccatctctgagcaaaatatccagagagctaatctcttcaataagctggttactgagctgagaggcctcagtgatgaagcagtcacatctctcttgccacagctgattgaggtgtccagccccatcactttacaagccttggttcagtgtggacagcctcagtgctccactcacatcctccagtggctgaaacgtgtgcatgccaacccccttctgatagatgtggtcacctacctggtggccctgatccccgagccctcagcacagcagctgcgagagatcttcaacatggcgagggatcagcgcagccgagccaccttgtatgcgctgagccacgcggtcaacaactatcataagacaaaccctacagggacccaggagctgctggacattgctaattacctgatggaacagattcaagatgactgcactggggatgaagattacacctatttgattctgcgggtcattggaaatatgggccaaaccatggagcagttaactccagaactcaagtcttcaatcctgaaatgtgtccaaagtacaaagccatcactgatgatccagaaagctgccatccaggctctgcggaaaatggagcctaaagacaaggaccaggaggttcttcttcagactttccttgatgatgcttctccgggagataagcgactggctgcctatcttatgttgatgaggagtccttcacaggcagatattaacaaaattgtccaaattctaccatgggaacagaatgagcaagtgaagaactttgtggcttcccatattgccaatatcttgaactcagaagaattggatatccaagatctgaaaaagttagtgaaagaagctctgaaagaatctcaacttccaactgtcatggacttcagaaaattctctcggaactatcaactctacaaatctgtttctcttccatcacttgacccagcctcagccaaaatagaagggaatcttatatttgatccaaataactaccttcctaaagaaagcatgctgaaaactaccctcactgcctttggatttgcttcagctgacctcatcgagattggcttggaaggaaaaggctttgagccaacattggaagctctttttgggaagcaaggatttttcccagacagtgtcaacaaagctttgtactgggttaatggtcaagttcctgatggtgtctctaaggtcttagtggaccactttggctataccaaagatgataaacatgagcaggatatggtaaatggaataatgctcagtgttgagaagctgattaaagatttgaaatccaaagaagtcccggaagccagagcctacctccgcatcttgggagaggagcttggttttgccagtctccatgacctccagctcctgggaaagctgcttctgatgggtgcccgcactctgcaggggatcccccagatgattggagaggtcatcaggaagggctcaaagaatgacttttttcttcactacatcttcatggagaatgcctttgaactccccactggagctggattacagttgcaaatatcttcatctggagtcattgctcccggagccaaggctggagtaaaactggaagtagccaacatgcaggctgaactggtggcaaaaccctccgtgtctgtggagtttgtgacaaatatgggcatcatcattccggacttcgctaggagtggggtccagatgaacaccaacttcttccacgagtcgggtctggaggctcatgttgccctaaaagctgggaagctgaagtttatcattccttccccaaagagaccagtcaagctgctcagtggaggcaacacattacatttggtctctaccaccaaaacggaggtgatcccacctctcattgagaacaggcagtcctggtcagtttgcaagcaagtctttcctggcctgaattactgcacctcaggcgcttactccaacgccagctccacagactccgcctcctactatccgctgaccggggacaccagattagagctggaactgaggcctacaggagagattgagcagtattctgtcagcgcaacctatgagctccagagagaggacagagccttggtggataccctgaagtttgtaactcaagcagaaggtgcgaagcagactgaggctaccatgacattcaaatataatcggcagagtatgaccttgtccagtgaagtccaaattccggattttgatgttgacctcggaacaatcctcagagttaatgatgaatctactgagggcaaaacgtcttacagactcaccctggacattcagaacaagaaaattactgaggtcgccctcatgggccacctaagttgtgacacaaaggaagaaagaaaaatcaagggtgttatttccataccccgtttgcaagcagaagccagaagtgagatcctcgcccactggtcgcctgccaaactgcttctccaaatggactcatctgctacagcttatggctccacagtttccaagagggtggcatggcattatgatgaagagaagattgaatttgaatggaacacaggcaccaatgtagataccaaaaaaatgacttccaatttccctgtggatctctccgattatcctaagagcttgcatatgtatgctaatagactcctggatcacagagtccctcaaacagacatgactttccggcacgtgggttccaaattaatagttgcaatgagctcatggcttcagaaggcatctgggagtcttccttatacccagactttgcaagaccacctcaatagcctgaaggagttcaacctccagaacatgggattgccagacttccacatcccagaaaacctcttcttaaaaagcgatggccgggtcaaatataccttgaacaagaacagtttgaaaattgagattcctttgccttttggtggcaaatcctccagagatctaaagatgttagagactgttaggacaccagccctccacttcaagtctgtgggattccatctgccatctcgagagttccaagtccctacttttaccattcccaagttgtatcaactgcaagtgcctctcctgggtgttctagacctctccacgaatgtctacagcaacttgtacaactggtccgcctcctacagtggtggcaacaccagcacagaccatttcagccttcgggctcgttaccacatgaaggctgactctgtggttgacctgctttcctacaatgtgcaaggatctggagaaacaacatatgaccacaagaatacgttcacactatcatgtgatgggtctctacgccacaaatttctagattcgaatatcaaattcagtcatgtagaaaaacttggaaacaacccagtctcaaaaggtttactaatattcgatgcatctagttcctggggaccacagatgtctgcttcagttcatttggactccaaaaagaaacagcatttgtttgtcaaagaagtcaagattgatgggcagttcagagtctcttcgttctatgctaaaggcacatatggcctgtcttgtcagagggatcctaacactggccggctcaatggagagtccaacctgaggtttaactcctcctacctccaaggcaccaaccagataacaggaagatatgaagatggaaccctctccctcacctccacctctgatctgcaaagtggcatcattaaaaatactgcttccctaaagtatgagaactacgagctgactttaaaatctgacaccaatgggaagtataagaactttgccacttctaacaagatggatatgaccttctctaagcaaaatgcactgctgcgttctgaatatcaggctgattacgagtcattgaggttcttcagcctgctttctggatcactaaattcccatggtcttgagttaaatgctgacatcttaggcactgacaaaattaatagtggtgctcacaaggcgacactaaggattggccaagatggaatatctaccagtgcaacgaccaacttgaagtgtagtctcctggtgctggagaatgagctgaatgcagagcttggcctctctggggcatctatgaaattaacaacaaatggccgcttcagggaacacaatgcaaaattcagtctggatgggaaagccgccctcacagagctatcactgggaagtgcttatcaggccatgattctgggtgtcgacagcaaaaacattttcaacttcaaggtcagtcaagaaggacttaagctctcaaatgacatgatgggctcatatgctgaaatgaaatttgaccacacaaacagtctgaacattgcaggcttatcactggacttctcttcaaaacttgacaacatttacagctctgacaagttttataagcaaactgttaatttacagctacagccctattctctggtaactactttaaacagtgacctgaaatacaatgctctggatctcaccaacaatgggaaactacggctagaacccctgaagctgcatgtggctggtaacctaaaaggagcctaccaaaataatgaaataaaacacatctatgccatctcttctgctgccttatcagcaagctataaagcagacactgttgctaaggttcagggtgtggagtttagccatcggctcaacacagacatcgctgggctggcttcagccattgacatgagcacaaactataattcagactcactgcatttcagcaatgtcttccgttctgtaatggccccgtttaccatgaccatcgatgcacatacaaatggcaatgggaaactcgctctctggggagaacatactgggcagctgtatagcaaattcctgttgaaagcagaacctctggcatttactttctctcatgattacaaaggctccacaagtcatcatctcgtgtctaggaaaagcatcagtgcagctcttgaacacaaagtcagtgccctgcttactccagctgagcagacaggcacctggaaactcaagacccaatttaacaacaatgaatacagccaggacttggatgcttacaacactaaagataaaattggcgtggagcttactggacgaactctggctgacctaactctactagactccccaattaaagtgccacttttactcagtgagcccatcaatatcattgatgctttagagatgagagatgccgttgagaagccccaagaatttacaattgttgcttttgtaaagtatgataaaaaccaagatgttcactccattaacctcccattttttgagaccttgcaagaatattttgagaggaatcgacaaaccattatagttgtactggaaaacgtacagagaaacctgaagcacatcaatattgatcaatttgtaagaaaatacagagcagccctgggaaaactcccacagcaagctaatgattatctgaattcattcaattgggagagacaagtttcacatgccaaggagaaactgactgctctcacaaaaaagtatagaattacagaaaatgatatacaaattgcattagatgatgccaaaatcaactttaatgaaaaactatctcaactgcagacatatatgatacaatttgatcagtatattaaagatagttatgatttacatgatttgaaaatagctattgctaatattattgatgaaatcattgaaaaattaaaaagtcttgatgagcactatcatatccgtgtaaatttagtaaaaacaatccatgatctacatttgtttattgaaaatattgattttaacaaaagtggaagtagtactgcatcctggattcaaaatgtggatactaagtaccaaatcagaatccagatacaagaaaaactgcagcagcttaagagacacatacagaatatagacatccagcacctagctggaaagttaaaacaacacattgaggctattgatgttagagtgcttttagatcaattgggaactacaatttcatttgaaagaataaatgatgttcttgagcatgtcaaacactttgttataaatcttattggggattttgaagtagctgagaaaatcaatgccttcagagccaaagtccatgagttaatcgagaggtatgaagtagaccaacaaatccaggttttaatggataaattagtagagttggcccaccaatacaagttgaaggagactattcagaagctaagcaatgtcctacaacaagttaagataaaagattactttgagaaattggttggatttattgatgatgctgtcaagaagcttaatgaattatcttttaaaacattcattgaagatgttaacaaattccttgacatgttgataaagaaattaaagtcatttgattaccaccagtttgtagatgaaaccaatgacaaaatccgtgaggtgactcagagactcaatggtgaaattcaggctctggaactaccacaaaaagctgaagcattaaaactgtttttagaggaaaccaaggccacagttgcagtgtatctggaaagcctacaggacaccaaaataaccttaatcatcaattggttacaggaggctttaagttcagcatctttggctcacatgaaggccaaattccgagagactctagaagatacacgagaccgaatgtatcaaatggacattcagcaggaacttcaacgatacctgtctctggtaggccaggtttatagcacacttgtcacctacatttctgattggtggactcttgctgctaagaaccttactgactttgcagagcaatattctatccaagattgggctaaacgtatgaaagcattggtagagcaagggttcactgttcctgaaatcaagaccatccttgggaccatgcctgcctttgaagtcagtcttcaggctcttcagaaagctaccttccagacacctgattttatagtccccctaacagatttgaggattccatcagttcagataaacttcaaagacttaaaaaatataaaaatcccatccaggttttccacaccagaatttaccatccttaacaccttccacattccttcctttacaattgactttgtagaaatgaaagtaaagatcatcagaaccattgaccagatgctgaacagtgagctgcagtggcccgttccagatatatatctcagggatctgaaggtggaggacattcctctagcgagaatcaccctgccagacttccgtttaccagaaatcgcaattccagaattcataatcccaactctcaaccttaatgattttcaagttcctgaccttcacataccagaattccagcttccccacatctcacacacaattgaagtacctacttttggcaagctatacagtattctgaaaatccaatctcctcttttcacattagatgcaaatgctgacatagggaatggaaccacctcagcaaacgaagcaggtatcgcagcttccatcactgccaaaggagagtccaaattagaagttctcaattttgattttcaagcaaatgcacaactctcaaaccctaagattaatccgctggctctgaaggagtcagtgaagttctccagcaagtacctgagaacggagcatgggagtgaaatgctgttttttggaaatgctattgagggaaaatcaaacacagtggcaagtttacacacagaaaaaaatacactggagcttagtaatggagtgattgtcaagataaacaatcagcttaccctggatagcaacactaaatacttccacaaattgaacatccccaaactggacttctctagtcaggctgacctgcgcaacgagatcaagacactgttgaaagctggccacatagcatggacttcttctggaaaagggtcatggaaatgggcctgccccagattctcagatgagggaacacatgaatcacaaattagtttcaccatagaaggacccctcacttcctttggactgtccaataagatcaatagcaaacacctaagagtaaaccaaaacttggtttatgaatctggctccctcaacttttctaaacttgaaattcaatcacaagtcgattcccagcatgtgggccacagtgttctaactgctaaaggcatggcactgtttggagaagggaaggcagagtttactgggaggcatgatgctcatttaaatggaaaggttattggaactttgaaaaattctcttttcttttcagcccagccatttgagatcacggcatccacaaacaatgaagggaatttgaaagttcgttttccattaaggttaacagggaagatagacttcctgaataactatgcactgtttctgagtcccagtgcccagcaagcaagttggcaagtaagtgctaggttcaatcagtataagtacaaccaaaatttctctgctggaaacaacgagaacattatggaggcccatgtaggaataaatggagaagcaaatctggatttcttaaacattcctttaacaattcctgaaatgcgtctaccttacacaataatcacaactcctccactgaaagatttctctctatgggaaaaaacaggcttgaaggaattcttgaaaacgacaaagcaatcatttgatttaagtgtaaaagctcagtataagaaaaacaaacacaggcattccatcacaaatcctttggctgtgctttgtgagtttatcagtcagagcatcaaatcctttgacaggcattttgaaaaaaacagaaacaatgcattagattttgtcaccaaatcctataatgaaacaaaaattaagtttgataagtacaaagctgaaaaatctcacgacgagctccccaggacctttcaaattcctggatacactgttccagttgtcaatgttgaagtgtctccattcaccatagagatgtcggcattcggctatgtgttcccaaaagcagtcagcatgcctagtttctccatcctaggttctgacgtccgtgtgccttcatacacattaatcctgccatcattagagctgccagtccttcatgtccctagaaatctcaagctttctcttccacatttcaaggaattgtgtaccataagccatatttttattcctgccatgggcaatattacctatgatttctcctttaaatcaagtgtcatcacactgaataccaatgctgaactttttaaccagtcagatattgttgctcatctcctttcttcatcttcatctgtcattgatgcactgcagtacaaattagagggcaccacaagattgacaagaaaaaggggattgaagttagccacagctctgtctctgagcaacaaatttgtggagggtagtcataacagtactgtgagcttaaccacgaaaaatatggaagtgtcagtggcaaaaaccacaaaagccgaaattccaattttgagaatgaatttcaagcaagaacttaatggaaataccaagtcaaaacctactgtctcttcctccatggaatttaagtatgatttcaattcttcaatgctgtactctaccgctaaaggagcagttgaccacaagcttagcttggaaagcctcacctcttacttttccattgagtcatctaccaaaggagatgtcaagggttcggttctttctcgggaatattcaggaactattgctagtgaggccaacacttacttgaattccaagagcacacggtcttcagtgaagctgcagggcacttccaaaattgatgatatctggaaccttgaagtaaaagaaaattttgctggagaagccacactccaacgcatatattccctctgggagcacagtacgaaaaaccacttacagctagagggcctctttttcaccaacggagaacatacaagcaaagccaccctggaactctctccatggcaaatgtcagctcttgttcaggtccatgcaagtcagcccagttccttccatgatttccctgaccttggccaggaagtggccctgaatgctaacactaagaaccagaagatcagatggaaaaatgaagtccggattcattctgggtctttccagagccaggtcgagctttccaatgaccaagaaaaggcacaccttgacattgcaggatccttagaaggacacctaaggttcctcaaaaatatcatcctaccagtctatgacaagagcttatgggatttcctaaagctggatgtaaccaccagcattggtaggagacagcatcttcgtgtttcaactgcctttgtgtacaccaaaaaccccaatggctattcattctccatccctgtaaaagttttggctgataaattcattattcctgggctgaaactaaatgatctaaattcagttcttgtcatgcctacgttccatgtcccatttacagatcttcaggttccatcgtgcaaacttgacttcagagaaatacaaatctataagaagctgagaacttcatcatttgccctcaacctaccaacactccccgaggtaaaattccctgaagttgatgtgttaacaaaatattctcaaccagaagactccttgattcccttttttgagataaccgtgcctgaatctcagttaactgtgtcccagttcacgcttccaatcgcagactttgagttgcccaccatcatcgtgcctgagcagaccattgagattccctccattaagttctctgtacctgctggaattgtcattccttcctttcaagcactgactgcacgctttgaggtagactctcccgtgtataatgccacttggagtgccagttctctacactcaccccctcatcctccaccactcctcgatcccacctcctcctccaccgctcagcctctcgcacctctcattacacgcttttctccccccacaatctccttccctccgtctcccctcgcactccgccatcacccctcccctcctcttcccctcctcccccttactacccttcctctcctcctccacctctgtccttgttaagctcaccccacc

SEQ ID NO: 438323 - DNA, 8817 bp, Homo sapiens
cattcccaccgggacctgcggggctgagtgcccttctcggttgctgccgctgaggagcccgcccagccagccagggccgcgaggccgaggccaggccgcagcccaggagccgccccaccgcagctggcgatggacccgccgaggcccgcgctgctggcgctgctggcgctgcctgcgctgctgctgctgctgctggcgggcgccagggccgaagaggaaatgctggaaaatgtcagcctggtctgtccaaaagatgcgacccgattcaagcacctccggaagtacacatacaactatgaggctgagagttccagtggagtccctgggactgctgattcaagaagtgccaccaggatcaactgcaaggttgagctggaggttccccagctctgcagcttcatcctgaagaccagccagtgcaccctgaaagaggtgtatggcttcaaccctgagggcaaagccttgctgaagaaaaccaagaactctgaggagtttgctgcagccatgtccaggtatgagctcaagctggccattccagaagggaagcaggttttcctttacccggagaaagatgaacctacttacatcctgaacatcaagaggggcatcatttctgccctcctggttcccccagagacagaagaagccaagcaagtgttgtttctggataccgtgtatggaaactgctccactcactttaccgtcaagacgaggaagggcaatgtggcaacagaaatatccactgaaagagacctggggcagtgtgatcgcttcaagcccatccgcacaggcatcagcccacttgctctcatcaaaggcatgacccgccccttgtcaactctgatcagcagcagccagtcctgtcagtacacactggacgctaagaggaagcatgtggcagaagccatctgcaaggagcaacacctcttcctgcctttctcctacaagaataagtatgggatggtagcacaagtgacacagactttgaaacttgaagacacaccaaagatcaacagccgcttctttggtgaaggtactaagaagatgggcctcgcatttgagagcaccaaatccacatcacctccaaagcaggccgaagctgttttgaagactctccaggaactgaaaaaactaaccatctctgagcaaaatatccagagagctaatctcttcaataagctggttactgagctgagaggcctcagtgatgaagcagtcacatctctcttgccacagctgattgaggtgtccagccccatcactttacaagccttggttcagtgtggacagcctcagtgctccactcacatcctccagtggctgaaacgtgtgcatgccaacccccttctgatagatgtggtcacctacctggtggccctgatccccgagccctcagcacagcagctgcgagagatcttcaacatggcgagggatcagcgcagccgagccaccttgtatgcgctgagccacgcggtcaacaactatcataagacaaaccctacagggacccaggagctgctggacattgctaattacctgatggaacagattcaagatgactgcactggggatgaagattacacctatttgattctgcgggtcattggaaatatgggccaaaccatggagcagttaactccagaactcaagtcttcaatcctgaaatgtgtccaaagtacaaagccatcactgatgatccagaaagctgccatccaggctctgcggaaaatggagcctaaagacaaggaccaggaggttcttcttcagactttccttgatgatgcttctccgggagataagcgactggctgcctatcttatgttgatgaggagtccttcacaggcagatattaacaaaattgtccaaattctaccatgggaacagaatgagcaagtgaagaactttgtggcttcccatattgccaatatcttgaactcagaagaattggatatccaagatctgaaaaagttagtgaaagaagctctgaaagaatctcaacttccaactgtcatggacttcagaaaattctctcggaactatcaactctacaaatctgtttctcttccatcacttgacccagcctcagccaaaatagaagggaatcttatatttgatccaaataactaccttcctaaagaaagcatgctgaaaactaccctcactgcctttggatttgcttcagctgacctcatcgagattggcttggaaggaaaaggctttgagccaacattggaagctctttttgggaagcaaggatttttcccagacagtgtcaacaaagctttgtactgggttaatggtcaagttcctgatggtgtctctaaggtcttagtggaccactttggctataccaaagatgataaacatgagcaggatatggtaaatggaataatgctcagtgttgagaagctgattaaagatttgaaatccaaagaagtcccggaagccagagcctacctccgcatcttgggagaggagcttggttttgccagtctccatgacctccagctcctgggaaagctgcttctgatgggtgcccgcactctgcaggggatcccccagatgattggagaggtcatcaggaagggctcaaagaatgacttttttcttcactacatcttcatggagaatgcctttgaactccccactggagctggattacagttgcaaatatcttcatctggagtcattgctcccggagccaaggctggagtaaaactggaagtagccaacatgcaggctgaactggtggcaaaaccctccgtgtctgtggagtttgtgacaaatatgggcatcatcattccggacttcgctaggagtggggtccagatgaacaccaacttcttccacgagtcgggtctggaggctcatgttgccctaaaagctgggaagctgaagtttatcattccttccccaaagagaccagtcaagctgctcagtggaggcaacacattacatttggtctctaccaccaaaacggaggtgatcccacctctcattgagaacaggcagtcctggtcagtttgcaagcaagtctttcctggcctgaattactgcacctcaggcgcttactccaacgccagctccacagactccgcctcctactatccgctgaccggggacaccagattagagctggaactgaggcctacaggagagattgagcagtattctgtcagcgcaacctatgagctccagagagaggacagagccttggtggataccctgaagtttgtaactcaagcagaaggtgcgaagcagactgaggctaccatgacattcaaatataatcggcagagtatgaccttgtccagtgaagtccaaattccggattttgatgttgacctcggaacaatcctcagagttaatgatgaatctactgagggcaaaacgtcttacagactcaccctggacattcagaacaagaaaattactgaggtcgccctcatgggccacctaagttgtgacacaaaggaagaaagaaaaatcaagggtgttatttccataccccgtttgcaagcagaagccagaagtgagatcctcgcccactggtcgcctgccaaactgcttctccaaatggactcatctgctacagcttatggctccacagtttccaagagggtggcatggcattatgatgaagagaagattgaatttgaatggaacacaggcaccaatgtagataccaaaaaaatgacttccaatttccctgtggatctctccgattatcctaagagcttgcatatgtatgctaatagactcctggatcacagagtccctcaaacagacatgactttccggcacgtgggttccaaattaatagttgcaatgagctcatggcttcagaaggcatctgggagtcttccttatacccagactttgcaagaccacctcaatagcctgaaggagttcaacctccagaacatgggattgccagacttccacatcccagaaaacctcttcttaaaaagcgatggccgggtcaaatataccttgaacaagaacagtttgaaaattgagattcctttgccttttggtggcaaatcctccagagatctaaagatgttagagactgttaggacaccagccctccacttcaagtctgtgggattccatctgccatctcgagagttccaagtccctacttttaccattcccaagttgtatcaactgcaagtgcctctcctgggtgttctagacctctccacgaatgtctacagcaacttgtacaactggtccgcctcctacagtggtggcaacaccagcacagaccatttcagccttcgggctcgttaccacatgaaggctgactctgtggttgacctgctttcctacaatgtgcaaggatctggagaaacaacatatgaccacaagaatacgttcacactatcatgtgatgggtctctacgccacaaatttctagattcgaatatcaaattcagtcatgtagaaaaacttggaaacaacccagtctcaaaaggtttactaatattcgatgcatctagttcctggggaccacagatgtctgcttcagttcatttggactccaaaaagaaacagcatttgtttgtcaaagaagtcaagattgatgggcagttcagagtctcttcgttctatgctaaaggcacatatggcctgtcttgtcagagggatcctaacactggccggctcaatggagagtccaacctgaggtttaactcctcctacctccaaggcaccaaccagataacaggaagatatgaagatggaaccctctccctcacctccacctctgatctgcaaagtggcatcattaaaaatactgcttccctaaagtatgagaactacgagctgactttaaaatctgacaccaatgggaagtataagaactttgccacttctaacaagatggatatgaccttctctaagcaaaatgcactgctgcgttctgaatatcaggctgattacgagtcattgaggttcttcagcctgctttctggatcactaaattcccatggtcttgagttaaatgctgacatcttaggcactgacaaaattaatagtggtgctcacaaggcgacactaaggattggccaagatggaatatctaccagtgcaacgaccaacttgaagtgtagtctcctggtgctggagaatgagctgaatgcagagcttggcctctctggggcatctatgaaattaacaacaaatggccgcttcagggaacacaatgcaaaattcagtctggatgggaaagccgccctcacagagctatcactgggaagtgcttatcaggccatgattctgggtgtcgacagcaaaaacattttcaacttcaaggtcagtcaagaaggacttaagctctcaaatgacatgatgggctcatatgctgaaatgaaatttgaccacacaaacagtctgaacattgcaggcttatcactggacttctcttcaaaacttgacaacatttacagctctgacaagttttataagcaaactgttaatttacagctacagccctattctctggtaactactttaaacagtgacctgaaatacaatgctctggatctcaccaacaatgggaaactacggctagaacccctgaagctgcatgtggctggtaacctaaaaggagcctaccaaaataatgaaataaaacacatctatgccatctcttctgctgccttatcagcaagctataaagcagacactgttgctaaggttcagggtgtggagtttagccatcggctcaacacagacatcgctgggctggcttcagccattgacatgagcacaaactataattcagactcactgcatttcagcaatgtcttccgttctgtaatggccccgtttaccatgaccatcgatgcacatacaaatggcaatgggaaactcgctctctggggagaacatactgggcagctgtatagcaaattcctgttgaaagcagaacctctggcatttactttctctcatgattacaaaggctccacaagtcatcatctcgtgtctaggaaaagcatcagtgcagctcttgaacacaaagtcagtgccctgcttactccagctgagcagacaggcacctggaaactcaagacccaatttaacaacaatgaatacagccaggacttggatgcttacaacactaaagataaaattggcgtggagcttactggacgaactctggctgacctaactctactagactccccaattaaagtgccacttttactcagtgagcccatcaatatcattgatgctttagagatgagagatgccgttgagaagccccaagaatttacaattgttgcttttgtaaagtatgataaaaaccaagatgttcactccattaacctcccattttttgagaccttgcaagaatattttgagaggaatcgacaaaccattatagttgtactggaaaacgtacagagaaacctgaagcacatcaatattgatcaatttgtaagaaaatacagagcagccctgggaaaactcccacagcaagctaatgattatctgaattcattcaattgggagagacaagtttcacatgccaaggagaaactgactgctctcacaaaaaagtatagaattacagaaaatgatatacaaattgcattagatgatgccaaaatcaactttaatgaaaaactatctcaactgcagacatatatgatacaatttgatcagtatattaaagatagttatgatttacatgatttgaaaatagctattgctaatattattgatgaaatcattgaaaaattaaaaagtcttgatgagcactatcatatccgtgtaaatttagtaaaaacaatccatgatctacatttgtttattgaaaatattgattttaacaaaagtggaagtagtactgcatcctggattcaaaatgtggatactaagtaccaaatcagaatccagatacaagaaaaactgcagcagcttaagagacacatacagaatatagacatccagcacctagctggaaagttaaaacaacacattgaggctattgatgttagagtgcttttagatcaattgggaactacaatttcatttgaaagaataaatgatgttcttgagcatgtcaaacactttgttataaatcttattggggattttgaagtagctgagaaaatcaatgccttcagagccaaagtccatgagttaatcgagaggtatgaagtagaccaacaaatccaggttttaatggataaattagtagagttggcccaccaatacaagttgaaggagactattcagaagctaagcaatgtcctacaacaagttaagataaaagattactttgagaaattggttggatttattgatgatgctgtcaagaagcttaatgaattatcttttaaaacattcattgaagatgttaacaaattccttgacatgttgataaagaaattaaagtcatttgattaccaccagtttgtagatgaaaccaatgacaaaatccgtgaggtgactcagagactcaatggtgaaattcaggctctggaactaccacaaaaagctgaagcattaaaactgtttttagaggaaaccaaggccacagttgcagtgtatctggaaagcctacaggacaccaaaataaccttaatcatcaattggttacaggaggctttaagttcagcatctttggctcacatgaaggccaaattccgagagactctagaagatacacgagaccgaatgtatcaaatggacattcagcaggaacttcaacgatacctgtctctggtaggccaggtttatagcacacttgtcacctacatttctgattggtggactcttgctgctaagaaccttactgactttgcagagcaatattctatccaagattgggctaaacgtatgaaagcattggtagagcaagggttcactgttcctgaaatcaagaccatccttgggaccatgcctgcctttgaagtcagtcttcaggctcttcagaaagctaccttccagacacctgattttatagtccccctaacagatttgaggattccatcagttcagataaacttcaaagacttaaaaaatataaaaatcccatccaggttttccacaccagaatttaccatccttaacaccttccacattccttcctttacaattgactttgtagaaatgaaagtaaagatcatcagaaccattgaccagatgctgaacagtgagctgcagtggcccgttccagatatatatctcagggatctgaaggtggaggacattcctctagcgagaatcaccctgccagacttccgtttaccagaaatcgcaattccagaattcataatcccaactctcaaccttaatgattttcaagttcctgaccttcacataccagaattccagcttccccacatctcacacacaattgaagtacctacttttggcaagctatacagtattctgaaaatccaatctcctcttttcacattagatgcaaatgctgacatagggaatggaaccacctcagcaaacgaagcaggtatcgcagcttccatcactgccaaaggagagtccaaattagaagttctcaattttgattttcaagcaaatgcacaactctcaaaccctaagattaatccgctggctctgaaggagtcagtgaagttctccagcaagtacctgagaacggagcatgggagtgaaatgctgttttttggaaatgctattgagggaaaatcaaacacagtggcaagtttacacacagaaaaaaatacactggagcttagtaatggagtgattgtcaagataaacaatcagcttaccctggatagcaacactaaatacttccacaaattgaacatcccc

SEQ ID NO: 438324 - DNA, 578 bp, Homo sapiens
aaaacaggtctcaagctattttattgaaatattatttaaaaaataaaacccaatgcaaattgatatgtacatcatctcaataggcctttggtttcaaaaaattgattttatcataatataatacatttcaagtacaccttcacttacagtcagactccagaacaccagaattaagccatggcatatatgatacttaaagtccataaagctctgaggcccagcaatattcttaagagccttctgagtccacttgaaaatgacatgatatctatctagtgaaatttcttatatcctgattcactgaaaacggtaaaaacatcagtttgatctttatttatcaaactattcagctcatcaaaatatgctagtccttcctttccagataaagaggaattactctccaatgtatgggaggttgtaattaacaaaaccgactttaaaaagacttacttttatttgctctcccttgttgggtctacagattggagaggtcatcaggaagggctcaaagaatgacttttttcttcactacatcttcatggagaatgcctttgaactccccactggagctggattac

SEQ ID NO: 438325 - DNA, 568 bp, Homo sapiens
ccaaaagattgattgacctgtccattcaaaactaccacacatttctgatatacatcacggagttactgaaaaagctgcaatcaaccacagtcatgaacccctacatgaagcttgctccaggagaacttactatcatcctctaattttttaaaagaaatcttcatttattcttcttttccaattgaactttcacatagcacagaaaaaattcaaactgcctatattgataaaaccatacagtgagccagccttgcagtaggcagtagactataagcagaagcacatatgaactggacctgcaccaaagctggcaccagggctcggaaggtctctgaactcagaaggatggcattttttgcaagttaaagaaaatcaggatctgagttattttgctaaacttgggggaggaggaacaaataaatggagtctttattgtgtatcataacactgaatgtggctcatttgtattgaaagacagtgaaacgagggcattgataaaatgttctggcacagcaaaacctctagaacacatagtgtgatttaagtaacagaataaaaatggaaacgg

SEQ ID NO: 438326 - DNA, 14126 bp, Homo sapiens
cattcccaccgggacctgcggggctgagtgcccttctcggttgctgccgctgaggagcccgcccagccagccagggccgcgaggccgaggccaggccgcagcccaggagccgccccaccgcagctggcgatggacccgccgaggcccgcgctgctggcgctgctggcgctgcctgcgctgctgctgctgctgctggcgggcgccagggccgaagaggaaatgctggaaaatgtcagcctggtctgtccaaaagatgcgacccgattcaagcacctccggaagtacacatacaactatgaggctgagagttccagtggagtccctgggactgctgattcaagaagtgccaccaggatcaactgcaaggttgagctggaggttccccagctctgcagcttcatcctgaagaccagccagtgcaccctgaaagaggtgtatggcttcaaccctgagggcaaagccttgctgaagaaaaccaagaactctgaggagtttgctgcagccatgtccaggtatgagctcaagctggccattccagaagggaagcaggttttcctttacccggagaaagatgaacctacttacatcctgaacatcaagaggggcatcatttctgccctcctggttcccccagagacagaagaagccaagcaagtgttgtttctggataccgtgtatggaaactgctccactcactttaccgtcaagacgaggaagggcaatgtggcaacagaaatatccactgaaagagacctggggcagtgtgatcgcttcaagcccatccgcacaggcatcagcccacttgctctcatcaaaggcatgacccgccccttgtcaactctgatcagcagcagccagtcctgtcagtacacactggacgctaagaggaagcatgtggcagaagccatctgcaaggagcaacacctcttcctgcctttctcctacaagaataagtatgggatggtagcacaagtgacacagactttgaaacttgaagacacaccaaagatcaacagccgcttctttggtgaaggtactaagaagatgggcctcgcatttgagagcaccaaatccacatcacctccaaagcaggccgaagctgttttgaagactctccaggaactgaaaaaactaaccatctctgagcaaaatatccagagagctaatctcttcaataagctggttactgagctgagaggcctcagtgatgaagcagtcacatctctcttgccacagctgattgaggtgtccagccccatcactttacaagccttggttcagtgtggacagcctcagtgctccactcacatcctccagtggctgaaacgtgtgcatgccaacccccttctgatagatgtggtcacctacctggtggccctgatccccgagccctcagcacagcagctgcgagagatcttcaacatggcgagggatcagcgcagccgagccaccttgtatgcgctgagccacgcggtcaacaactatcataagacaaaccctacagggacccaggagctgctggacattgctaattacctgatggaacagattcaagatgactgcactggggatgaagattacacctatttgattctgcgggtcattggaaatatgggccaaaccatggagcagttaactccagaactcaagtcttcaatcctgaaatgtgtccaaagtacaaagccatcactgatgatccagaaagctgccatccaggctctgcggaaaatggagcctaaagacaaggaccaggaggttcttcttcagactttccttgatgatgcttctccgggagataagcgactggctgcctatcttatgttgatgaggagtccttcacaggcagatattaacaaaattgtccaaattctaccatgggaacagaatgagcaagtgaagaactttgtggcttcccatattgccaatatcttgaactcagaagaattggatatccaagatctgaaaaagttagtgaaagaagctctgaaagaatctcaacttccaactgtcatggacttcagaaaattctctcggaactatcaactctacaaatctgtttctcttccatcacttgacccagcctcagccaaaatagaagggaatcttatatttgatccaaataactaccttcctaaagaaagcatgctgaaaactaccctcactgcctttggatttgcttcagctgacctcatcgagattggcttggaaggaaaaggctttgagccaacattggaagctctttttgggaagcaaggatttttcccagacagtgtcaacaaagctttgtactgggttaatggtcaagttcctgatggtgtctctaaggtcttagtggaccactttggctataccaaagatgataaacatgagcaggatatggtaaatggaataatgctcagtgttgagaagctgattaaagatttgaaatccaaagaagtcccggaagccagagcctacctccgcatcttgggagaggagcttggttttgccagtctccatgacctccagctcctgggaaagctgcttctgatgggtgcccgcactctgcaggggatcccccagatgattggagaggtcatcaggaagggctcaaagaatgacttttttcttcactacatcttcatggagaatgcctttgaactccccactggagctggattacagttgcaaatatcttcatctggagtcattgctcccggagccaaggctggagtaaaactggaagtagccaacatgcaggctgaactggtggcaaaaccctccgtgtctgtggagtttgtgacaaatatgggcatcatcattccggacttcgctaggagtggggtccagatgaacaccaacttcttccacgagtcgggtctggaggctcatgttgccctaaaagctgggaagctgaagtttatcattccttccccaaagagaccagtcaagctgctcagtggaggcaacacattacatttggtctctaccaccaaaacggaggtgatcccacctctcattgagaacaggcagtcctggtcagtttgcaagcaagtctttcctggcctgaattactgcacctcaggcgcttactccaacgccagctccacagactccgcctcctactatccgctgaccggggacaccagattagagctggaactgaggcctacaggagagattgagcagtattctgtcagcgcaacctatgagctccagagagaggacagagccttggtggataccctgaagtttgtaactcaagcagaaggtgcgaagcagactgaggctaccatgacattcaaatataatcggcagagtatgaccttgtccagtgaagtccaaattccggattttgatgttgacctcggaacaatcctcagagttaatgatgaatctactgagggcaaaacgtcttacagactcaccctggacattcagaacaagaaaattactgaggtcgccctcatgggccacctaagttgtgacacaaaggaagaaagaaaaatcaagggtgttatttccataccccgtttgcaagcagaagccagaagtgagatcctcgcccactggtcgcctgccaaactgcttctccaaatggactcatctgctacagcttatggctccacagtttccaagagggtggcatggcattatgatgaagagaagattgaatttgaatggaacacaggcaccaatgtagataccaaaaaaatgacttccaatttccctgtggatctctccgattatcctaagagcttgcatatgtatgctaatagactcctggatcacagagtccctcaaacagacatgactttccggcacgtgggttccaaattaatagttgcaatgagctcatggcttcagaaggcatctgggagtcttccttatacccagactttgcaagaccacctcaatagcctgaaggagttcaacctccagaacatgggattgccagacttccacatcccagaaaacctcttcttaaaaagcgatggccgggtcaaatataccttgaacaagaacagtttgaaaattgagattcctttgccttttggtggcaaatcctccagagatctaaagatgttagagactgttaggacaccagccctccacttcaagtctgtgggattccatctgccatctcgagagttccaagtccctacttttaccattcccaagttgtatcaactgcaagtgcctctcctgggtgttctagacctctccacgaatgtctacagcaacttgtacaactggtccgcctcctacagtggtggcaacaccagcacagaccatttcagccttcgggctcgttaccacatgaaggctgactctgtggttgacctgctttcctacaatgtgcaaggatctggagaaacaacatatgaccacaagaatacgttcacactatcatgtgatgggtctctacgccacaaatttctagattcgaatatcaaattcagtcatgtagaaaaacttggaaacaacccagtctcaaaaggtttactaatattcgatgcatctagttcctggggaccacagatgtctgcttcagttcatttggactccaaaaagaaacagcatttgtttgtcaaagaagtcaagattgatgggcagttcagagtctcttcgttctatgctaaaggcacatatggcctgtcttgtcagagggatcctaacactggccggctcaatggagagtccaacctgaggtttaactcctcctacctccaaggcaccaaccagataacaggaagatatgaagatggaaccctctccctcacctccacctctgatctgcaaagtggcatcattaaaaatactgcttccctaaagtatgagaactacgagctgactttaaaatctgacaccaatgggaagtataagaactttgccacttctaacaagatggatatgaccttctctaagcaaaatgcactgctgcgttctgaatatcaggctgattacgagtcattgaggttcttcagcctgctttctggatcactaaattcccatggtcttgagttaaatgctgacatcttaggcactgacaaaattaatagtggtgctcacaaggcgacactaaggattggccaagatggaatatctaccagtgcaacgaccaacttgaagtgtagtctcctggtgctggagaatgagctgaatgcagagcttggcctctctggggcatctatgaaattaacaacaaatggccgcttcagggaacacaatgcaaaattcagtctggatgggaaagccgccctcacagagctatcactgggaagtgcttatcaggccatgattctgggtgtcgacagcaaaaacattttcaacttcaaggtcagtcaagaaggacttaagctctcaaatgacatgatgggctcatatgctgaaatgaaatttgaccacacaaacagtctgaacattgcaggcttatcactggacttctcttcaaaacttgacaacatttacagctctgacaagttttataagcaaactgttaatttacagctacagccctattctctggtaactactttaaacagtgacctgaaatacaatgctctggatctcaccaacaatgggaaactacggctagaacccctgaagctgcatgtggctggtaacctaaaaggagcctaccaaaataatgaaataaaacacatctatgccatctcttctgctgccttatcagcaagctataaagcagacactgttgctaaggttcagggtgtggagtttagccatcggctcaacacagacatcgctgggctggcttcagccattgacatgagcacaaactataattcagactcactgcatttcagcaatgtcttccgttctgtaatggccccgtttaccatgaccatcgatgcacatacaaatggcaatgggaaactcgctctctggggagaacatactgggcagctgtatagcaaattcctgttgaaagcagaacctctggcatttactttctctcatgattacaaaggctccacaagtcatcatctcgtgtctaggaaaagcatcagtgcagctcttgaacacaaagtcagtgccctgcttactccagctgagcagacaggcacctggaaactcaagacccaatttaacaacaatgaatacagccaggacttggatgcttacaacactaaagataaaattggcgtggagcttactggacgaactctggctgacctaactctactagactccccaattaaagtgccacttttactcagtgagcccatcaatatcattgatgctttagagatgagagatgccgttgagaagccccaagaatttacaattgttgcttttgtaaagtatgataaaaaccaagatgttcactccattaacctcccattttttgagaccttgcaagaatattttgagaggaatcgacaaaccattatagttgtactggaaaacgtacagagaaacctgaagcacatcaatattgatcaatttgtaagaaaatacagagcagccctgggaaaactcccacagcaagctaatgattatctgaattcattcaattgggagagacaagtttcacatgccaaggagaaactgactgctctcacaaaaaagtatagaattacagaaaatgatatacaaattgcattagatgatgccaaaatcaactttaatgaaaaactatctcaactgcagacatatatgatacaatttgatcagtatattaaagatagttatgatttacatgatttgaaaatagctattgctaatattattgatgaaatcattgaaaaattaaaaagtcttgatgagcactatcatatccgtgtaaatttagtaaaaacaatccatgatctacatttgtttattgaaaatattgattttaacaaaagtggaagtagtactgcatcctggattcaaaatgtggatactaagtaccaaatcagaatccagatacaagaaaaactgcagcagcttaagagacacatacagaatatagacatccagcacctagctggaaagttaaaacaacacattgaggctattgatgttagagtgcttttagatcaattgggaactacaatttcatttgaaagaataaatgatgttcttgagcatgtcaaacactttgttataaatcttattggggattttgaagtagctgagaaaatcaatgccttcagagccaaagtccatgagttaatcgagaggtatgaagtagaccaacaaatccaggttttaatggataaattagtagagttggcccaccaatacaagttgaaggagactattcagaagctaagcaatgtcctacaacaagttaagataaaagattactttgagaaattggttggatttattgatgatgctgtcaagaagcttaatgaattatcttttaaaacattcattgaagatgttaacaaattccttgacatgttgataaagaaattaaagtcatttgattaccaccagtttgtagatgaaaccaatgacaaaatccgtgaggtgactcagagactcaatggtgaaattcaggctctggaactaccacaaaaagctgaagcattaaaactgtttttagaggaaaccaaggccacagttgcagtgtatctggaaagcctacaggacaccaaaataaccttaatcatcaattggttacaggaggctttaagttcagcatctttggctcacatgaaggccaaattccgagagactctagaagatacacgagaccgaatgtatcaaatggacattcagcaggaacttcaacgatacctgtctctggtaggccaggtttatagcacacttgtcacctacatttctgattggtggactcttgctgctaagaaccttactgactttgcagagcaatattctatccaagattgggctaaacgtatgaaagcattggtagagcaagggttcactgttcctgaaatcaagaccatccttgggaccatgcctgcctttgaagtcagtcttcaggctcttcagaaagctaccttccagacacctgattttatagtccccctaacagatttgaggattccatcagttcagataaacttcaaagacttaaaaaatataaaaatcccatccaggttttccacaccagaatttaccatccttaacaccttccacattccttcctttacaattgactttgtagaaatgaaagtaaagatcatcagaaccattgaccagatgctgaacagtgagctgcagtggcccgttccagatatatatctcagggatctgaaggtggaggacattcctctagcgagaatcaccctgccagacttccgtttaccagaaatcgcaattccagaattcataatcccaactctcaaccttaatgattttcaagttcctgaccttcacataccagaattccagcttccccacatctcacacacaattgaagtacctacttttggcaagctatacagtattctgaaaatccaatctcctcttttcacattagatgcaaatgctgacatagggaatggaaccacctcagcaaacgaagcaggtatcgcagcttccatcactgccaaaggagagtccaaattagaagttctcaattttgattttcaagcaaatgcacaactctcaaaccctaagattaatccgctggctctgaaggagtcagtgaagttctccagcaagtacctgagaacggagcatgggagtgaaatgctgttttttggaaatgctattgagggaaaatcaaacacagtggcaagtttacacacagaaaaaaatacactggagcttagtaatggagtgattgtcaagataaacaatcagcttaccctggatagcaacactaaatacttccacaaattgaacatccccaaactggacttctctagtcaggctgacctgcgcaacgagatcaagacactgttgaaagctggccacatagcatggacttcttctggaaaagggtcatggaaatgggcctgccccagattctcagatgagggaacacatgaatcacaaattagtttcaccatagaaggacccctcacttcctttggactgtccaataagatcaatagcaaacacctaagagtaaaccaaaacttggtttatgaatctggctccctcaacttttctaaacttgaaattcaatcacaagtcgattcccagcatgtgggccacagtgttctaactgctaaaggcatggcactgtttggagaagggaaggcagagtttactgggaggcatgatgctcatttaaatggaaaggttattggaactttgaaaaattctcttttcttttcagcccagccatttgagatcacggcatccacaaacaatgaagggaatttgaaagttcgttttccattaaggttaacagggaagatagacttcctgaataactatgcactgtttctgagtcccagtgcccagcaagcaagttggcaagtaagtgctaggttcaatcagtataagtacaaccaaaatttctctgctggaaacaacgagaacattatggaggcccatgtaggaataaatggagaagcaaatctggatttcttaaacattcctttaacaattcctgaaatgcgtctaccttacacaataatcacaactcctccactgaaagatttctctctatgggaaaaaacaggcttgaaggaattcttgaaaacgacaaagcaatcatttgatttaagtgtaaaagctcagtataagaaaaacaaacacaggcattccatcacaaatcctttggctgtgctttgtgagtttatcagtcagagcatcaaatcctttgacaggcattttgaaaaaaacagaaacaatgcattagattttgtcaccaaatcctataatgaaacaaaaattaagtttgataagtacaaagctgaaaaatctcacgacgagctccccaggacctttcaaattcctggatacactgttccagttgtcaatgttgaagtgtctccattcaccatagagatgtcggcattcggctatgtgttcccaaaagcagtcagcatgcctagtttctccatcctaggttctgacgtccgtgtgccttcatacacattaatcctgccatcattagagctgccagtccttcatgtccctagaaatctcaagctttctcttccacatttcaaggaattgtgtaccataagccatatttttattcctgccatgggcaatattacctatgatttctcctttaaatcaagtgtcatcacactgaataccaatgctgaactttttaaccagtcagatattgttgctcatctcctttcttcatcttcatctgtcattgatgcactgcagtacaaattagagggcaccacaagattgacaagaaaaaggggattgaagttagccacagctctgtctctgagcaacaaatttgtggagggtagtcataacagtactgtgagcttaaccacgaaaaatatggaagtgtcagtggcaaaaaccacaaaagccgaaattccaattttgagaatgaatttcaagcaagaacttaatggaaataccaagtcaaaacctactgtctcttcctccatggaatttaagtatgatttcaattcttcaatgctgtactctaccgctaaaggagcagttgaccacaagcttagcttggaaagcctcacctcttacttttccattgagtcatctaccaaaggagatgtcaagggttcggttctttctcgggaatattcaggaactattgctagtgaggccaacacttacttgaattccaagagcacacggtcttcagtgaagctgcagggcacttccaaaattgatgatatctggaaccttgaagtaaaagaaaattttgctggagaagccacactccaacgcatatattccctctgggagcacagtacgaaaaaccacttacagctagagggcctctttttcaccaacggagaacatacaagcaaagccaccctggaactctctccatggcaaatgtcagctcttgttcaggtccatgcaagtcagcccagttccttccatgatttccctgaccttggccaggaagtggccctgaatgctaacactaagaaccagaagatcagatggaaaaatgaagtccggattcattctgggtctttccagagccaggtcgagctttccaatgaccaagaaaaggcacaccttgacattgcaggatccttagaaggacacctaaggttcctcaaaaatatcatcctaccagtctatgacaagagcttatgggatttcctaaagctggatgtaaccaccagcattggtaggagacagcatcttcgtgtttcaactgcctttgtgtacaccaaaaaccccaatggctattcattctccatccctgtaaaagttttggctgataaattcattattcctgggctgaaactaaatgatctaaattcagttcttgtcatgcctacgttccatgtcccatttacagatcttcaggttccatcgtgcaaacttgacttcagagaaatacaaatctataagaagctgagaacttcatcatttgccctcaacctaccaacactccccgaggtaaaattccctgaagttgatgtgttaacaaaatattctcaaccagaagactccttgattcccttttttgagataaccgtgcctgaatctcagttaactgtgtcccagttcacgcttccaaaaagtgtttcagatggcattgctgctttggatctaaatgcagtagccaacaagatcgcagactttgagttgcccaccatcatcgtgcctgagcagaccattgagattccctccattaagttctctgtacctgctggaattgtcattccttcctttcaagcactgactgcacgctttgaggtagactctcccgtgtataatgccacttggagtgccagtttgaaaaacaaagcagattatgttgaaacagtcctggattccacatgcagctcaaccgtacagttcctagaatatgaactaaatgttttgggaacacacaaaatcgaagatggtacgttagcctctaagactaaaggaacatttgcacaccgtgacttcagtgcagaatatgaagaagatggcaaatatgaaggacttcaggaatgggaaggaaaagcgcacctcaatatcaaaagcccagcgttcaccgatctccatctgcgctaccagaaagacaagaaaggcatctccacctcagcagcctccccagccgtaggcaccgtgggcatggatatggatgaagatgacgacttttctaaatggaacttctactacagccctcagtcctctccagataaaaaactcaccatattcaaaactgagttgagggtccgggaatctgatgaggaaactcagatcaaagttaattgggaagaagaggcagcttctggcttgctaacctctctgaaagacaacgtgcccaaggccacaggggtcctttatgattatgtcaacaagtaccactgggaacacacagggctcaccctgagagaagtgtcttcaaagctgagaagaaatctgcagaacaatgctgagtgggtttatcaaggggccattaggcaaattgatgatatcgacgtgaggttccagaaagcagccagtggcaccactgggacctaccaagagtggaaggacaaggcccagaatctgtaccaggaactgttgactcaggaaggccaagccagtttccagggactcaaggataacgtgtttgatggcttggtacgagttactcaagaattccatatgaaagtcaagcatctgattgactcactcattgattttctgaacttccccagattccagtttccggggaaacctgggatatacactagggaggaactttgcactatgttcataagggaggtagggacggtactgtcccaggtatattcgaaagtccataatggttcagaaatactgttttcctatttccaagacctagtgattacacttcctttcgagttaaggaaacataaactaatagatgtaatctcgatgtatagggaactgttgaaagatttatcaaaagaagcccaagaggtatttaaagccattcagtctctcaagaccacagaggtgctacgtaatcttcaggaccttttacaattcattttccaactaatagaagataacattaaacagctgaaagagatgaaatttacttatcttattaattatatccaagatgagatcaacacaatcttcagtgattatatcccatatgtttttaaattgttgaaagaaaacctatgccttaatcttcataagttcaatgaatttattcaaaacgagcttcaggaagcttctcaagagttacagcagatccatcaatacattatggcccttcgtgaagaatattttgatccaagtatagttggctggacagtgaaatattatgaacttgaagaaaagatagtcagtctgatcaagaacctgttagttgctcttaaggacttccattctgaatatattgtcagtgcctctaactttacttcccaactctcaagtcaagttgagcaatttctgcacagaaatattcaggaatatcttagcatccttaccgatccagatggaaaagggaaagagaagattgcagagctttctgccactgctcaggaaataattaaaagccaggccattgcgacgaagaaaataatttctgattaccaccagcagtttagatataaactgcaagatttttcagaccaactctctgattactatgaaaaatttattgctgaatccaaaagattgattgacctgtccattcaaaactaccacacatttctgatatacatcacggagttactgaaaaagctgcaatcaaccacagtcatgaacccctacatgaagcttgctccaggagaacttactatcatcctctaattttttaaaagaaatcttcatttattcttcttttccaattgaactttcacatagcacagaaaaaattcaaactgcctatattgataaaaccatacagtgagccagccttgcagtaggcagtagactataagcagaagcacatatgaactggacctgcaccaaagctggcaccagggctcggaaggtctctgaactcagaaggatggcattttttgcaagttaaagaaaatcaggatctgagttattttgctaaacttgggggaggaggaacaaataaatggagtctttattgtgtatcataacac

SEQ ID NO: 438327 - DNA, 14066 bp, Homo sapiens
cattcccaccgggacctgcggggctgagtgcccttctcggttgctgccgctgaggagcccgcccagccagccagggccgcgaggccgaggccaggccgcagcccaggagccgccccaccgcagctggcgatggacccgccgaggcccgcgctgctggcgctgctggcgctgcctgcgctgctgctgctgctgctggcgggcgccagggccgaagaggaaatgctggaaaatgtcagcctggtctgtccaaaagatgcgacccgattcaagcacctccggaagtacacatacaactatgaggctgagagttccagtggagtccctgggactgctgattcaagaagtgccaccaggatcaactgcaaggttgagctggaggttccccagctctgcagcttcatcctgaagaccagccagtgcaccctgaaagaggtgtatggcttcaaccctgagggcaaagccttgctgaagaaaaccaagaactctgaggagtttgctgcagccatgtccaggtatgagctcaagctggccattccagaagggaagcaggttttcctttacccggagaaagatgaacctacttacatcctgaacatcaagaggggcatcatttctgccctcctggttcccccagagacagaagaagccaagcaagtgttgtttctggataccgtgtatggaaactgctccactcactttaccgtcaagacgaggaagggcaatgtggcaacagaaatatccactgaaagagacctggggcagtgtgatcgcttcaagcccatccgcacaggcatcagcccacttgctctcatcaaaggcatgacccgccccttgtcaactctgatcagcagcagccagtcctgtcagtacacactggacgctaagaggaagcatgtggcagaagccatctgcaaggagcaacacctcttcctgcctttctcctacaagaataagtatgggatggtagcacaagtgacacagactttgaaacttgaagacacaccaaagatcaacagccgcttctttggtgaaggtactaagaagatgggcctcgcatttgagagcaccaaatccacatcacctccaaagcaggccgaagctgttttgaagactctccaggaactgaaaaaactaaccatctctgagcaaaatatccagagagctaatctcttcaataagctggttactgagctgagaggcctcagtgatgaagcagtcacatctctcttgccacagctgattgaggtgtccagccccatcactttacaagccttggttcagtgtggacagcctcagtgctccactcacatcctccagtggctgaaacgtgtgcatgccaacccccttctgatagatgtggtcacctacctggtggccctgatccccgagccctcagcacagcagctgcgagagatcttcaacatggcgagggatcagcgcagccgagccaccttgtatgcgctgagccacgcggtcaacaactatcataagacaaaccctacagggacccaggagctgctggacattgctaattacctgatggaacagattcaagatgactgcactggggatgaagattacacctatttgattctgcgggtcattggaaatatgggccaaaccatggagcagttaactccagaactcaagtcttcaatcctgaaatgtgtccaaagtacaaagccatcactgatgatccagaaagctgccatccaggctctgcggaaaatggagcctaaagacaaggaccaggaggttcttcttcagactttccttgatgatgcttctccgggagataagcgactggctgcctatcttatgttgatgaggagtccttcacaggcagatattaacaaaattgtccaaattctaccatgggaacagaatgagcaagtgaagaactttgtggcttcccatattgccaatatcttgaactcagaagaattggatatccaagatctgaaaaagttagtgaaagaagctctgaaagaatctcaacttccaactgtcatggacttcagaaaattctctcggaactatcaactctacaaatctgtttctcttccatcacttgacccagcctcagccaaaatagaagggaatcttatatttgatccaaataactaccttcctaaagaaagcatgctgaaaactaccctcactgcctttggatttgcttcagctgacctcatcgagattggcttggaaggaaaaggctttgagccaacattggaagctctttttgggaagcaaggatttttcccagacagtgtcaacaaagctttgtactgggttaatggtcaagttcctgatggtgtctctaaggtcttagtggaccactttggctataccaaagatgataaacatgagcaggatatggtaaatggaataatgctcagtgttgagaagctgattaaagatttgaaatccaaagaagtcccggaagccagagcctacctccgcatcttgggagaggagcttggttttgccagtctccatgacctccagctcctgggaaagctgcttctgatgggtgcccgcactctgcaggggatcccccagatgattggagaggtcatcaggaagggctcaaagaatgacttttttcttcactacatcttcatggagaatgcctttgaactccccactggagctggattacagttgcaaatatcttcatctggagtcattgctcccggagccaaggctggagtaaaactggaagtagccaacatgcaggctgaactggtggcaaaaccctccgtgtctgtggagtttgtgacaaatatgggcatcatcattccggacttcgctaggagtggggtccagatgaacaccaacttcttccacgagtcgggtctggaggctcatgttgccctaaaagctgggaagctgaagtttatcattccttccccaaagagaccagtcaagctgctcagtggaggcaacacattacatttggtctctaccaccaaaacggaggtgatcccacctctcattgagaacaggcagtcctggtcagtttgcaagcaagtctttcctggcctgaattactgcacctcaggcgcttactccaacgccagctccacagactccgcctcctactatccgctgaccggggacaccagattagagctggaactgaggcctacaggagagattgagcagtattctgtcagcgcaacctatgagctccagagagaggacagagccttggtggataccctgaagtttgtaactcaagcagaaggtgcgaagcagactgaggctaccatgacattcaaatataatcggcagagtatgaccttgtccagtgaagtccaaattccggattttgatgttgacctcggaacaatcctcagagttaatgatgaatctactgagggcaaaacgtcttacagactcaccctggacattcagaacaagaaaattactgaggtcgccctcatgggccacctaagttgtgacacaaaggaagaaagaaaaatcaagggtgttatttccataccccgtttgcaagcagaagccagaagtgagatcctcgcccactggtcgcctgccaaactgcttctccaaatggactcatctgctacagcttatggctccacagtttccaagagggtggcatggcattatgatgaagagaagattgaatttgaatggaacacaggcaccaatgtagataccaaaaaaatgacttccaatttccctgtggatctctccgattatcctaagagcttgcatatgtatgctaatagactcctggatcacagagtccctcaaacagacatgactttccggcacgtgggttccaaattaatagttgcaatgagctcatggcttcagaaggcatctgggagtcttccttatacccagactttgcaagaccacctcaatagcctgaaggagttcaacctccagaacatgggattgccagacttccacatcccagaaaacctcttcttaaaaagcgatggccgggtcaaatataccttgaacaagaacagtttgaaaattgagattcctttgccttttggtggcaaatcctccagagatctaaagatgttagagactgttaggacaccagccctccacttcaagtctgtgggattccatctgccatctcgagagttccaagtccctacttttaccattcccaagttgtatcaactgcaagtgcctctcctgggtgttctagacctctccacgaatgtctacagcaacttgtacaactggtccgcctcctacagtggtggcaacaccagcacagaccatttcagccttcgggctcgttaccacatgaaggctgactctgtggttgacctgctttcctacaatgtgcaaggatctggagaaacaacatatgaccacaagaatacgttcacactatcatgtgatgggtctctacgccacaaatttctagattcgaatatcaaattcagtcatgtagaaaaacttggaaacaacccagtctcaaaaggtttactaatattcgatgcatctagttcctggggaccacagatgtctgcttcagttcatttggactccaaaaagaaacagcatttgtttgtcaaagaagtcaagattgatgggcagttcagagtctcttcgttctatgctaaaggcacatatggcctgtcttgtcagagggatcctaacactggccggctcaatggagagtccaacctgaggtttaactcctcctacctccaaggcaccaaccagataacaggaagatatgaagatggaaccctctccctcacctccacctctgatctgcaaagtggcatcattaaaaatactgcttccctaaagtatgagaactacgagctgactttaaaatctgacaccaatgggaagtataagaactttgccacttctaacaagatggatatgaccttctctaagcaaaatgcactgctgcgttctgaatatcaggctgattacgagtcattgaggttcttcagcctgctttctggatcactaaattcccatggtcttgagttaaatgctgacatcttaggcactgacaaaattaatagtggtgctcacaaggcgacactaaggattggccaagatggaatatctaccagtgcaacgaccaacttgaagtgtagtctcctggtgctggagaatgagctgaatgcagagcttggcctctctggggcatctatgaaattaacaacaaatggccgcttcagggaacacaatgcaaaattcagtctggatgggaaagccgccctcacagagctatcactgggaagtgcttatcaggccatgattctgggtgtcgacagcaaaaacattttcaacttcaaggtcagtcaagaaggacttaagctctcaaatgacatgatgggctcatatgctgaaatgaaatttgaccacacaaacagtctgaacattgcaggcttatcactggacttctcttcaaaacttgacaacatttacagctctgacaagttttataagcaaactgttaatttacagctacagccctattctctggtaactactttaaacagtgacctgaaatacaatgctctggatctcaccaacaatgggaaactacggctagaacccctgaagctgcatgtggctggtaacctaaaaggagcctaccaaaataatgaaataaaacacatctatgccatctcttctgctgccttatcagcaagctataaagcagacactgttgctaaggttcagggtgtggagtttagccatcggctcaacacagacatcgctgggctggcttcagccattgacatgagcacaaactataattcagactcactgcatttcagcaatgtcttccgttctgtaatggccccgtttaccatgaccatcgatgcacatacaaatggcaatgggaaactcgctctctggggagaacatactgggcagctgtatagcaaattcctgttgaaagcagaacctctggcatttactttctctcatgattacaaaggctccacaagtcatcatctcgtgtctaggaaaagcatcagtgcagctcttgaacacaaagtcagtgccctgcttactccagctgagcagacaggcacctggaaactcaagacccaatttaacaacaatgaatacagccaggacttggatgcttacaacactaaagataaaattggcgtggagcttactggacgaactctggctgacctaactctactagactccccaattaaagtgccacttttactcagtgagcccatcaatatcattgatgctttagagatgagagatgccgttgagaagccccaagaatttacaattgttgcttttgtaaagtatgataaaaaccaagatgttcactccattaacctcccattttttgagaccttgcaagaatattttgagaggaatcgacaaaccattatagttgtactggaaaacgtacagagaaacctgaagcacatcaatattgatcaatttgtaagaaaatacagagcagccctgggaaaactcccacagcaagctaatgattatctgaattcattcaattgggagagacaagtttcacatgccaaggagaaactgactgctctcacaaaaaagtatagaattacagaaaatgatatacaaattgcattagatgatgccaaaatcaactttaatgaaaaactatctcaactgcagacatatatgatacaatttgatcagtatattaaagatagttatgatttacatgatttgaaaatagctattgctaatattattgatgaaatcattgaaaaattaaaaagtcttgatgagcactatcatatccgtgtaaatttagtaaaaacaatccatgatctacatttgtttattgaaaatattgattttaacaaaagtggaagtagtactgcatcctggattcaaaatgtggatactaagtaccaaatcagaatccagatacaagaaaaactgcagcagcttaagagacacatacagaatatagacatccagcacctagctggaaagttaaaacaacacattgaggctattgatgttagagtgcttttagatcaattgggaactacaatttcatttgaaagaataaatgatgttcttgagcatgtcaaacactttgttataaatcttattggggattttgaagtagctgagaaaatcaatgccttcagagccaaagtccatgagttaatcgagaggtatgaagtagaccaacaaatccaggttttaatggataaattagtagagttggcccaccaatacaagttgaaggagactattcagaagctaagcaatgtcctacaacaagttaagataaaagattactttgagaaattggttggatttattgatgatgctgtcaagaagcttaatgaattatcttttaaaacattcattgaagatgttaacaaattccttgacatgttgataaagaaattaaagtcatttgattaccaccagtttgtagatgaaaccaatgacaaaatccgtgaggtgactcagagactcaatggtgaaattcaggctctggaactaccacaaaaagctgaagcattaaaactgtttttagaggaaaccaaggccacagttgcagtgtatctggaaagcctacaggacaccaaaataaccttaatcatcaattggttacaggaggctttaagttcagcatctttggctcacatgaaggccaaattccgagagactctagaagatacacgagaccgaatgtatcaaatggacattcagcaggaacttcaacgatacctgtctctggtaggccaggtttatagcacacttgtcacctacatttctgattggtggactcttgctgctaagaaccttactgactttgcagagcaatattctatccaagattgggctaaacgtatgaaagcattggtagagcaagggttcactgttcctgaaatcaagaccatccttgggaccatgcctgcctttgaagtcagtcttcaggctcttcagaaagctaccttccagacacctgattttatagtccccctaacagatttgaggattccatcagttcagataaacttcaaagacttaaaaaatataaaaatcccatccaggttttccacaccagaatttaccatccttaacaccttccacattccttcctttacaattgactttgtagaaatgaaagtaaagatcatcagaaccattgaccagatgctgaacagtgagctgcagtggcccgttccagatatatatctcagggatctgaaggtggaggacattcctctagcgagaatcaccctgccagacttccgtttaccagaaatcgcaattccagaattccagcttccccacatctcacacacaattgaagtacctacttttggcaagctatacagtattctgaaaatccaatctcctcttttcacattagatgcaaatgctgacatagggaatggaaccacctcagcaaacgaagcaggtatcgcagcttccatcactgccaaaggagagtccaaattagaagttctcaattttgattttcaagcaaatgcacaactctcaaaccctaagattaatccgctggctctgaaggagtcagtgaagttctccagcaagtacctgagaacggagcatgggagtgaaatgctgttttttggaaatgctattgagggaaaatcaaacacagtggcaagtttacacacagaaaaaaatacactggagcttagtaatggagtgattgtcaagataaacaatcagcttaccctggatagcaacactaaatacttccacaaattgaacatccccaaactggacttctctagtcaggctgacctgcgcaacgagatcaagacactgttgaaagctggccacatagcatggacttcttctggaaaagggtcatggaaatgggcctgccccagattctcagatgagggaacacatgaatcacaaattagtttcaccatagaaggacccctcacttcctttggactgtccaataagatcaatagcaaacacctaagagtaaaccaaaacttggtttatgaatctggctccctcaacttttctaaacttgaaattcaatcacaagtcgattcccagcatgtgggccacagtgttctaactgctaaaggcatggcactgtttggagaagggaaggcagagtttactgggaggcatgatgctcatttaaatggaaaggttattggaactttgaaaaattctcttttcttttcagcccagccatttgagatcacggcatccacaaacaatgaagggaatttgaaagttcgttttccattaaggttaacagggaagatagacttcctgaataactatgcactgtttctgagtcccagtgcccagcaagcaagttggcaagtaagtgctaggttcaatcagtataagtacaaccaaaatttctctgctggaaacaacgagaacattatggaggcccatgtaggaataaatggagaagcaaatctggatttcttaaacattcctttaacaattcctgaaatgcgtctaccttacacaataatcacaactcctccactgaaagatttctctctatgggaaaaaacaggcttgaaggaattcttgaaaacgacaaagcaatcatttgatttaagtgtaaaagctcagtataagaaaaacaaacacaggcattccatcacaaatcctttggctgtgctttgtgagtttatcagtcagagcatcaaatcctttgacaggcattttgaaaaaaacagaaacaatgcattagattttgtcaccaaatcctataatgaaacaaaaattaagtttgataagtacaaagctgaaaaatctcacgacgagctccccaggacctttcaaattcctggatacactgttccagttgtcaatgttgaagtgtctccattcaccatagagatgtcggcattcggctatgtgttcccaaaagcagtcagcatgcctagtttctccatcctaggttctgacgtccgtgtgccttcatacacattaatcctgccatcattagagctgccagtccttcatgtccctagaaatctcaagctttctcttccacatttcaaggaattgtgtaccataagccatatttttattcctgccatgggcaatattacctatgatttctcctttaaatcaagtgtcatcacactgaataccaatgctgaactttttaaccagtcagatattgttgctcatctcctttcttcatcttcatctgtcattgatgcactgcagtacaaattagagggcaccacaagattgacaagaaaaaggggattgaagttagccacagctctgtctctgagcaacaaatttgtggagggtagtcataacagtactgtgagcttaaccacgaaaaatatggaagtgtcagtggcaaaaaccacaaaagccgaaattccaattttgagaatgaatttcaagcaagaacttaatggaaataccaagtcaaaacctactgtctcttcctccatggaatttaagtatgatttcaattcttcaatgctgtactctaccgctaaaggagcagttgaccacaagcttagcttggaaagcctcacctcttacttttccattgagtcatctaccaaaggagatgtcaagggttcggttctttctcgggaatattcaggaactattgctagtgaggccaacacttacttgaattccaagagcacacggtcttcagtgaagctgcagggcacttccaaaattgatgatatctggaaccttgaagtaaaagaaaattttgctggagaagccacactccaacgcatatattccctctgggagcacagtacgaaaaaccacttacagctagagggcctctttttcaccaacggagaacatacaagcaaagccaccctggaactctctccatggcaaatgtcagctcttgttcaggtccatgcaagtcagcccagttccttccatgatttccctgaccttggccaggaagtggccctgaatgctaacactaagaaccagaagatcagatggaaaaatgaagtccggattcattctgggtctttccagagccaggtcgagctttccaatgaccaagaaaaggcacaccttgacattgcaggatccttagaaggacacctaaggttcctcaaaaatatcatcctaccagtctatgacaagagcttatgggatttcctaaagctggatgtaaccaccagcattggtaggagacagcatcttcgtgtttcaactgcctttgtgtacaccaaaaaccccaatggctattcattctccatccctgtaaaagttttggctgataaattcattattcctgggctgaaactaaatgatctaaattcagttcttgtcatgcctacgttccatgtcccatttacagatcttcaggttccatcgtgcaaacttgacttcagagaaatacaaatctataagaagctgagaacttcatcatttgccctcaacctaccaacactccccgaggtaaaattccctgaagttgatgtgttaacaaaatattctcaaccagaagactccttgattcccttttttgagataaccgtgcctgaatctcagttaactgtgtcccagttcacgcttccaaaaagtgtttcagatggcattgctgctttggatctaaatgcagtagccaacaagatcgcagactttgagttgcccaccatcatcgtgcctgagcagaccattgagattccctccattaagttctctgtacctgctggaattgtcattccttcctttcaagcactgactgcacgctttgaggtagactctcccgtgtataatgccacttggagtgccagtttgaaaaacaaagcagattatgttgaaacagtcctggattccacatgcagctcaaccgtacagttcctagaatatgaactaaatgttttgggaacacacaaaatcgaagatggtacgttagcctctaagactaaaggaacatttgcacaccgtgacttcagtgcagaatatgaagaagatggcaaatatgaaggacttcaggaatgggaaggaaaagcgcacctcaatatcaaaagcccagcgttcaccgatctccatctgcgctaccagaaagacaagaaaggcatctccacctcagcagcctccccagccgtaggcaccgtgggcatggatatggatgaagatgacgacttttctaaatggaacttctactacagccctcagtcctctccagataaaaaactcaccatattcaaaactgagttgagggtccgggaatctgatgaggaaactcagatcaaagttaattgggaagaagaggcagcttctggcttgctaacctctctgaaagacaacgtgcccaaggccacaggggtcctttatgattatgtcaacaagtaccactgggaacacacagggctcaccctgagagaagtgtcttcaaagctgagaagaaatctgcagaacaatgctgagtgggtttatcaaggggccattaggcaaattgatgatatcgacgtgaggttccagaaagcagccagtggcaccactgggacctaccaagagtggaaggacaaggcccagaatctgtaccaggaactgttgactcaggaaggccaagccagtttccagggactcaaggataacgtgtttgatggcttggtacgagttactcaagaattccatatgaaagtcaagcatctgattgactcactcattgattttctgaacttccccagattccagtttccggggaaacctgggatatacactagggaggaactttgcactatgttcataagggaggtagggacggtactgtcccaggtatattcgaaagtccataatggttcagaaatactgttttcctatttccaagacctagtgattacacttcctttcgagttaaggaaacataaactaatagatgtaatctcgatgtatagggaactgttgaaagatttatcaaaagaagcccaagaggtatttaaagccattcagtctctcaagaccacagaggtgctacgtaatcttcaggaccttttacaattcattttccaactaatagaagataacattaaacagctgaaagagatgaaatttacttatcttattaattatatccaagatgagatcaacacaatcttcagtgattatatcccatatgtttttaaattgttgaaagaaaacctatgccttaatcttcataagttcaatgaatttattcaaaacgagcttcaggaagcttctcaagagttacagcagatccatcaatacattatggcccttcgtgaagaatattttgatccaagtatagttggctggacagtgaaatattatgaacttgaagaaaagatagtcagtctgatcaagaacctgttagttgctcttaaggacttccattctgaatatattgtcagtgcctctaactttacttcccaactctcaagtcaagttgagcaatttctgcacagaaatattcaggaatatcttagcatccttaccgatccagatggaaaagggaaagagaagattgcagagctttctgccactgctcaggaaataattaaaagccaggccattgcgacgaagaaaataatttctgattaccaccagcagtttagatataaactgcaagatttttcagaccaactctctgattactatgaaaaatttattgctgaatccaaaagattgattgacctgtccattcaaaactaccacacatttctgatatacatcacggagttactgaaaaagctgcaatcaaccacagtcatgaacccctacatgaagcttgctccaggagaacttactatcatcctctaattttttaaaagaaatcttcatttattcttcttttccaattgaactttcacatagcacagaaaaaattcaaactgcctatattgataaaaccatacagtgagccagccttgcagtaggcagtagactataagcagaagcacatatgaactggacctgcaccaaagctggcaccagggctcggaaggtctctgaactcagaaggatggcattttttgcaagttaaagaaaatcaggatctgagttattttgctaaacttgggggaggaggaacaaataaatggagtctttattgtgtatcataacac

SEQ ID NO: 438328 - DNA, 14023 bp, Homo sapiens
cattcccaccgggacctgcggggctgagtgcccttctcggttgctgccgctgaggagcccgcccagccagccagggccgcgaggccgaggccaggccgcagcccaggagccgccccaccgcagctggcgatggacccgccgaggcccgcgctgctggcgctgctggcgaagaggaaatgctggaaaatgtcagcctggtctgtccaaaagatgcgacccgattcaagcacctccggaagtacacatacaactatgaggctgagagttccagtggagtccctgggactgctgattcaagaagtgccaccaggatcaactgcaaggttgagctggaggttccccagctctgcagcttcatcctgaagaccagccagtgcaccctgaaagaggtgtatggcttcaaccctgagggcaaagccttgctgaagaaaaccaagaactctgaggagtttgctgcagccatgtccaggtatgagctcaagctggccattccagaagggaagcaggttttcctttacccggagaaagatgaacctacttacatcctgaacatcaagaggggcatcatttctgccctcctggttcccccagagacagaagaagccaagcaagtgttgtttctggataccgtgtatggaaactgctccactcactttaccgtcaagacgaggaagggcaatgtggcaacagaaatatccactgaaagagacctggggcagtgtgatcgcttcaagcccatccgcacaggcatcagcccacttgctctcatcaaaggcatgacccgccccttgtcaactctgatcagcagcagccagtcctgtcagtacacactggacgctaagaggaagcatgtggcagaagccatctgcaaggagcaacacctcttcctgcctttctcctacaagaataagtatgggatggtagcacaagtgacacagactttgaaacttgaagacacaccaaagatcaacagccgcttctttggtgaaggtactaagaagatgggcctcgcatttgagagcaccaaatccacatcacctccaaagcaggccgaagctgttttgaagactctccaggaactgaaaaaactaaccatctctgagcaaaatatccagagagctaatctcttcaataagctggttactgagctgagaggcctcagtgatgaagcagtcacatctctcttgccacagctgattgaggtgtccagccccatcactttacaagccttggttcagtgtggacagcctcagtgctccactcacatcctccagtggctgaaacgtgtgcatgccaacccccttctgatagatgtggtcacctacctggtggccctgatccccgagccctcagcacagcagctgcgagagatcttcaacatggcgagggatcagcgcagccgagccaccttgtatgcgctgagccacgcggtcaacaactatcataagacaaaccctacagggacccaggagctgctggacattgctaattacctgatggaacagattcaagatgactgcactggggatgaagattacacctatttgattctgcgggtcattggaaatatgggccaaaccatggagcagttaactccagaactcaagtcttcaatcctgaaatgtgtccaaagtacaaagccatcactgatgatccagaaagctgccatccaggctctgcggaaaatggagcctaaagacaaggaccaggaggttcttcttcagactttccttgatgatgcttctccgggagataagcgactggctgcctatcttatgttgatgaggagtccttcacaggcagatattaacaaaattgtccaaattctaccatgggaacagaatgagcaagtgaagaactttgtggcttcccatattgccaatatcttgaactcagaagaattggatatccaagatctgaaaaagttagtgaaagaagctctgaaagaatctcaacttccaactgtcatggacttcagaaaattctctcggaactatcaactctacaaatctgtttctcttccatcacttgacccagcctcagccaaaatagaagggaatcttatatttgatccaaataactaccttcctaaagaaagcatgctgaaaactaccctcactgcctttggatttgcttcagctgacctcatcgagattggcttggaaggaaaaggctttgagccaacattggaagctctttttgggaagcaaggatttttcccagacagtgtcaacaaagctttgtactgggttaatggtcaagttcctgatggtgtctctaaggtcttagtggaccactttggctataccaaagatgataaacatgagcaggatatggtaaatggaataatgctcagtgttgagaagctgattaaagatttgaaatccaaagaagtcccggaagccagagcctacctccgcatcttgggagaggagcttggttttgccagtctccatgacctccagctcctgggaaagctgcttctgatgggtgcccgcactctgcaggggatcccccagatgattggagaggtcatcaggaagggctcaaagaatgacttttttcttcactacatcttcatggagaatgcctttgaactccccactggagctggattacagttgcaaatatcttcatctggagtcattgctcccggagccaaggctggagtaaaactggaagtagccaacatgcaggctgaactggtggcaaaaccctccgtgtctgtggagtttgtgacaaatatgggcatcatcattccggacttcgctaggagtggggtccagatgaacaccaacttcttccacgagtcgggtctggaggctcatgttgccctaaaagctgggaagctgaagtttatcattccttccccaaagagaccagtcaagctgctcagtggaggcaacacattacatttggtctctaccaccaaaacggaggtgatcccacctctcattgagaacaggcagtcctggtcagtttgcaagcaagtctttcctggcctgaattactgcacctcaggcgcttactccaacgccagctccacagactccgcctcctactatccgctgaccggggacaccagattagagctggaactgaggcctacaggagagattgagcagtattctgtcagcgcaacctatgagctccagagagaggacagagccttggtggataccctgaagtttgtaactcaagcagaaggtgcgaagcagactgaggctaccatgacattcaaatataatcggcagagtatgaccttgtccagtgaagtccaaattccggattttgatgttgacctcggaacaatcctcagagttaatgatgaatctactgagggcaaaacgtcttacagactcaccctggacattcagaacaagaaaattactgaggtcgccctcatgggccacctaagttgtgacacaaaggaagaaagaaaaatcaagggtgttatttccataccccgtttgcaagcagaagccagaagtgagatcctcgcccactggtcgcctgccaaactgcttctccaaatggactcatctgctacagcttatggctccacagtttccaagagggtggcatggcattatgatgaagagaagattgaatttgaatggaacacaggcaccaatgtagataccaaaaaaatgacttccaatttccctgtggatctctccgattatcctaagagcttgcatatgtatgctaatagactcctggatcacagagtccctcaaacagacatgactttccggcacgtgggttccaaattaatagttgcaatgagctcatggcttcagaaggcatctgggagtcttccttatacccagactttgcaagaccacctcaatagcctgaaggagttcaacctccagaacatgggattgccagacttccacatcccagaaaacctcttcttaaaaagcgatggccgggtcaaatataccttgaacaagaacagtttgaaaattgagattcctttgccttttggtggcaaatcctccagagatctaaagatgttagagactgttaggacaccagccctccacttcaagtctgtgggattccatctgccatctcgagagttccaagtccctacttttaccattcccaagttgtatcaactgcaagtgcctctcctgggtgttctagacctctccacgaatgtctacagcaacttgtacaactggtccgcctcctacagtggtggcaacaccagcacagaccatttcagccttcgggctcgttaccacatgaaggctgactctgtggttgacctgctttcctacaatgtgcaaggatctggagaaacaacatatgaccacaagaatacgttcacactatcatgtgatgggtctctacgccacaaatttctagattcgaatatcaaattcagtcatgtagaaaaacttggaaacaacccagtctcaaaaggtttactaatattcgatgcatctagttcctggggaccacagatgtctgcttcagttcatttggactccaaaaagaaacagcatttgtttgtcaaagaagtcaagattgatgggcagttcagagtctcttcgttctatgctaaaggcacatatggcctgtcttgtcagagggatcctaacactggccggctcaatggagagtccaacctgaggtttaactcctcctacctccaaggcaccaaccagataacaggaagatatgaagatggaaccctctccctcacctccacctctgatctgcaaagtggcatcattaaaaatactgcttccctaaagtatgagaactacgagctgactttaaaatctgacaccaatgggaagtataagaactttgccacttctaacaagatggatatgaccttctctaagcaaaatgcactgctgcgttctgaatatcaggctgattacgagtcattgaggttcttcagcctgctttctggatcactaaattcccatggtcttgagttaaatgctgacatcttaggcactgacaaaattaatagtggtgctcacaaggcgacactaaggattggccaagatggaatatctaccagtgcaacgaccaacttgaagtgtagtctcctggtgctggagaatgagctgaatgcagagcttggcctctctggggcatctatgaaattaacaacaaatggccgcttcagggaacacaatgcaaaattcagtctggatgggaaagccgccctcacagagctatcactgggaagtgcttatcaggccatgattctgggtgtcgacagcaaaaacattttcaacttcaaggtcagtcaagaaggacttaagctctcaaatgacatgatgggctcatatgctgaaatgaaatttgaccacacaaacagtctgaacattgcaggcttatcactggacttctcttcaaaacttgacaacatttacagctctgacaagttttataagcaaactgttaatttacagctacagccctattctctggtaactactttaaacagtgacctgaaatacaatgctctggatctcaccaacaatgggaaactacggctagaacccctgaagctgcatgtggctggtaacctaaaaggagcctaccaaaataatgaaataaaacacatctatgccatctcttctgctgccttatcagcaagctataaagcagacactgttgctaaggttcagggtgtggagtttagccatcggctcaacacagacatcgctgggctggcttcagccattgacatgagcacaaactataattcagactcactgcatttcagcaatgtcttccgttctgtaatggccccgtttaccatgaccatcgatgcacatacaaatggcaatgggaaactcgctctctggggagaacatactgggcagctgtatagcaaattcctgttgaaagcagaacctctggcatttactttctctcatgattacaaaggctccacaagtcatcatctcgtgtctaggaaaagcatcagtgcagctcttgaacacaaagtcagtgccctgcttactccagctgagcagacaggcacctggaaactcaagacccaatttaacaacaatgaatacagccaggacttggatgcttacaacactaaagataaaattggcgtggagcttactggacgaactctggctgacctaactctactagactccccaattaaagtgccacttttactcagtgagcccatcaatatcattgatgctttagagatgagagatgccgttgagaagccccaagaatttacaattgttgcttttgtaaagtatgataaaaaccaagatgttcactccattaacctcccattttttgagaccttgcaagaatattttgagaggaatcgacaaaccattatagttgtactggaaaacgtacagagaaacctgaagcacatcaatattgatcaatttgtaagaaaatacagagcagccctgggaaaactcccacagcaagctaatgattatctgaattcattcaattgggagagacaagtttcacatgccaaggagaaactgactgctctcacaaaaaagtatagaattacagaaaatgatatacaaattgcattagatgatgccaaaatcaactttaatgaaaaactatctcaactgcagacatatatgatacaatttgatcagtatattaaagatagttatgatttacatgatttgaaaatagctattgctaatattattgatgaaatcattgaaaaattaaaaagtcttgatgagcactatcatatccgtgtaaatttagtaaaaacaatccatgatctacatttgtttattgaaaatattgattttaacaaaagtggaagtagtactgcatcctggattcaaaatgtggatactaagtaccaaatcagaatccagatacaagaaaaactgcagcagcttaagagacacatacagaatatagacatccagcacctagctggaaagttaaaacaacacattgaggctattgatgttagagtgcttttagatcaattgggaactacaatttcatttgaaagaataaatgatgttcttgagcatgtcaaacactttgttataaatcttattggggattttgaagtagctgagaaaatcaatgccttcagagccaaagtccatgagttaatcgagaggtatgaagtagaccaacaaatccaggttttaatggataaattagtagagttggcccaccaatacaagttgaaggagactattcagaagctaagcaatgtcctacaacaagttaagataaaagattactttgagaaattggttggatttattgatgatgctgtcaagaagcttaatgaattatcttttaaaacattcattgaagatgttaacaaattccttgacatgttgataaagaaattaaagtcatttgattaccaccagtttgtagatgaaaccaatgacaaaatccgtgaggtgactcagagactcaatggtgaaattcaggctctggaactaccacaaaaagctgaagcattaaaactgtttttagaggaaaccaaggccacagttgcagtgtatctggaaagcctacaggacaccaaaataaccttaatcatcaattggttacaggaggctttaagttcagcatctttggctcacatgaaggccaaattccgagagactctagaagatacacgagaccgaatgtatcaaatggacattcagcaggaacttcaacgatacctgtctctggtaggccaggtttatagcacacttgtcacctacatttctgattggtggactcttgctgctaagaaccttactgactttgcagagcaatattctatccaagattgggctaaacgtatgaaagcattggtagagcaagggttcactgttcctgaaatcaagaccatccttgggaccatgcctgcctttgaagtcagtcttcaggctcttcagaaagctaccttccagacacctgattttatagtccccctaacagatttgaggattccatcagttcagataaacttcaaagacttaaaaaatataaaaatcccatccaggttttccacaccagaatttaccatccttaacaccttccacattccttcctttacaattgactttgtagaaatgaaagtaaagatcatcagaaccattgaccagatgctgaacagtgagctgcagtggcccgttccagatatatatctcagggatctgaaggtggaggacattcctctagcgagaatcaccctgccagacttccgtttaccagaaatcgcaattccagaattccagcttccccacatctcacacacaattgaagtacctacttttggcaagctatacagtattctgaaaatccaatctcctcttttcacattagatgcaaatgctgacatagggaatggaaccacctcagcaaacgaagcaggtatcgcagcttccatcactgccaaaggagagtccaaattagaagttctcaattttgattttcaagcaaatgcacaactctcaaaccctaagattaatccgctggctctgaaggagtcagtgaagttctccagcaagtacctgagaacggagcatgggagtgaaatgctgttttttggaaatgctattgagggaaaatcaaacacagtggcaagtttacacacagaaaaaaatacactggagcttagtaatggagtgattgtcaagataaacaatcagcttaccctggatagcaacactaaatacttccacaaattgaacatccccaaactggacttctctagtcaggctgacctgcgcaacgagatcaagacactgttgaaagctggccacatagcatggacttcttctggaaaagggtcatggaaatgggcctgccccagattctcagatgagggaacacatgaatcacaaattagtttcaccatagaaggacccctcacttcctttggactgtccaataagatcaatagcaaacacctaagagtaaaccaaaacttggtttatgaatctggctccctcaacttttctaaacttgaaattcaatcacaagtcgattcccagcatgtgggccacagtgttctaactgctaaaggcatggcactgtttggagaagggaaggcagagtttactgggaggcatgatgctcatttaaatggaaaggttattggaactttgaaaaattctcttttcttttcagcccagccatttgagatcacggcatccacaaacaatgaagggaatttgaaagttcgttttccattaaggttaacagggaagatagacttcctgaataactatgcactgtttctgagtcccagtgcccagcaagcaagttggcaagtaagtgctaggttcaatcagtataagtacaaccaaaatttctctgctggaaacaacgagaacattatggaggcccatgtaggaataaatggagaagcaaatctggatttcttaaacattcctttaacaattcctgaaatgcgtctaccttacacaataatcacaactcctccactgaaagatttctctctatgggaaaaaacaggcttgaaggaattcttgaaaacgacaaagcaatcatttgatttaagtgtaaaagctcagtataagaaaaacaaacacaggcattccatcacaaatcctttggctgtgctttgtgagtttatcagtcagagcatcaaatcctttgacaggcattttgaaaaaaacagaaacaatgcattagattttgtcaccaaatcctataatgaaacaaaaattaagtttgataagtacaaagctgaaaaatctcacgacgagctccccaggacctttcaaattcctggatacactgttccagttgtcaatgttgaagtgtctccattcaccatagagatgtcggcattcggctatgtgttcccaaaagcagtcagcatgcctagtttctccatcctaggttctgacgtccgtgtgccttcatacacattaatcctgccatcattagagctgccagtccttcatgtccctagaaatctcaagctttctcttccacatttcaaggaattgtgtaccataagccatatttttattcctgccatgggcaatattacctatgatttctcctttaaatcaagtgtcatcacactgaataccaatgctgaactttttaaccagtcagatattgttgctcatctcctttcttcatcttcatctgtcattgatgcactgcagtacaaattagagggcaccacaagattgacaagaaaaaggggattgaagttagccacagctctgtctctgagcaacaaatttgtggagggtagtcataacagtactgtgagcttaaccacgaaaaatatggaagtgtcagtggcaaaaaccacaaaagccgaaattccaattttgagaatgaatttcaagcaagaacttaatggaaataccaagtcaaaacctactgtctcttcctccatggaatttaagtatgatttcaattcttcaatgctgtactctaccgctaaaggagcagttgaccacaagcttagcttggaaagcctcacctcttacttttccattgagtcatctaccaaaggagatgtcaagggttcggttctttctcgggaatattcaggaactattgctagtgaggccaacacttacttgaattccaagagcacacggtcttcagtgaagctgcagggcacttccaaaattgatgatatctggaaccttgaagtaaaagaaaattttgctggagaagccacactccaacgcatatattccctctgggagcacagtacgaaaaaccacttacagctagagggcctctttttcaccaacggagaacatacaagcaaagccaccctggaactctctccatggcaaatgtcagctcttgttcaggtccatgcaagtcagcccagttccttccatgatttccctgaccttggccaggaagtggccctgaatgctaacactaagaaccagaagatcagatggaaaaatgaagtccggattcattctgggtctttccagagccaggtcgagctttccaatgaccaagaaaaggcacaccttgacattgcaggatccttagaaggacacctaaggttcctcaaaaatatcatcctaccagtctatgacaagagcttatgggatttcctaaagctggatgtaaccaccagcattggtaggagacagcatcttcgtgtttcaactgcctttgtgtacaccaaaaaccccaatggctattcattctccatccctgtaaaagttttggctgataaattcattattcctgggctgaaactaaatgatctaaattcagttcttgtcatgcctacgttccatgtcccatttacagatcttcaggttccatcgtgcaaacttgacttcagagaaatacaaatctataagaagctgagaacttcatcatttgccctcaacctaccaacactccccgaggtaaaattccctgaagttgatgtgttaacaaaatattctcaaccagaagactccttgattcccttttttgagataaccgtgcctgaatctcagttaactgtgtcccagttcacgcttccaaaaagtgtttcagatggcattgctgctttggatctaaatgcagtagccaacaagatcgcagactttgagttgcccaccatcatcgtgcctgagcagaccattgagattccctccattaagttctctgtacctgctggaattgtcattccttcctttcaagcactgactgcacgctttgaggtagactctcccgtgtataatgccacttggagtgccagtttgaaaaacaaagcagattatgttgaaacagtcctggattccacatgcagctcaaccgtacagttcctagaatatgaactaaatgttttgggaacacacaaaatcgaagatggtacgttagcctctaagactaaaggaacatttgcacaccgtgacttcagtgcagaatatgaagaagatggcaaatatgaaggacttcaggaatgggaaggaaaagcgcacctcaatatcaaaagcccagcgttcaccgatctccatctgcgctaccagaaagacaagaaaggcatctccacctcagcagcctccccagccgtaggcaccgtgggcatggatatggatgaagatgacgacttttctaaatggaacttctactacagccctcagtcctctccagataaaaaactcaccatattcaaaactgagttgagggtccgggaatctgatgaggaaactcagatcaaagttaattgggaagaagaggcagcttctggcttgctaacctctctgaaagacaacgtgcccaaggccacaggggtcctttatgattatgtcaacaagtaccactgggaacacacagggctcaccctgagagaagtgtcttcaaagctgagaagaaatctgcagaacaatgctgagtgggtttatcaaggggccattaggcaaattgatgatatcgacgtgaggttccagaaagcagccagtggcaccactgggacctaccaagagtggaaggacaaggcccagaatctgtaccaggaactgttgactcaggaaggccaagccagtttccagggactcaaggataacgtgtttgatggcttggtacgagttactcaagaattccatatgaaagtcaagcatctgattgactcactcattgattttctgaacttccccagattccagtttccggggaaacctgggatatacactagggaggaactttgcactatgttcataagggaggtagggacggtactgtcccaggtatattcgaaagtccataatggttcagaaatactgttttcctatttccaagacctagtgattacacttcctttcgagttaaggaaacataaactaatagatgtaatctcgatgtatagggaactgttgaaagatttatcaaaagaagcccaagaggtatttaaagccattcagtctctcaagaccacagaggtgctacgtaatcttcaggaccttttacaattcattttccaactaatagaagataacattaaacagctgaaagagatgaaatttacttatcttattaattatatccaagatgagatcaacacaatcttcagtgattatatcccatatgtttttaaattgttgaaagaaaacctatgccttaatcttcataagttcaatgaatttattcaaaacgagcttcaggaagcttctcaagagttacagcagatccatcaatacattatggcccttcgtgaagaatattttgatccaagtatagttggctggacagtgaaatattatgaacttgaagaaaagatagtcagtctgatcaagaacctgttagttgctcttaaggacttccattctgaatatattgtcagtgcctctaactttacttcccaactctcaagtcaagttgagcaatttctgcacagaaatattcaggaatatcttagcatccttaccgatccagatggaaaagggaaagagaagattgcagagctttctgccactgctcaggaaataattaaaagccaggccattgcgacgaagaaaataatttctgattaccaccagcagtttagatataaactgcaagatttttcagaccaactctctgattactatgaaaaatttattgctgaatccaaaagattgattgacctgtccattcaaaactaccacacatttctgatatacatcacggagttactgaaaaagctgcaatcaaccacagtcatgaacccctacatgaagcttgctccaggagaacttactatcatcctctaattttttaaaagaaatcttcatttattcttcttttccaattgaactttcacatagcacagaaaaaattcaaactgcctatattgataaaaccatacagtgagccagccttgcagtaggcagtagactataagcagaagcacatatgaactggacctgcaccaaagctggcaccagggctcggaaggtctctgaactcagaaggatggcattttttgcaagttaaagaaaatcaggatctgagttattttgctaaacttgggggaggaggaacaaataaatggagtctttattgtgtatcataacac

SEQ ID NO: 438329 - DNA, 14072 bp, Homo sapiens
cattcccaccgggacctgcggggctgagtgcccttctcggttgctgccgctgaggagcccgcccagccagccagggccgcgaggccgaggccaggccgcagcccaggagccgccccaccgcagctggcgatggacccgccgaggcccgcgctgctggcgctgctggcgctgcctgcgctgctgctgctgctgctggcgggcgccagggccgaagaggaaatgctggaaaatgtcagcctggtctgtccaaaagatgcgacccgattcaagcacctccggaagtacacatacaactatgaggctgagagttccagtggagtccctgggactgctgattcaagaagtgccaccaggatcaactgcaaggttgagctggaggttccccagctctgcagcttcatcctgaagaccagccagtgcaccctgaaagaggtgtatggcttcaaccctgagggcaaagccttgctgaagaaaaccaagaactctgaggagtttgctgcagccatgtccaggtatgagctcaagctggccattccagaagggaagcaggttttcctttacccggagaaagatgaacctacttacatcctgaacatcaagaggggcatcatttctgccctcctggttcccccagagacagaagaagccaagcaagtgttgtttctggataccgtgtatggaaactgctccactcactttaccgtcaagacgaggaagggcaatgtggcaacagaaatatccactgaaagagacctggggcagtgtgatcgcttcaagcccatccgcacaggcatcagcccacttgctctcatcaaaggcatgacccgccccttgtcaactctgatcagcagcagccagtcctgtcagtacacactggacgctaagaggaagcatgtggcagaagccatctgcaaggagcaacacctcttcctgcctttctcctacaagaataagtatgggatggtagcacaagtgacacagactttgaaacttgaagacacaccaaagatcaacagccgcttctttggtgaaggtactaagaagatgggcctcgcatttgagagcaccaaatccacatcacctccaaagcaggccgaagctgttttgaagactctccaggaactgaaaaaactaaccatctctgagcaaaatatccagagagctaatctcttcaataagctggttactgagctgagaggcctcagtgatgaagcagtcacatctctcttgccacagctgattgaggtgtccagccccatcactttacaagccttggttcagtgtggacagcctcagtgctccactcacatcctccagtggctgaaacgtgtgcatgccaacccccttctgatagatgtggtcacctacctggtggccctgatccccgagccctcagcacagcagctgcgagagatcttcaacatggcgagggatcagcgcagccgagccaccttgtatgcgctgagccacgcggtcaacaactatcataagacaaaccctacagggacccaggagctgctggacattgctaattacctgatggaacagattcaagatgactgcactggggatgaagattacacctatttgattctgcgggtcattggaaatatgggccaaaccatggagcagttaactccagaactcaagtcttcaatcctgaaatgtgtccaaagtacaaagccatcactgatgatccagaaagctgccatccaggctctgcggaaaatggagcctaaagacaaggaccaggaggttcttcttcagactttccttgatgatgcttctccgggagataagcgactggctgcctatcttatgttgatgaggagtccttcacaggcagatattaacaaaattgtccaaattctaccatgggaacagaatgagcaagtgaagaactttgtggcttcccatattgccaatatcttgaactcagaagaattggatatccaagatctgaaaaagttagtgaaagaagctctgaaagaatctcaacttccaactgtcatggacttcagaaaattctctcggaactatcaactctacaaatctgtttctcttccatcacttgacccagcctcagccaaaatagaagggaatcttatatttgatccaaataactaccttcctaaagaaagcatgctgaaaactaccctcactgcctttggatttgcttcagctgacctcatcgagattggcttggaaggaaaaggctttgagccaacattggaagctctttttgggaagcaaggatttttcccagacagtgtcaacaaagctttgtactgggttaatggtcaagttcctgatggtgtctctaaggtcttagtggaccactttggctataccaaagatgataaacatgagcaggatatggtaaatggaataatgctcagtgttgagaagctgattaaagatttgaaatccaaagaagtcccggaagccagagcctacctccgcatcttgggagaggagcttggttttgccagtctccatgacctccagctcctgggaaagctgcttctgatgggtgcccgcactctgcaggggatcccccagatgattggagaggtcatcaggaagggctcaaagaatgacttttttcttcactacatcttcatggagaatgcctttgaactccccactggagctggattacagttgcaaatatcttcatctggagtcattgctcccggagccaaggctggagtaaaactggaagtagccaacatgcaggctgaactggtggcaaaaccctccgtgtctgtggagtttgtgacaaatatgggcatcatcattccggacttcgctaggagtggggtccagatgaacaccaacttcttccacgagtcgggtctggaggctcatgttgccctaaaagctgggaagctgaagtttatcattccttccccaaagagaccagtcaagctgctcagtggaggcaacacattacatttggtctctaccaccaaaacggaggtgatcccacctctcattgagaacaggcagtcctggtcagtttgcaagcaagtctttcctggcctgaattactgcacctcaggcgcttactccaacgccagctccacagactccgcctcctactatccgctgaccggggacaccagattagagctggaactgaggcctacaggagagattgagcagtattctgtcagcgcaacctatgagctccagagagaggacagagccttggtggataccctgaagtttgtaactcaagcagaaggtgcgaagcagactgaggctaccatgacattcaaatataatcggcagagtatgaccttgtccagtgaagtccaaattccggattttgatgttgacctcggaacaatcctcagagttaatgatgaatctactgagggcaaaacgtcttacagactcaccctggacattcagaacaagaaaattactgaggtcgccctcatgggccacctaagttgtgacacaaaggaagaaagaaaaatcaagggtgttatttccataccccgtttgcaagcagaagccagaagtgagatcctcgcccactggtcgcctgccaaactgcttctccaaatggactcatctgctacagcttatggctccacagtttccaagagggtggcatggcattatgatgaagagaagattgaatttgaatggaacacaggcaccaatgtagataccaaaaaaatgacttccaatttccctgtggatctctccgattatcctaagagcttgcatatgtatgctaatagactcctggatcacagagtccctcaaacagacatgactttccggcacgtgggttccaaattaatagttgcaatgagctcatggcttcagaaggcatctgggagtcttccttatacccagactttgcaagaccacctcaatagcctgaaggagttcaacctccagaacatgggattgccagacttccacatcccagaaaacctcttcttaaaaagcgatggccgggtcaaatataccttgaacaagaacagtttgaaaattgagattcctttgccttttggtggcaaatcctccagagatctaaagatgttagagactgttaggacaccagccctccacttcaagtctgtgggattccatctgccatctcgagagttccaagtccctacttttaccattcccaagttgtatcaactgcaagtgcctctcctgggtgttctagacctctccacgaatgtctacagcaacttgtacaactggtccgcctcctacagtggtggcaacaccagcacagaccatttcagccttcgggctcgttaccacatgaaggctgactctgtggttgacctgctttcctacaatgtgcaaggatctggagaaacaacatatgaccacaagaatacgttcacactatcatgtgatgggtctctacgccacaaatttctagattcgaatatcaaattcagtcatgtagaaaaacttggaaacaacccagtctcaaaaggtttactaatattcgatgcatctagttcctggggaccacagatgtctgcttcagttcatttggactccaaaaagaaacagcatttgtttgtcaaagaagtcaagattgatgggcagttcagagtctcttcgttctatgctaaaggcacatatggcctgtcttgtcagagggatcctaacactggccggctcaatggagagtccaacctgaggtttaactcctcctacctccaaggcaccaaccagataacaggaagatatgaagatggaaccctctccctcacctccacctctgatctgcaaagtggcatcattaaaaatactgcttccctaaagtatgagaactacgagctgactttaaaatctgacaccaatgggaagtataagaactttgccacttctaacaagatggatatgaccttctctaagcaaaatgcactgctgcgttctgaatatcaggctgattacgagtcattgaggttcttcagcctgctttctggatcactaaattcccatggtcttgagttaaatgctgacatcttaggcactgacaaaattaatagtggtgctcacaaggcgacactaaggattggccaagatggaatatctaccagtgcaacgaccaacttgaagtgtagtctcctggtgctggagaatgagctgaatgcagagcttggcctctctggggcatctatgaaattaacaacaaatggccgcttcagggaacacaatgcaaaattcagtctggatgggaaagccgccctcacagagctatcactgggaagtgcttatcaggccatgattctgggtgtcgacagcaaaaacattttcaacttcaaggtcagtcaagaaggacttaagctctcaaatgacatgatgggctcatatgctgaaatgaaatttgaccacacaaacagtctgaacattgcaggcttatcactggacttctcttcaaaacttgacaacatttacagctctgacaagttttataagcaaactgttaatttacagctacagccctattctctggtaactactttaaacagtgacctgaaatacaatgctctggatctcaccaacaatgggaaactacggctagaacccctgaagctgcatgtggctggtaacctaaaaggagcctaccaaaataatgaaataaaacacatctatgccatctcttctgctgccttatcagcaagctataaagcagacactgttgctaaggttcagggtgtggagtttagccatcggctcaacacagacatcgctgggctggcttcagccattgacatgagcacaaactataattcagactcactgcatttcagcaatgtcttccgttctgtaatggccccgtttaccatgaccatcgatgcacatacaaatggcaatgggaaactcgctctctggggagaacatactgggcagctgtatagcaaattcctgttgaaagcagaacctctggcatttactttctctcatgattacaaaggctccacaagtcatcatctcgtgtctaggaaaagcatcagtgcagctcttgaacacaaagtcagtgccctgcttactccagctgagcagacaggcacctggaaactcaagacccaatttaacaacaatgaatacagccaggacttggatgcttacaacactaaagataaaattggcgtggagcttactggacgaactctggctgacctaactctactagactccccaattaaagtgccacttttactcagtgagcccatcaatatcattgatgctttagagatgagagatgccgttgagaagccccaagaatttacaattgttgcttttgtaaagtatgataaaaaccaagatgttcactccattaacctcccattttttgagaccttgcaagaatattttgagaggaatcgacaaaccattatagttgtactggaaaacgtacagagaaacctgaagcacatcaatattgatcaatttgtaagaaaatacagagcagccctgggaaaactcccacagcaagctaatgattatctgaattcattcaattgggagagacaagtttcacatgccaaggagaaactgactgctctcacaaaaaagtatagaattacagaaaatgatatacaaattgcattagatgatgccaaaatcaactttaatgaaaaactatctcaactgcagacatatatgatacaatttgatcagtatattaaagatagttatgatttacatgatttgaaaatagctattgctaatattattgatgaaatcattgaaaaattaaaaagtcttgatgagcactatcatatccgtgtaaatttagtaaaaacaatccatgatctacatttgtttattgaaaatattgattttaacaaaagtggaagtagtactgcatcctggattcaaaatgtggatactaagtaccaaatcagaatccagatacaagaaaaactgcagcagcttaagagacacatacagaatatagacatccagcacctagctggaaagttaaaacaacacattgaggctattgatgttagagtgcttttagatcaattgggaactacaatttcatttgaaagaataaatgatgttcttgagcatgtcaaacactttgttataaatcttattggggattttgaagtagctgagaaaatcaatgccttcagagccaaagtccatgagttaatcgagaggtatgaagtagaccaacaaatccaggttttaatggataaattagtagagttggcccaccaatacaagttgaaggagactattcagaagctaagcaatgtcctacaacaagttaagataaaagattactttgagaaattggttggatttattgatgatgctgtcaagaagcttaatgaattatcttttaaaacattcattgaagatgttaacaaattccttgacatgttgataaagaaattaaagtcatttgattaccaccagtttgtagatgaaaccaatgacaaaatccgtgaggtgactcagagactcaatggtgaaattcaggctctggaactaccacaaaaagctgaagcattaaaactgtttttagaggaaaccaaggccacagttgcagtgtatctggaaagcctacaggacaccaaaataaccttaatcatcaattggttacaggaggctttaagttcagcatctttggctcacatgaaggccaaattccgagagactctagaagatacacgagaccgaatgtatcaaatggacattcagcaggaacttcaacgatacctgtctctggtaggccaggtttatagcacacttgtcacctacatttctgattggtggactcttgctgctaagaaccttactgactttgcagagcaatattctatccaagattgggctaaacgtatgaaagcattggtagagcaagggttcactgttcctgaaatcaagaccatccttgggaccatgcctgcctttgaagtcagtcttcaggctcttcagaaagctaccttccagacacctgattttatagtccccctaacagatttgaggattccatcagttcagataaacttcaaagacttaaaaaatataaaaatcccatccaggttttccacaccagaatttaccatccttaacaccttccacattccttcctttacaattgactttgtagaaatgaaagtaaagatcatcagaaccattgaccagatgctgaacagtgagctgcagtggcccgttccagatatatatctcagggatctgaaggtggaggacattcctctagcgagaatcaccctgccagacttccgtttaccagaaatcgcaattccagaattcataatcccaactctcaaccttaatgattttcaagttcctgaccttcacataccagaattccagcttccccacatctcacacacaattgaagtacctacttttggcaagctatacagtattctgaaaatccaatctcctcttttcacattagatgcaaatgctgacatagggaatggaaccacctcagcaaacgaagcaggtatcgcagcttccatcactgccaaaggagagtccaaattagaagttctcaattttgattttcaagcaaatgcacaactctcaaaccctaagattaatccgctggctctgaaggagtcagtgaagttctccagcaagtacctgagaacggagcatgggagtgaaatgctgttttttggaaatgctattgagggaaaatcaaacacagtggcaagtttacacacagaaaaaaatacactggagcttagtaatggagtgattgtcaagataaacaatcagcttaccctggatagcaacactaaatacttccacaaattgaacatccccaaactggacttctctagtcaggctgacctgcgcaacgagatcaagacactgttgaaagctggccacatagcatggacttcttctggaaaagggtcatggaaatgggcctgccccagattctcagatgagggaacacatgaatcacaaattagtttcaccatagaaggacccctcacttcctttggactgtccaataagatcaatagcaaacacctaagagtaaaccaaaacttggtttatgaatctggctccctcaacttttctaaacttgaaattcaatcacaagtcgattcccagcatgtgggccacagtgttctaactgctaaaggcatggcactgtttggagaagggaaggcagagtttactgggaggcatgatgctcatttaaatggaaaggttattggaactttgaaaaattctcttttcttttcagcccagccatttgagatcacggcatccacaaacaatgaagggaatttgaaagttcgttttccattaaggttaacagggaagatagacttcctgaataactatgcactgtttctgagtcccagtgcccagcaagcaagttggcaagtaagtgctaggttcaatcagtataagtacaaccaaaatttctctgctggaaacaacgagaacattatggaggcccatgtaggaataaatggagaagcaaatctggatttcttaaacattcctttaacaattcctgaaatgcgtctaccttacacaataatcacaactcctccactgaaagatttctctctatgggaaaaaacaggcttgaaggaattcttgaaaacgacaaagcaatcatttgatttaagtgtaaaagctcagtataagaaaaacaaacacaggcattccatcacaaatcctttggctgtgctttgtgagtttatcagtcagagcatcaaatcctttgacaggcattttgaaaaaaacagaaacaatgcattagattttgtcaccaaatcctataatgaaacaaaaattaagtttgataagtacaaagctgaaaaatctcacgacgagctccccaggacctttcaaattcctggatacactgttccagttgtcaatgttgaagtgtctccattcaccatagagatgtcggcattcggctatgtgttcccaaaagcagtcagcatgcctagtttctccatcctaggttctgacgtccgtgtgccttcatacacattaatcctgccatcattagagctgccagtccttcatgtccctagaaatctcaagctttctcttccacatttcaaggaattgtgtaccataagccatatttttattcctgccatgggcaatattacctatgatttctcctttaaatcaagtgtcatcacactgaataccaatgctgaactttttaaccagtcagatattgttgctcatctcctttcttcatcttcatctgtcattgatgcactgcagtacaaattagagggcaccacaagattgacaagaaaaaggggattgaagttagccacagctctgtctctgagcaacaaatttgtggagggtagtcataacagtactgtgagcttaaccacgaaaaatatggaagtgtcagtggcaaaaaccacaaaagccgaaattccaattttgagaatgaatttcaagcaagaacttaatggaaataccaagtcaaaacctactgtctcttcctccatggaatttaagtatgatttcaattcttcaatgctgtactctaccgctaaaggagcagttgaccacaagcttagcttggaaagcctcacctcttacttttccattgagtcatctaccaaaggagatgtcaagggttcggttctttctcgggaatattcaggaactattgctagtgaggccaacacttacttgaattccaagagcacacggtcttcagtgaagctgcagggcacttccaaaattgatgatatctggaaccttgaagtaaaagaaaattttgctggagaagccacactccaacgcatatattccctctgggagcacagtacgaaaaaccacttacagctagagggcctctttttcaccaacggagaacatacaagcaaagccaccctggaactctctccatggcaaatgtcagctcttgttcaggtccatgcaagtcagcccagttccttccatgatttccctgaccttggccaggaagtggccctgaatgctaacactaagaaccagaagatcagatggaaaaatgaagtccggattcattctgggtctttccagagccaggtcgagctttccaatgaccaagaaaaggcacaccttgacattgcaggatccttagaaggacacctaaggttcctcaaaaatatcatcctaccagtctatgacaagagcttatgggatttcctaaagctggatgtaaccaccagcattggtaggagacagcatcttcgtgtttcaactgcctttgtgtacaccaaaaaccccaatggctattcattctccatccctgtaaaagttttggctgataaattcattattcctgggctgaaactaaatgatctaaattcagttcttgtcatgcctacgttccatgtcccatttacagatcttcaggttccatcgtgcaaacttgacttcagagaaatacaaatctataagaagctgagaacttcatcatttgccctcaacctaccaacactccccgaggtaaaattccctgaagttgatgtgttaacaaaatattctcaaccagaagactccttgattcccttttttgagataaccgtgcctgaatctcagttaactgtgtcccagttcacgcttccaatcgcagactttgagttgcccaccatcatcgtgcctgagcagaccattgagattccctccattaagttctctgtacctgctggaattgtcattccttcctttcaagcactgactgcacgctttgaggtagactctcccgtgtataatgccacttggagtgccagtttgaaaaacaaagcagattatgttgaaacagtcctggattccacatgcagctcaaccgtacagttcctagaatatgaactaaatgttttgggaacacacaaaatcgaagatggtacgttagcctctaagactaaaggaacatttgcacaccgtgacttcagtgcagaatatgaagaagatggcaaatatgaaggacttcaggaatgggaaggaaaagcgcacctcaatatcaaaagcccagcgttcaccgatctccatctgcgctaccagaaagacaagaaaggcatctccacctcagcagcctccccagccgtaggcaccgtgggcatggatatggatgaagatgacgacttttctaaatggaacttctactacagccctcagtcctctccagataaaaaactcaccatattcaaaactgagttgagggtccgggaatctgatgaggaaactcagatcaaagttaattgggaagaagaggcagcttctggcttgctaacctctctgaaagacaacgtgcccaaggccacaggggtcctttatgattatgtcaacaagtaccactgggaacacacagggctcaccctgagagaagtgtcttcaaagctgagaagaaatctgcagaacaatgctgagtgggtttatcaaggggccattaggcaaattgatgatatcgacgtgaggttccagaaagcagccagtggcaccactgggacctaccaagagtggaaggacaaggcccagaatctgtaccaggaactgttgactcaggaaggccaagccagtttccagggactcaaggataacgtgtttgatggcttggtacgagttactcaagaattccatatgaaagtcaagcatctgattgactcactcattgattttctgaacttccccagattccagtttccggggaaacctgggatatacactagggaggaactttgcactatgttcataagggaggtagggacggtactgtcccaggtatattcgaaagtccataatggttcagaaatactgttttcctatttccaagacctagtgattacacttcctttcgagttaaggaaacataaactaatagatgtaatctcgatgtatagggaactgttgaaagatttatcaaaagaagcccaagaggtatttaaagccattcagtctctcaagaccacagaggtgctacgtaatcttcaggaccttttacaattcattttccaactaatagaagataacattaaacagctgaaagagatgaaatttacttatcttattaattatatccaagatgagatcaacacaatcttcagtgattatatcccatatgtttttaaattgttgaaagaaaacctatgccttaatcttcataagttcaatgaatttattcaaaacgagcttcaggaagcttctcaagagttacagcagatccatcaatacattatggcccttcgtgaagaatattttgatccaagtatagttggctggacagtgaaatattatgaacttgaagaaaagatagtcagtctgatcaagaacctgttagttgctcttaaggacttccattctgaatatattgtcagtgcctctaactttacttcccaactctcaagtcaagttgagcaatttctgcacagaaatattcaggaatatcttagcatccttaccgatccagatggaaaagggaaagagaagattgcagagctttctgccactgctcaggaaataattaaaagccaggccattgcgacgaagaaaataatttctgattaccaccagcagtttagatataaactgcaagatttttcagaccaactctctgattactatgaaaaatttattgctgaatccaaaagattgattgacctgtccattcaaaactaccacacatttctgatatacatcacggagttactgaaaaagctgcaatcaaccacagtcatgaacccctacatgaagcttgctccaggagaacttactatcatcctctaattttttaaaagaaatcttcatttattcttcttttccaattgaactttcacatagcacagaaaaaattcaaactgcctatattgataaaaccatacagtgagccagccttgcagtaggcagtagactataagcagaagcacatatgaactggacctgcaccaaagctggcaccagggctcggaaggtctctgaactcagaaggatggcattttttgcaagttaaagaaaatcaggatctgagttattttgctaaacttgggggaggaggaacaaataaatggagtctttattgtgtatcataacac

SEQ ID NO: 438330 - DNA, 14155 bp, Homo sapiens
cattcccaccgggacctgcggggctgagtgcccttctcggttgctgccgctgaggagcccgcccagccagccagggccgcgaggccgaggccaggccgcagcccaggagccgccccaccgcagctggcgatggacccgccgaggcccgcgctgctggcgctgctggcgctgcctgcgctgctgctgctgctgctggcgggcgccagggccgaagaggaaatgctggaaaatgtcagcctggtctgtccaaaagatgcgacccgattcaagcacctccggaagtacacatacaactatgaggctgagagttccagtggagtccctgggactgctgattcaagaagtgccaccaggatcaactgcaaggttgagctggaggttccccagctctgcagcttcatcctgaagaccagccagtgcaccctgaaagaggtgtatggcttcaaccctgagggcaaagccttgctgaagaaaaccaagaactctgaggagtttgctgcagccatgtccaggtatgagctcaagctggccattccagaagggaagcaggttttcctttacccggagaaagatgaacctacttacatcctgaacatcaagaggggcatcatttctgccctcctggttcccccagagacagaagaagccaagcaagtgttgtttctggataccgtgtatggaaactgctccactcactttaccgtcaagacgaggaagggcaatgtggcaacagaaatatccactgaaagagacctggggcagtgtgatcgcttcaagcccatccgcacaggcatcagcccacttgctctcatcaaaggcatgacccgccccttgtcaactctgatcagcagcagccagtcctgtcagtacacactggacgctaagaggaagcatgtggcagaagccatctgcaaggagcaacacctcttcctgcctttctcctacaagaataagtatgggatggtagcacaagtgacacagactttgaaacttgaagacacaccaaagatcaacagccgcttctttggtgaaggtactaagaagatgggcctcgcatttgagagcaccaaatccacatcacctccaaagcaggccgaagctgttttgaagactctccaggaactgaaaaaactaaccatctctgagcaaaatatccagagagctaatctcttcaataagctggttactgagctgagaggcctcagtgatgaagcagtcacatctctcttgccacagctgattgaggtgtccagccccatcactttacaagccttggttcagtgtggacagcctcagtgctccactcacatcctccagtggctgaaacgtgtgcatgccaacccccttctgatagatgtggtcacctacctggtggccctgatccccgagccctcagcacagcagctgcgagagatcttcaacatggcgagggatcagcgcagccgagccaccttgtatgcgctgagccacgcggtcaacaactatcataagacaaaccctacagggacccaggagctgctggacattgctaattacctgatggaacagattcaagatgactgcactggggatgaagattacacctatttgattctgcgggtcattggaaatatgggccaaaccatggagcagttaactccagaactcaagtcttcaatcctgaaatgtgtccaaagtacaaagccatcactgatgatccagaaagctgccatccaggctctgcggaaaatggagcctaaagacaaggaccaggaggttcttcttcagactttccttgatgatgcttctccgggagataagcgactggctgcctatcttatgttgatgaggagtccttcacaggcagatattaacaaaattgtccaaattctaccatgggaacagaatgagcaagtgaagaactttgtggcttcccatattgccaatatcttgaactcagaagaattggatatccaagatctgaaaaagttagtgaaagaagctctgaaagaatctcaacttccaactgtcatggacttcagaaaattctctcggaactatcaactctacaaatctgtttctcttccatcacttgacccagcctcagccaaaatagaagggaatcttatatttgatccaaataactaccttcctaaagaaagcatgctgaaaactaccctcactgcctttggatttgcttcagctgacctcatcgagattggcttggaaggaaaaggctttgagccaacattggaagctctttttgggaagcaaggatttttcccagacagtgtcaacaaagctttgtactgggttaatggtcaagttcctgatggtgtctctaaggtcttagtggaccactttggctataccaaagatgataaacatgagcaggatatggtaaatggaataatgctcagtgttgagaagctgattaaagatttgaaatccaaagaagtcccggaagccagagcctacctccgcatcttgggagaggagcttggttttgccagtctccatgacctccagctcctgggaaagctgcttctgatgggtgcccgcactctgcaggggatcccccagatgattggagaggtcatcaggaagggctcaaagaatgacttttttcttcactacatcttcatggagaatgcctttgaactccccactggagctggattacagttgcaaatatcttcatctggagtcattgctcccggagccaaggctggagtaaaactggaagtagccaacatgcaggctgaactggtggcaaaaccctccgtgtctgtggagtttgtgacaaatatgggcatcatcattccggacttcgctaggagtggggtccagatgaacaccaacttcttccacgagtcgggtctggaggctcatgttgccctaaaagctgggaagctgaagtttatcattccttccccaaagagaccagtcaagctgctcagtggaggcaacacattacatttggtctctaccaccaaaacggaggtgatcccacctctcattgagaacaggcagtcctggtcagtttgcaagcaagtctttcctggcctgaattactgcacctcaggcgcttactccaacgccagctccacagactccgcctcctactatccgctgaccggggacaccagattagagctggaactgaggcctacaggagagattgagcagtattctgtcagcgcaacctatgagctccagagagaggacagagccttggtggataccctgaagtttgtaactcaagcagaaggtgcgaagcagactgaggctaccatgacattcaaatataatcggcagagtatgaccttgtccagtgaagtccaaattccggattttgatgttgacctcggaacaatcctcagagttaatgatgaatctactgagggcaaaacgtcttacagactcaccctggacattcagaacaagaaaattactgaggtcgccctcatgggccacctaagttgtgacacaaaggaagaaagaaaaatcaagggtgttatttccataccccgtttgcaagcagaagccagaagtgagatcctcgcccactggtcgcctgccaaactgcttctccaaatggactcatctgctacagcttatggctccacagtttccaagagggtggcatggcattatgatgaagagaagattgaatttgaatggaacacaggcaccaatgtagataccaaaaaaatgacttccaatttccctgtggatctctccgattatcctaagagcttgcatatgtatgctaatagactcctggatcacagagtccctcaaacagacatgactttccggcacgtgggttccaaattaatagttgcaatgagctcatggcttcagaaggcatctgggagtcttccttatacccagactttgcaagaccacctcaatagcctgaaggagttcaacctccagaacatgggattgccagacttccacatcccagaaaacctcttcttaaaaagcgatggccgggtcaaatataccttgaacaagaacagtttgaaaattgagattcctttgccttttggtggcaaatcctccagagatctaaagatgttagagactgttaggacaccagccctccacttcaagtctgtgggattccatctgccatctcgagagttccaagtccctacttttaccattcccaagttgtatcaactgcaagtgcctctcctgggtgttctagacctctccacgaatgtctacagcaacttgtacaactggtccgcctcctacagtggtggcaacaccagcacagaccatttcagccttcgggctcgttaccacatgaaggctgactctgtggttgacctgctttcctacaatgtgcaaggatctggagaaacaacatatgaccacaagaatacgttcacactatcatgtgatgggtctctacgccacaaatttctagattcgaatatcaaattcagtcatgtagaaaaacttggaaacaacccagtctcaaaaggtttactaatattcgatgcatctagttcctggggaccacagatgtctgcttcagttcatttggactccaaaaagaaacagcatttgtttgtcaaagaagtcaagattgatgggcagttcagagtctcttcgttctatgctaaaggcacatatggcctgtcttgtcagagggatcctaacactggccggctcaatggagagtccaacctgaggtttaactcctcctacctccaaggcaccaaccagataacaggaagatatgaagatggaaccctctccctcacctccacctctgatctgcaaagtggcatcattaaaaatactgcttccctaaagtatgagaactacgagctgactttaaaatctgacaccaatgggaagtataagaactttgccacttctaacaagatggatatgaccttctctaagcaaaatgcactgctgcgttctgaatatcaggctgattacgagtcattgaggttcttcagcctgctttctggatcactaaattcccatggtcttgagttaaatgctgacatcttaggcactgacaaaattaatagtggtgctcacaaggcgacactaaggattggccaagatggaatatctaccagtgcaacgaccaacttgaagtgtagtctcctggtgctggagaatgagctgaatgcagagcttggcctctctggggcatctatgaaattaacaacaaatggccgcttcagggaacacaatgcaaaattcagtctggatgggaaagccgccctcacagagctatcactgggaagtgcttatcaggccatgattctgggtgtcgacagcaaaaacattttcaacttcaaggtcagtcaagaaggacttaagctctcaaatgacatgatgggctcatatgctgaaatgaaatttgaccacacaaacagtctgaacattgcaggcttatcactggacttctcttcaaaacttgacaacatttacagctctgacaagttttataagcaaactgttaatttacagctacagccctattctctggtaactactttaaacagtgacctgaaatacaatgctctggatctcaccaacaatgggaaactacggctagaacccctgaagctgcatgtggctggtaacctaaaaggagcctaccaaaataatgaaataaaacacatctatgccatctcttctgctgccttatcagcaagctataaagcagacactgttgctaaggttcagggtgtggagtttagccatcggctcaacacagacatcgctgggctggcttcagccattgacatgagcacaaactataattcagactcactgcatttcagcaatgtcttccgttctgtaatggccccgtttaccatgaccatcgatgcacatacaaatggcaatgggaaactcgctctctggggagaacatactgggcagctgtatagcaaattcctgttgaaagcagaacctctggcatttactttctctcatgattacaaaggctccacaagtcatcatctcgtgtctaggaaaagcatcagtgcagctcttgaacacaaagtcagtgccctgcttactccagctgagcagacaggcacctggaaactcaagacccaatttaacaacaatgaatacagccaggacttggatgcttacaacactaaagataaaattggcgtggagcttactggacgaactctggctgacctaactctactagactccccaattaaagtgccacttttactcagtgagcccatcaatatcattgatgctttagagatgagagatgccgttgagaagccccaagaatttacaattgttgcttttgtaaagtatgataaaaaccaagatgttcactccattaacctcccattttttgagaccttgcaagaatattttgagaggaatcgacaaaccattatagttgtactggaaaacgtacagagaaacctgaagcacatcaatattgatcaatttgtaagaaaatacagagcagccctgggaaaactcccacagcaagctaatgattatctgaattcattcaattgggagagacaagtttcacatgccaaggagaaactgactgctctcacaaaaaagtatagaattacagaaaatgatatacaaattgcattagatgatgccaaaatcaactttaatgaaaaactatctcaactgcagacatatatgatacaatttgatcagtatattaaagatagttatgatttacatgatttgaaaatagctattgctaatattattgatgaaatcattgaaaaattaaaaagtcttgatgagcactatcatatccgtgtaaatttagtaaaaacaatccatgatctacatttgtttattgaaaatattgattttaacaaaagtggaagtagtactgcatcctggattcaaaatgtggatactaagtaccaaatcagaatccagatacaagaaaaactgcagcagcttaagagacacatacagaatatagacatccagcacctagctggaaagttaaaacaacacattgaggctattgatgttagagtgcttttagatcaattgggaactacaatttcatttgaaagaataaatgatgttcttgagcatgtcaaacactttgttataaatcttattggggattttgaagtagctgagaaaatcaatgccttcagagccaaagtccatgagttaatcgagaggtatgaagtagaccaacaaatccaggttttaatggataaattagtagagttggcccaccaatacaagttgaaggagactattcagaagctaagcaatgtcctacaacaagttaagataaaagattactttgagaaattggttggatttattgatgatgctgtcaagaagcttaatgaattatcttttaaaacattcattgaagatgttaacaaattccttgacatgttgataaagaaattaaagtcatttgattaccaccagtttgtagatgaaaccaatgacaaaatccgtgaggtgactcagagactcaatggtgaaattcaggctctggaactaccacaaaaagctgaagcattaaaactgtttttagaggaaaccaaggccacagttgcagtgtatctggaaagcctacaggacaccaaaataaccttaatcatcaattggttacaggaggctttaagttcagcatctttggctcacatgaaggccaaattccgagagactctagaagatacacgagaccgaatgtatcaaatggacattcagcaggaacttcaacgatacctgtctctggtaggccaggtttatagcacacttgtcacctacatttctgattggtggactcttgctgctaagaaccttactgactttgcagagcaatattctatccaagattgggctaaacgtatgaaagcattggtagagcaagggttcactgttcctgaaatcaagaccatccttgggaccatgcctgcctttgaagtcagtcttcaggctcttcagaaagctaccttccagacacctgattttatagtccccctaacagatttgaggattccatcagttcagataaacttcaaagacttaaaaaatataaaaatcccatccaggttttccacaccagaatttaccatccttaacaccttccacattccttcctttacaattgactttgtagaaatgaaagtaaagatcatcagaaccattgaccagatgctgaacagtgagctgcagtggcccgttccagatatatatctcagggatctgaaggtggaggacattcctctagcgagaatcaccctgccagacttccgtttaccagaaatcgcaattccagaattcataatcccaactctcaaccttaatgattttcaagttcctgaccttcacataccagaattccagcttccccacatctcacacacaattgaagtacctacttttggcaagctatacagtattctgaaaatccaatctcctcttttcacattagatgcaaatgctgacatagggaatggaaccacctcagcaaacgaagcaggtatcgcagcttccatcactgccaaaggagagtccaaattagaagttctcaattttgattttcaagcaaatgcacaactctcaaaccctaagattaatccgctggctctgaaggagtcagtgaagttctccagcaagtacctgagaacggagcatgggagtgaaatgctgttttttggaaatgctattgagggaaaatcaaacacagtggcaagtttacacacagaaaaaaatacactggagcttagtaatggagtgattgtcaagataaacaatcagcttaccctggatagcaacactaaatacttccacaaattgaacatccccaaactggacttctctagtcaggctgacctgcgcaacgagatcaagacactgttgaaagctggccacatagcatggacttcttctggaaaagggtcatggaaatgggcctgccccagattctcagatgagggaacacatgaatcacaaattagtttcaccatagaaggacccctcacttcctttggactgtccaataagatcaatagcaaacacctaagagtaaaccaaaacttggtttatgaatctggctccctcaacttttctaaacttgaaattcaatcacaagtcgattcccagcatgtgggccacagtgttctaactgctaaaggcatggcactgtttggagaagggaaggcagagtttactgggaggcatgatgctcatttaaatggaaaggttattggaactttgaaaaattctcttttcttttcagcccagccatttgagatcacggcatccacaaacaatgaagggaatttgaaagttcgttttccattaaggttaacagggaagatagacttcctgaataactatgcactgtttctgagtcccagtgcccagcaagcaagttggcaagtaagtgctaggttcaatcagtataagtacaaccaaaatttctctgctggaaacaacgagaacattatggaggcccatgtaggaataaatggagaagcaaatctggatttcttaaacattcctttaacaattcctgaaatgcgtctaccttacacaataatcacaactcctccactgaaagatttctctctatgggaaaaaacaggcttgaaggaattcttgaaaacgacaaagcaatcatttgatttaagtgtaaaagctcagtataagaaaaacaaacacaggcattccatcacaaatcctttggctgtgctttgtgagtttatcagtcagagcatcaaatcctttgacaggcattttgaaaaaaacagaaacaatgcattagattttgtcaccaaatcctataatgaaacaaaaattaagtttgataagtacaaagctgaaaaatctcacgacgagctccccaggacctttcaaattcctggatacactgttccagttgtcaatgttgaagtgtctccattcaccatagagatgtcggcattcggctatgtgttcccaaaagcagtcagcatgcctagtttctccatcctaggttctgacgtccgtgtgccttcatacacattaatcctgccatcattagagctgccagtccttcatgtccctagaaatctcaagctttctcttccacatttcaaggaattgtgtaccataagccatatttttattcctgccatgggcaatattacctatgatttctcctttaaatcaagtgtcatcacactgaataccaatgctgaactttttaaccagtcagatattgttgctcatctcctttcttcatcttcatctgtcattgatgcactgcagtacaaattagagggcaccacaagattgacaagaaaaaggggattgaagttagccacagctctgtctctgagcaacaaatttgtggagggtagtcataacagtactgtgagcttaaccacgaaaaatatggaagtgtcagtggcaaaaaccacaaaagccgaaattccaattttgagaatgaatttcaagcaagaacttaatggaaataccaagtcaaaacctactgtctcttcctccatggaatttaagtatgatttcaattcttcaatgctgtactctaccgctaaaggagcagttgaccacaagcttagcttggaaagcctcacctcttacttttccattgagtcatctaccaaaggagatgtcaagggttcggttctttctcgggaatattcaggaactattgctagtgaggccaacacttacttgaattccaagagcacacggtcttcagtgaagctgcagggcacttccaaaattgatgatatctggaaccttgaagtaaaagaaaattttgctggagaagccacactccaacgcatatattccctctgggagcacagtacgaaaaaccacttacagctagagggcctctttttcaccaacggagaacatacaagcaaagccaccctggaactctctccatggcaaatgtcagctcttgttcaggtccatgcaagtcagcccagttccttccatgatttccctgaccttggccaggaagtggccctgaatgctaacactaagaaccagaagatcagatggaaaaatgaagtccggattcattctgggtctttccagagccaggtcgagctttccaatgaccaagaaaaggcacaccttgacattgcaggatccttagaaggacacctaaggttcctcaaaaatatcatcctaccagtctatgacaagagcttatgggatttcctaaagctggatgtaaccaccagcattggtaggagacagcatcttcgtgtttcaactgcctttgtgtacaccaaaaaccccaatggctattcattctccatccctgtaaaagttttggctgataaattcattattcctgggctgaaactaaatgatctaaattcagttcttgtcatgcctacgttccatgtcccatttacagatcttcaggttccatcgtgcaaacttgacttcagagaaatacaaatctataagaagctgagaacttcatcatttgccctcaacctaccaacactccccgaggtaaaattccctgaagttgatgtgttaacaaaatattctcaaccagaagactccttgattcccttttttgagataaccgtgcctgaatctcagttaactgtgtcccagttcacgcttccaaaaagtgtttcagatggcattgctgctttggatctaaatgcagtagccaacaagatcgcagactttgagttgcccaccatcatcgtgcctgagcagaccattgagattccctccattaagttctctgtacctgctggaattgtcattccttcctttcaagcactgactgcacgctttgaggtagactctcccgtgtataatgccacttggagtgccagtttgaaaaacaaagcagattatgttgaaacagtcctggattccacatgcagctcaaccgtacagttcctagaatatgaactaaatgttttgggaacacacaaaatcgaagatggtacgttagcctctaagactaaaggaacatttgcacaccgtgacttcagtgcagaatatgaagaagatggcaaatatgaaggacttcaggaatgggaaggaaaagcgcacctcaatatcaaaagcccagcgttcaccgatctccatctgcgctaccagaaagacaagaaaggcatctccacctcagcagcctccccagccgtaggcaccgtgggcatggatatggatgaagatgacgacttttctaaatggaacttctactacagccctcagtcctctccagataaaaaactcaccatattcaaaactgagttgagggtccgggaatctgatgaggaaactcagatcaaagttaattgggaagaagaggcagcttctggcttgctaacctctctgaaagacaacgtgcccaaggccacaggggtcctttatgattatgtcaacaagtaccactgggaacacacagggctcaccctgagagaagtgtcttcaaagctgagaagaaatctgcagaacaatgctgagtgggtttatcaaggggccattaggcaaattgatgatatcgacgtgaggttccagaaagcagccagtggcaccactgggacctaccaagagtggaaggacaaggcccagaatctgtaccaggaactgttgactcaggaaggccaagccagtttccagggactcaaggataacgtgtttgatggcttggtacgagttactcaagaattccatatgaaagtcaagcatctgattgactcactcattgattttctgaacttccccagattccagtttccggggaaacctgggatatacactagggaggaactttgcactatgttcataagggaggtagggacggtactgtcccaggtatattcgaaagtccataatggttcagaaatactgttttcctatttccaagacctagtgattacacttcctttcgagttaaggaaacataaactaatagatgtaatctcgatgtatagggaactgttgaaagatttatcaaaagaagcccaagaggtatttaaagccattcagtctctcaagaccacagaggtgctacgtaatcttcaggaccttttacaattcattttccaactaatagaagataacattaaacagctgaaagagatgaaatttacttatcttattaattatatccaagatgagatcaacacaatcttcagtgattatatcccatatgtttttaaattgttgaaagaaaacctatgccttaatcttcataagttcaatgaatttattcaaaacgagcttcaggaagcttctcaagagttacagcagatccatcaatacattatggcccttcgtgaagaatattttgatccaagtatagttggctggacagtgaaatattatgaacttgaagaaaagatagtcagtctgatcaagaacctgttagttgctcttaaggacttccattctgaatatattgtcagtgcctctaactttacttcccaactctcaagtcaagttgagcaatttctgcacagaaatattcaggaatatcttagcatccttaccgatccagatggaaaagggaaagagaagattgcagagctttctgccactgctcaggaaataattaaaagccaggccattgcgacgaagaaaataatttctgattaccaccagcagtttagatataaactgcaagatttttcagaccaactctctgattactatgaaaaatttattgctgaatccaaaagattgattgacctgtccattcaaaactaccacacatttctgatatacatcacggagttactgaaaaagctgcaatcaaccacagtcatgaacccctacatgaagcttgctccaggagaacttactatcatcctctaattttttaaaagaaatcttcatttattcttcttttccaattgaactttcacatagcacagaaaaaattcaaactgcctatattgataaaaccatacagtgagccagccttgcagtaggcagtagactataagcagaagcacatatgaactggacctgcaccaaagctggcaccagggctcggaaggtctctgaactcagaaggatggcattttttgcaagttaaagaaaatcaggatctgagttattttgctaaacttgggggaggaggaacaaataaatggagtctttattgtgtatcataacacaacaaacaacaaaacaaaaaaaaaaaccc

SEQ ID NO: 438331 - DNA, 14101 bp, Homo sapiens
cattcccaccgggacctgcggggctgagtgcccttctcggttgctgccgctgaggagcccgcccagccagccagggccgcgaggccgaggccaggccgcagcccaggagccgccccaccgcagctggcgatggacccgccgaggcccgcgctgctggcgctgctggcgctgcctgcgctgctgctgctgctgctggcgggcgccagggccgaagaggaaatgctggaaaatgtcagcctggtctgtccaaaagatgcgacccgattcaagcacctccggaagtacacatacaactatgaggctgagagttccagtggagtccctgggactgctgattcaagaagtgccaccaggatcaactgcaaggttgagctggaggttccccagctctgcagcttcatcctgaagaccagccagtgcaccctgaaagaggtgtatggcttcaaccctgagggcaaagccttgctgaagaaaaccaagaactctgaggagtttgctgcagccatgtccaggtatgagctcaagctggccattccagaagggaagcaggttttcctttacccggagaaagatgaacctacttacatcctgaacatcaagaggggcatcatttctgccctcctggttcccccagagacagaagaagccaagcaagtgttgtttctggataccgtgtatggaaactgctccactcactttaccgtcaagacgaggaagggcaatgtggcaacagaaatatccactgaaagagacctggggcagtgtgatcgcttcaagcccatccgcacaggcatcagcccacttgctctcatcaaaggcatgacccgccccttgtcaactctgatcagcagcagccagtcctgtcagtacacactggacgctaagaggaagcatgtggcagaagccatctgcaaggagcaacacctcttcctgcctttctcctacaagaataagtatgggatggtagcacaagtgacacagactttgaaacttgaagacacaccaaagatcaacagccgcttctttggtgaaggtactaagaagatgggcctcgcatttgagagcaccaaatccacatcacctccaaagcaggccgaagctgttttgaagactctccaggaactgaaaaaactaaccatctctgagcaaaatatccagagagctaatctcttcaataagctggttactgagctgagaggcctcagtgatgaagcagtcacatctctcttgccacagctgattgaggtgtccagccccatcactttacaagccttggttcagtgtggacagcctcagtgctccactcacatcctccagtggctgaaacgtgtgcatgccaacccccttctgatagatgtggtcacctacctggtggccctgatccccgagccctcagcacagcagctgcgagagatcttcaacatggcgagggatcagcgcagccgagccaccttgtatgcgctgagccacgcggtcaacaactatcataagacaaaccctacagggacccaggagctgctggacattgctaattacctgatggaacagattcaagatgactgcactggggatgaagattacacctatttgattctgcgggtcattggaaatatgggccaaaccatggagcagttaactccagaactcaagtcttcaatcctgaaatgtgtccaaagtacaaagccatcactgatgatccagaaagctgccatccaggctctgcggaaaatggagcctaaagacaaggaccaggaggttcttcttcagactttccttgatgatgcttctccgggagataagcgactggctgcctatcttatgttgatgaggagtccttcacaggcagatattaacaaaattgtccaaattctaccatgggaacagaatgagcaagtgaagaactttgtggcttcccatattgccaatatcttgaactcagaagaattggatatccaagatctgaaaaagttagtgaaagaagctctgaaagaatctcaacttccaactgtcatggacttcagaaaattctctcggaactatcaactctacaaatctgtttctcttccatcacttgacccagcctcagccaaaatagaagggaatcttatatttgatccaaataactaccttcctaaagaaagcatgctgaaaactaccctcactgcctttggatttgcttcagctgacctcatcgagattggcttggaaggaaaaggctttgagccaacattggaagctctttttgggaagcaaggatttttcccagacagtgtcaacaaagctttgtactgggttaatggtcaagttcctgatggtgtctctaaggtcttagtggaccactttggctataccaaagatgataaacatgagcaggatatggtaaatggaataatgctcagtgttgagaagctgattaaagatttgaaatccaaagaagtcccggaagccagagcctacctccgcatcttgggagaggagcttggttttgccagtctccatgacctccagctcctgggaaagctgcttctgatgggtgcccgcactctgcaggggatcccccagatgattggagaggtcatcaggaagggctcaaagaatgacttttttcttcactacatcttcatggagaatgcctttgaactccccactggagctggattacagttgcaaatatcttcatctggagtcattgctcccggagccaaggctggagtaaaactggaagtagccaacatgcaggctgaactggtggcaaaaccctccgtgtctgtggagtttgtgacaaatatgggcatcatcattccggacttcgctaggagtggggtccagatgaacaccaacttcttccacgagtcgggtctggaggctcatgttgccctaaaagctgggaagctgaagtttatcattccttccccaaagagaccagtcaagctgctcagtggaggcaacacattacatttggtctctaccaccaaaacggaggtgatcccacctctcattgagaacaggcagtcctggtcagtttgcaagcaagtctttcctggcctgaattactgcacctcaggcgcttactccaacgccagctccacagactccgcctcctactatccgctgaccggggacaccagattagagctggaactgaggcctacaggagagattgagcagtattctgtcagcgcaacctatgagctccagagagaggacagagccttggtggataccctgaagtttgtaactcaagcagaaggtgcgaagcagactgaggctaccatgacattcaaatataatcggcagagtatgaccttgtccagtgaagtccaaattccggattttgatgttgacctcggaacaatcctcagagttaatgatgaatctactgagggcaaaacgtcttacagactcaccctggacattcagaacaagaaaattactgaggtcgccctcatgggccacctaagttgtgacacaaaggaagaaagaaaaatcaagggtgttatttccataccccgtttgcaagcagaagccagaagtgagatcctcgcccactggtcgcctgccaaactgcttctccaaatggactcatctgctacagcttatggctccacagtttccaagagggtggcatggcattatgatgaagagaagattgaatttgaatggaacacaggcaccaatgtagataccaaaaaaatgacttccaatttccctgtggatctctccgattatcctaagagcttgcatatgtatgctaatagactcctggatcacagagtccctcaaacagacatgactttccggcacgtgggttccaaattaatagttgcaatgagctcatggcttcagaaggcatctgggagtcttccttatacccagactttgcaagaccacctcaatagcctgaaggagttcaacctccagaacatgggattgccagacttccacatcccagaaaacctcttcttaaaaagcgatggccgggtcaaatataccttgaacaagaacagtttgaaaattgagattcctttgccttttggtggcaaatcctccagagatctaaagatgttagagactgttaggacaccagccctccacttcaagtctgtgggattccatctgccatctcgagagttccaagtccctacttttaccattcccaagttgtatcaactgcaagtgcctctcctgggtgttctagacctctccacgaatgtctacagcaacttgtacaactggtccgcctcctacagtggtggcaacaccagcacagaccatttcagccttcgggctcgttaccacatgaaggctgactctgtggttgacctgctttcctacaatgtgcaaggatctggagaaacaacatatgaccacaagaatacgttcacactatcatgtgatgggtctctacgccacaaatttctagattcgaatatcaaattcagtcatgtagaaaaacttggaaacaacccagtctcaaaaggtttactaatattcgatgcatctagttcctggggaccacagatgtctgcttcagttcatttggactccaaaaagaaacagcatttgtttgtcaaagaagtcaagattgatgggcagttcagagtctcttcgttctatgctaaaggcacatatggcctgtcttgtcagagggatcctaacactggccggctcaatggagagtccaacctgaggtttaactcctcctacctccaaggcaccaaccagataacaggaagatatgaagatggaaccctctccctcacctccacctctgatctgcaaagtggcatcattaaaaatactgcttccctaaagtatgagaactacgagctgactttaaaatctgacaccaatgggaagtataagaactttgccacttctaacaagatggatatgaccttctctaagcaaaatgcactgctgcgttctgaatatcaggctgattacgagtcattgaggttcttcagcctgctttctggatcactaaattcccatggtcttgagttaaatgctgacatcttaggcactgacaaaattaatagtggtgctcacaaggcgacactaaggattggccaagatggaatatctaccagtgcaacgaccaacttgaagtgtagtctcctggtgctggagaatgagctgaatgcagagcttggcctctctggggcatctatgaaattaacaacaaatggccgcttcagggaacacaatgcaaaattcagtctggatgggaaagccgccctcacagagctatcactgggaagtgcttatcaggccatgattctgggtgtcgacagcaaaaacattttcaacttcaaggtcagtcaagaaggacttaagctctcaaatgacatgatgggctcatatgctgaaatgaaatttgaccacacaaacagtctgaacattgcaggcttatcactggacttctcttcaaaacttgacaacatttacagctctgacaagttttataagcaaactgttaatttacagctacagccctattctctggtaactactttaaacagtgacctgaaatacaatgctctggatctcaccaacaatgggaaactacggctagaacccctgaagctgcatgtggctggtaacctaaaaggagcctaccaaaataatgaaataaaacacatctatgccatctcttctgctgccttatcagcaagctataaagcagacactgttgctaaggttcagggtgtggagtttagccatcggctcaacacagacatcgctgggctggcttcagccattgacatgagcacaaactataattcagactcactgcatttcagcaatgtcttccgttctgtaatggccccgtttaccatgaccatcgatgcacatacaaatggcaatgggaaactcgctctctggggagaacatactgggcagctgtatagcaaattcctgttgaaagcagaacctctggcatttactttctctcatgattacaaaggctccacaagtcatcatctcgtgtctaggaaaagcatcagtgcagctcttgaacacaaagtcagtgccctgcttactccagctgagcagacaggcacctggaaactcaagacccaatttaacaacaatgaatacagccaggacttggatgcttacaacactaaagataaaattggcgtggagcttactggacgaactctggctgacctaactctactagactccccaattaaagtgccacttttactcagtgagcccatcaatatcattgatgctttagagatgagagatgccgttgagaagccccaagaatttacaattgttgcttttgtaaagtatgataaaaaccaagatgttcactccattaacctcccattttttgagaccttgcaagaatattttgagaggaatcgacaaaccattatagttgtactggaaaacgtacagagaaacctgaagcacatcaatattgatcaatttgtaagaaaatacagagcagccctgggaaaactcccacagcaagctaatgattatctgaattcattcaattgggagagacaagtttcacatgccaaggagaaactgactgctctcacaaaaaagtatagaattacagaaaatgatatacaaattgcattagatgatgccaaaatcaactttaatgaaaaactatctcaactgcagacatatatgatacaatttgatcagtatattaaagatagttatgatttacatgatttgaaaatagctattgctaatattattgatgaaatcattgaaaaattaaaaagtcttgatgagcactatcatatccgtgtaaatttagtaaaaacaatccatgatctacatttgtttattgaaaatattgattttaacaaaagtggaagtagtactgcatcctggattcaaaatgtggatactaagtaccaaatcagaatccagatacaagaaaaactgcagcagcttaagagacacatacagaatatagacatccagcacctagctggaaagttaaaacaacacattgaggctattgatgttagagtgcttttagatcaattgggaactacaatttcatttgaaagaataaatgatgttcttgagcatgtcaaacactttgttataaatcttattggggattttgaagtagctgagaaaatcaatgccttcagagccaaagtccatgagttaatcgagaggtatgaagtagaccaacaaatccaggttttaatggataaattagtagagttggcccaccaatacaagttgaaggagactattcagaagctaagcaatgtcctacaacaagttaagataaaagattactttgagaaattggttggatttattgatgatgctgtcaagaagcttaatgaattatcttttaaaacattcattgaagatgttaacaaattccttgacatgttgataaagaaattaaagtcatttgattaccaccagtttgtagatgaaaccaatgacaaaatccgtgaggtgactcagagactcaatggtgaaattcaggctctggaactaccacaaaaagctgaagcattaaaactgtttttagaggaaaccaaggccacagttgcagtgtatctggaaagcctacaggacaccaaaataaccttaatcatcaattggttacaggaggctttaagttcagcatctttggctcacatgaaggccaaattccgagagactctagaagatacacgagaccgaatgtatcaaatggacattcagcaggaacttcaacgatacctgtctctggtaggccaggtttatagcacacttgtcacctacatttctgattggtggactcttgctgctaagaaccttactgactttgcagagcaatattctatccaagattgggctaaacgtatgaaagcattggtagagcaagggttcactgttcctgaaatcaagaccatccttgggaccatgcctgcctttgaagtcagtcttcaggctcttcagaaagctaccttccagacacctgattttatagtccccctaacagatttgaggattccatcagttcagataaacttcaaagacttaaaaaatataaaaatcccatccaggttttccacaccagaatttaccatccttaacaccttccacattccttcctttacaattgactttgtagaaatgaaagtaaagatcatcagaaccattgaccagatgctgaacagtgagctgcagtggcccgttccagatatatatctcagggatctgaaggtggaggacattcctctagcgagaatcaccctgccagacttccgtttaccagaaatcgcaattccagaattcataatcccaactctcaaccttaatgattttcaagttcctgaccttcacataccagaattccagcttccccacatctcacacacaattgaagtacctacttttggcaagctatacagtattctgaaaatccaatctcctcttttcacattagatgcaaatgctgacatagggaatggaaccacctcagcaaacgaagcaggtatcgcagcttccatcactgccaaaggagagtccaaattagaagttctcaattttgattttcaagcaaatgcacaactctcaaaccctaagattaatccgctggctctgaaggagtcagtgaagttctccagcaagtacctgagaacggagcatgggagtgaaatgctgttttttggaaatgctattgagggaaaatcaaacacagtggcaagtttacacacagaaaaaaatacactggagcttagtaatggagtgattgtcaagataaacaatcagcttaccctggatagcaacactaaatacttccacaaattgaacatccccaaactggacttctctagtcaggctgacctgcgcaacgagatcaagacactgttgaaagctggccacatagcatggacttcttctggaaaagggtcatggaaatgggcctgccccagattctcagatgagggaacacatgaatcacaaattagtttcaccatagaaggacccctcacttcctttggactgtccaataagatcaatagcaaacacctaagagtaaaccaaaacttggtttatgaatctggctccctcaacttttctaaacttgaaattcaatcacaagtcgattcccagcatgtgggccacagtgttctaactgctaaaggcatggcactgtttggagaagggaaggcagagtttactgggaggcatgatgctcatttaaatggaaaggttattggaactttgaaaaattctcttttcttttcagcccagccatttgagatcacggcatccacaaacaatgaagggaatttgaaagttcgttttccattaaggttaacagggaagatagacttcctgaataactatgcactgtttctgagtcccagtgcccagcaagcaagttggcaagtaagtgctaggttcaatcagtataagtacaaccaaaatttctctgctggaaacaacgagaacattatggaggcccatgtaggaataaatggagaagcaaatctggatttcttaaacattcctttaacaattcctgaaatgcgtctaccttacacaataatcacaactcctccactgaaagatttctctctatgggaaaaaacaggcttgaaggaattcttgaaaacgacaaagcaatcatttgatttaagtgtaaaagctcagtataagaaaaacaaacacaggcattccatcacaaatcctttggctgtgctttgtgagtttatcagtcagagcatcaaatcctttgacaggcattttgaaaaaaacagaaacaatgcattagattttgtcaccaaatcctataatgaaacaaaaattaagtttgataagtacaaagctgaaaaatctcacgacgagctccccaggacctttcaaattcctggatacactgttccagttgtcaatgttgaagtgtctccattcaccatagagatgtcggcattcggctatgtgttcccaaaagcagtcagcatgcctagtttctccatcctaggttctgacgtccgtgtgccttcatacacattaatcctgccatcattagagctgccagtccttcatgtccctagaaatctcaagctttctcttccacatttcaaggaattgtgtaccataagccatatttttattcctgccatgggcaatattacctatgatttctcctttaaatcaagtgtcatcacactgaataccaatgctgaactttttaaccagtcagatattgttgctcatctcctttcttcatcttcatctgtcattgatgcactgcagtacaaattagagggcaccacaagattgacaagaaaaaggggattgaagttagccacagctctgtctctgagcaacaaatttgtggagggtagtcataacagtactgtgagcttaaccacgaaaaatatggaagtgtcagtggcaaaaaccacaaaagccgaaattccaattttgagaatgaatttcaagcaagaacttaatggaaataccaagtcaaaacctactgtctcttcctccatggaatttaagtatgatttcaattcttcaatgctgtactctaccgctaaaggagcagttgaccacaagcttagcttggaaagcctcacctcttacttttccattgagtcatctaccaaaggagatgtcaagggttcggttctttctcgggaatattcaggaactattgctagtgaggccaacacttacttgaattccaagagcacacggtcttcagtgaagctgcagggcacttccaaaattgatgatatctggaaccttgaagtaaaagaaaattttgctggagaagccacactccaacgcatatattccctctgggagcacagtacgaaaaaccacttacagctagagggcctctttttcaccaacggagaacatacaagcaaagccaccctggaactctctccatggcaaatgtcagctcttgttcaggtccatgcaagtcagcccagttccttccatgatttccctgaccttggccaggaagtggccctgaatgctaacactaagaaccagaagatcagatggaaaaatgaagtccggattcattctgggtctttccagagccaggtcgagctttccaatgaccaagaaaaggcacaccttgacattgcaggatccttagaaggacacctaaggttcctcaaaaatatcatcctaccagtctatgacaagagcttatgggatttcctaaagctggatgtaaccaccagcattggtaggagacagcatcttcgtgtttcaactgcctttgtgtacaccaaaaaccccaatggctattcattctccatccctgtaaaagttttggctgataaattcattattcctgggctgaaactaaatgatctaaattcagttcttgtcatgcctacgttccatgtcccatttacagatcttcaggttccatcgtgcaaacttgacttcagagaaatacaaatctataagaagctgagaacttcatcatttgccctcaacctaccaacactccccgaggtaaaattccctgaagttgatgtgttaacaaaatattctcaaccagaagactccttgattcccttttttgagataaccgtgcctgaatctcagttaactgtgtcccagttcacgcttccaaaaagtgtttcagatggcattgctgctttggatctaaatgcagtagccaacaagatcgcagactttgagttgcccaccatcatcgtgcctgagcagaccattgagattccctccattaagttctctgtacctgctggaattgtcattccttcctttcaagcactgactgcacgctttgaggtagactctcccgtgtataatgccacttggagtgccagtttgaaaaacaaagcagattatgttgaaacagtcctggattccacatgcagctcaaccgtacagttcctagaatatgaactaaatgttttgggaacacacaaaatcgaagatggtacgttagcctctaagactaaaggaacatttgcacaccgtgacttcagtgcagaatatgaagaagatggcaaatatgaaggacttcaggaatgggaaggaaaagcgcacctcaatatcaaaagcccagcgttcaccgatctccatctgcgctaccagaaagacaagaaaggcatctccacctcagcagcctccccagccgtaggcaccgtgggcatggatatggatgaagatgacgacttttctaaatggaacttctactacagccctcagtcctctccagataaaaaactcaccatattcaaaactgagttgagggtccgggaatctgatgaggaaactcagatcaaagttaattgggaagaagaggcagcttctggcttgctaacctctctgaaagacaacgtgcccaaggccacaggggtcctttatgattatgtcaacaagtaccactgggaacacacagggctcaccctgagagaagtgtcttcaaagctgagaagaaatctgcagaacaatgctgagtgggtttatcaaggggccattaggcaaattgatgatatcgacgtgaggttccagaaagcagccagtggcaccactgggacctaccaagagtggaaggacaaggcccagaatctgtaccaggaactgttgactcaggaaggccaagccagtttccagggactcaaggataacgtgtttgatggcttggtacgagttactcaagaattccatatgaaagtcaagcatctgattgactcactcattgattttctgaacttccccagattccagtttccggggaaacctgggatatacactagggaggaactttgcactatgttcataagggaggtagggacggtactgtcccaggtatattcgaaagtccataatggttcagaaatactgttttcctatttccaagacctagtgattacacttcctttcgagttaaggaaacataaactaatagatgtaatctcgatgtatagggaactgttgaaagatttatcaaaagaagcccaagaggtatttaaagccattcagtctctcaagaccacagaggtgctacgtaatcttcaggaccttttacaattcattttccaactaatagaagataacattaaacagctgaaagagatgaaatttacttatcttattaattatatccaagatgagatcaacacaatcttcagtgattatatcccatatgtttttaaattgttgaaagaaaacctatgccttaatcttcataagttcaatgaatttattcaaaacgagcttcaggaagcttctcaagagttacagcagatccatcaatacattatggcccttcgtgaagaatattttgatccaagtatagttggctggacagtgaaatattatgaacttgaagaaaagatagtcagtctgatcaagaacctgttagttgctcttaaggacttccattctgaatatattgtcagtgcctctaactttacttcccaactctcaagtcaagttgagcaatttctgcacagaaatattcaggaatatcttagcatccttaccgatccagatggaaaagggaaagagaagattgcagagctttctgccactgctcaggaaataattaaaagccaggccattgcgacgaagaaaataatttctgattaccaccagcagtttagatataaactgcaagatttttcagaccaactctctgattactatgaaaaatttattgctgaatccaaaagattgattgacctgtccattcaaaactaccacacatttctgatatacatcacggagttactgaaaaagctgcaatcaaccacagtcatgaacccctacatgaagcttgctccaggagaacttactatcatcctctaattttttaaaagaaatcttcatttattcttcttttccaattgaactttcacatagcacagaaaaaattcaaactgcctatattgataatatgaactggacctgcaccaaagctggcaccagggctcggaaggtctctgaactcagaaggatggcattttttgcaagttaaagaaaatcaggatctgagttattttgctaaacttgggggaggaggaacaaataaatggagtctttattgtgtatcataacacaacaaacaacaaaacaaaaaaaaaaaccc

SEQ ID NO: 438332 - DNA, 12346 bp, Homo sapiens
cattcccaccgggacctgcggggctgagtgcccttctcggttgctgccgctgaggagcccgcccagccagccagggccgcgaggccgaggccaggccgcagcccaggagccgccccaccgcagctggcgatggacccgccgaggcccgcgctgctggcgctgctggcgctgcctgcgctgctgctgctgctgctggcgggcgccagggccgaagaggaaatgctggaaaatgtcagcctggtctgtccaaaagatgcgacccgattcaagcacctccggaagtacacatacaactatgaggctgagagttccagtggagtccctgggactgctgattcaagaagtgccaccaggatcaactgcaaggttgagctggaggttccccagctctgcagcttcatcctgaagaccagccagtgcaccctgaaagaggtgtatggcttcaaccctgagggcaaagccttgctgaagaaaaccaagaactctgaggagtttgctgcagccatgtccaggtatgagctcaagctggccattccagaagggaagcaggttttcctttacccggagaaagatgaacctacttacatcctgaacatcaagaggggcatcatttctgccctcctggttcccccagagacagaagaagccaagcaagtgttgtttctggataccgtgtatggaaactgctccactcactttaccgtcaagacgaggaagggcaatgtggcaacagaaatatccactgaaagagacctggggcagtgtgatcgcttcaagcccatccgcacaggcatcagcccacttgctctcatcaaaggcatgacccgccccttgtcaactctgatcagcagcagccagtcctgtcagtacacactggacgctaagaggaagcatgtggcagaagccatctgcaaggagcaacacctcttcctgcctttctcctacaagaataagtatgggatggtagcacaagtgacacagactttgaaacttgaagacacaccaaagatcaacagccgcttctttggtgaaggtactaagaagatgggcctcgcatttgagagcaccaaatccacatcacctccaaagcaggccgaagctgttttgaagactctccaggaactgaaaaaactaaccatctctgagcaaaatatccagagagctaatctcttcaataagctggttactgagctgagaggcctcagtgatgaagcagtcacatctctcttgccacagctgattgaggtgtccagccccatcactttacaagccttggttcagtgtggacagcctcagtgctccactcacatcctccagtggctgaaacgtgtgcatgccaacccccttctgatagatgtggtcacctacctggtggccctgatccccgagccctcagcacagcagctgcgagagatcttcaacatggcgagggatcagcgcagccgagccaccttgtatgcgctgagccacgcggtcaacaactatcataagacaaaccctacagggacccaggagctgctggacattgctaattacctgatggaacagattcaagatgactgcactggggatgaagattacacctatttgattctgcgggtcattggaaatatgggccaaaccatggagcagttaactccagaactcaagtcttcaatcctgaaatgtgtccaaagtacaaagccatcactgatgatccagaaagctgccatccaggctctgcggaaaatggagcctaaagacaaggaccaggaggttcttcttcagactttccttgatgatgcttctccgggagataagcgactggctgcctatcttatgttgatgaggagtccttcacaggcagatattaacaaaattgtccaaattctaccatgggaacagaatgagcaagtgaagaactttgtggcttcccatattgccaatatcttgaactcagaagaattggatatccaagatctgaaaaagttagtgaaagaagctctgaaagaatctcaacttccaactgtcatggacttcagaaaattctctcggaactatcaactctacaaatctgtttctcttccatcacttgacccagcctcagccaaaatagaagggaatcttatatttgatccaaataactaccttcctaaagaaagcatgctgaaaactaccctcactgcctttggatttgcttcagctgacctcatcgagattggcttggaaggaaaaggctttgagccaacattggaagctctttttgggaagcaaggatttttcccagacagtgtcaacaaagctttgtactgggttaatggtcaagttcctgatggtgtctctaaggtcttagtggaccactttggctataccaaagatgataaacatgagcaggatatggtaaatggaataatgctcagtgttgagaagctgattaaagatttgaaatccaaagaagtcccggaagccagagcctacctccgcatcttgggagaggagcttggttttgccagtctccatgacctccagctcctgggaaagctgcttctgatgggtgcccgcactctgcaggggatcccccagatgattggagaggtcatcaggaagggctcaaagaatgacttttttcttcactacatcttcatggagaatgcctttgaactccccactggagctggattacagttgcaaatatcttcatctggagtcattgctcccggagccaaggctggagtaaaactggaagtagccaacatgcaggctgaactggtggcaaaaccctccgtgtctgtggagtttgtgacaaatatgggcatcatcattccggacttcgctaggagtggggtccagatgaacaccaacttcttccacgagtcgggtctggaggctcatgttgccctaaaagctgggaagctgaagtttatcattccttccccaaagagaccagtcaagctgctcagtggaggcaacacattacatttggtctctaccaccaaaacggaggtgatcccacctctcattgagaacaggcagtcctggtcagtttgcaagcaagtctttcctggcctgaattactgcacctcaggcgcttactccaacgccagctccacagactccgcctcctactatccgctgaccggggacaccagattagagctggaactgaggcctacaggagagattgagcagtattctgtcagcgcaacctatgagctccagagagaggacagagccttggtggataccctgaagtttgtaactcaagcagaaggtgcgaagcagactgaggctaccatgacattcaaatataatcggcagagtatgaccttgtccagtgaagtccaaattccggattttgatgttgacctcggaacaatcctcagagttaatgatgaatctactgagggcaaaacgtcttacagactcaccctggacattcagaacaagaaaattactgaggtcgccctcatgggccacctaagttgtgacacaaaggaagaaagaaaaatcaagggtgttatttccataccccgtttgcaagcagaagccagaagtgagatcctcgcccactggtcgcctgccaaactgcttctccaaatggactcatctgctacagcttatggctccacagtttccaagagggtggcatggcattatgatgaagagaagattgaatttgaatggaacacaggcaccaatgtagataccaaaaaaatgacttccaatttccctgtggatctctccgattatcctaagagcttgcatatgtatgctaatagactcctggatcacagagtccctcaaacagacatgactttccggcacgtgggttccaaattaatagttgcaatgagctcatggcttcagaaggcatctgggagtcttccttatacccagactttgcaagaccacctcaatagcctgaaggagttcaacctccagaacatgggattgccagacttccacatcccagaaaacctcttcttaaaaagcgatggccgggtcaaatataccttgaacaagaacagtttgaaaattgagattcctttgccttttggtggcaaatcctccagagatctaaagatgttagagactgttaggacaccagccctccacttcaagtctgtgggattccatctgccatctcgagagttccaagtccctacttttaccattcccaagttgtatcaactgcaagtgcctctcctgggtgttctagacctctccacgaatgtctacagcaacttgtacaactggtccgcctcctacagtggtggcaacaccagcacagaccatttcagccttcgggctcgttaccacatgaaggctgactctgtggttgacctgctttcctacaatgtgcaaggatctggagaaacaacatatgaccacaagaatacgttcacactatcatgtgatgggtctctacgccacaaatttctagattcgaatatcaaattcagtcatgtagaaaaacttggaaacaacccagtctcaaaaggtttactaatattcgatgcatctagttcctggggaccacagatgtctgcttcagttcatttggactccaaaaagaaacagcatttgtttgtcaaagaagtcaagattgatgggcagttcagagtctcttcgttctatgctaaaggcacatatggcctgtcttgtcagagggatcctaacactggccggctcaatggagagtccaacctgaggtttaactcctcctacctccaaggcaccaaccagataacaggaagatatgaagatggaaccctctccctcacctccacctctgatctgcaaagtggcatcattaaaaatactgcttccctaaagtatgagaactacgagctgactttaaaatctgacaccaatgggaagtataagaactttgccacttctaacaagatggatatgaccttctctaagcaaaatgcactgctgcgttctgaatatcaggctgattacgagtcattgaggttcttcagcctgctttctggatcactaaattcccatggtcttgagttaaatgctgacatcttaggcactgacaaaattaatagtggtgctcacaaggcgacactaaggattggccaagatggaatatctaccagtgcaacgaccaacttgaagtgtagtctcctggtgctggagaatgagctgaatgcagagcttggcctctctggggcatctatgaaattaacaacaaatggccgcttcagggaacacaatgcaaaattcagtctggatgggaaagccgccctcacagagctatcactgggaagtgcttatcaggccatgattctgggtgtcgacagcaaaaacattttcaacttcaaggtcagtcaagaaggacttaagctctcaaatgacatgatgggctcatatgctgaaatgaaatttgaccacacaaacagtctgaacattgcaggcttatcactggacttctcttcaaaacttgacaacatttacagctctgacaagttttataagcaaactgttaatttacagctacagccctattctctggtaactactttaaacagtgacctgaaatacaatgctctggatctcaccaacaatgggaaactacggctagaacccctgaagctgcatgtggctggtaacctaaaaggagcctaccaaaataatgaaataaaacacatctatgccatctcttctgctgccttatcagcaagctataaagcagacactgttgctaaggttcagggtgtggagtttagccatcggctcaacacagacatcgctgggctggcttcagccattgacatgagcacaaactataattcagactcactgcatttcagcaatgtcttccgttctgtaatggccccgtttaccatgaccatcgatgcacatacaaatggcaatgggaaactcgctctctggggagaacatactgggcagctgtatagcaaattcctgttgaaagcagaacctctggcatttactttctctcatgattacaaaggctccacaagtcatcatctcgtgtctaggaaaagcatcagtgcagctcttgaacacaaagtcagtgccctgcttactccagctgagcagacaggcacctggaaactcaagacccaatttaacaacaatgaatacagccaggacttggatgcttacaacactaaagataaaattggcgtggagcttactggacgaactctggctgacctaactctactagactccccaattaaagtgccacttttactcagtgagcccatcaatatcattgatgctttagagatgagagatgccgttgagaagccccaagaatttacaattgttgcttttgtaaagtatgataaaaaccaagatgttcactccattaacctcccattttttgagaccttgcaagaatattttgagaggaatcgacaaaccattatagttgtactggaaaacgtacagagaaacctgaagcacatcaatattgatcaatttgtaagaaaatacagagcagccctgggaaaactcccacagcaagctaatgattatctgaattcattcaattgggagagacaagtttcacatgccaaggagaaactgactgctctcacaaaaaagtatagaattacagaaaatgatatacaaattgcattagatgatgccaaaatcaactttaatgaaaaactatctcaactgcagacatatatgatacaatttgatcagtatattaaagatagttatgatttacatgatttgaaaatagctattgctaatattattgatgaaatcattgaaaaattaaaaagtcttgatgagcactatcatatccgtgtaaatttagtaaaaacaatccatgatctacatttgtttattgaaaatattgattttaacaaaagtggaagtagtactgcatcctggattcaaaatgtggatactaagtaccaaatcagaatccagatacaagaaaaactgcagcagcttaagagacacatacagaatatagacatccagcacctagctggaaagttaaaacaacacattgaggctattgatgttagagtgcttttagatcaattgggaactacaatttcatttgaaagaataaatgatgttcttgagcatgtcaaacactttgttataaatcttattggggattttgaagtagctgagaaaatcaatgccttcagagccaaagtccatgagttaatcgagaggtatgaagtagaccaacaaatccaggttttaatggataaattagtagagttggcccaccaatacaagttgaaggagactattcagaagctaagcaatgtcctacaacaagttaagataaaagattactttgagaaattggttggatttattgatgatgctgtcaagaagcttaatgaattatcttttaaaacattcattgaagatgttaacaaattccttgacatgttgataaagaaattaaagtcatttgattaccaccagtttgtagatgaaaccaatgacaaaatccgtgaggtgactcagagactcaatggtgaaattcaggctctggaactaccacaaaaagctgaagcattaaaactgtttttagaggaaaccaaggccacagttgcagtgtatctggaaagcctacaggacaccaaaataaccttaatcatcaattggttacaggaggctttaagttcagcatctttggctcacatgaaggccaaattccgagagactctagaagatacacgagaccgaatgtatcaaatggacattcagcaggaacttcaacgatacctgtctctggtaggccaggtttatagcacacttgtcacctacatttctgattggtggactcttgctgctaagaaccttactgactttgcagagcaatattctatccaagattgggctaaacgtatgaaagcattggtagagcaagggttcactgttcctgaaatcaagaccatccttgggaccatgcctgcctttgaagtcagtcttcaggctcttcagaaagctaccttccagacacctgattttatagtccccctaacagatttgaggattccatcagttcagataaacttcaaagacttaaaaaatataaaaatcccatccaggttttccacaccagaatttaccatccttaacaccttccacattccttcctttacaattgactttgtagaaatgaaagtaaagatcatcagaaccattgaccagatgctgaacagtgagctgcagtggcccgttccagatatatatctcagggatctgaaggtggaggacattcctctagcgagaatcaccctgccagacttccgtttaccagaaatcgcaattccagaattcataatcccaactctcaaccttaatgattttcaagttcctgaccttcacataccagaattccagcttccccacatctcacacacaattgaagtacctacttttggcaagctatacagtattctgaaaatccaatctcctcttttcacattagatgcaaatgctgacatagggaatggaaccacctcagcaaacgaagcaggtatcgcagcttccatcactgccaaaggagagtccaaattagaagttctcaattttgattttcaagcaaatgcacaactctcaaaccctaagattaatccgctggctctgaaggagtcagtgaagttctccagcaagtacctgagaacggagcatgggagtgaaatgctgttttttggaaatgctattgagggaaaatcaaacacagtggcaagtttacacacagaaaaaaatacactggagcttagtaatggagtgattgtcaagataaacaatcagcttaccctggatagcaacactaaatacttccacaaattgaacatccccaaactggacttctctagtcaggctgacctgcgcaacgagatcaagacactgttgaaagctggccacatagcatggacttcttctggaaaagggtcatggaaatgggcctgccccagattctcagatgagggaacacatgaatcacaaattagtttcaccatagaaggacccctcacttcctttggactgtccaataagatcaatagcaaacacctaagagtaaaccaaaacttggtttatgaatctggctccctcaacttttctaaacttgaaattcaatcacaagtcgattcccagcatgtgggccacagtgttctaactgctaaaggcatggcactgtttggagaagggaaggcagagtttactgggaggcatgatgctcatttaaatggaaaggttattggaactttgaaaaattctcttttcttttcagcccagccatttgagatcacggcatccacaaacaatgaagggaatttgaaagttcgttttccattaaggttaacagggaagatagacttcctgaataactatgcactgtttctgagtcccagtgcccagcaagcaagttggcaagtaagtgctaggttcaatcagtataagtacaaccaaaatttctctgctggaaacaacgagaacattatggaggcccatgtaggaataaatggagaagcaaatctggatttcttaaacattcctttaacaattcctgaaatgcgtctaccttacacaataatcacaactcctccactgaaagatttctctctatgggaaaaaacaggcttgaaggaattcttgaaaacgacaaagcaatcatttgatttaagtgtaaaagctcagtataagaaaaacaaacacaggcattccatcacaaatcctttggctgtgctttgtgagtttatcagtcagagcatcaaatcctttgacaggcattttgaaaaaaacagaaacaatgcattagattttgtcaccaaatcctataatgaaacaaaaattaagtttgataagtacaaagctgaaaaatctcacgacgagctccccaggacctttcaaattcctggatacactgttccagttgtcaatgttgaagtgtctccattcaccatagagatgtcggcattcggctatgtgttcccaaaagcagtcagcatgcctagtttctccatcctaggttctgacgtccgtgtgccttcatacacattaatcctgccatcattagagctgccagtccttcatgtccctagaaatctcaagctttctcttccacatttcaaggaattgtgtaccataagccatatttttattcctgccatgggcaatattacctatgatttctcctttaaatcaagtgtcatcacactgaataccaatgctgaactttttaaccagtcagatattgttgctcatctcctttcttcatcttcatctgtcattgatgcactgcagtacaaattagagggcaccacaagattgacaagaaaaaggggattgaagttagccacagctctgtctctgagcaacaaatttgtggagggtagtcataacagtactgtgagcttaaccacgaaaaatatggaagtgtcagtggcaaaaaccacaaaagccgaaattccaattttgagaatgaatttcaagcaagaacttaatggaaataccaagtcaaaacctactgtctcttcctccatggaatttaagtatgatttcaattcttcaatgctgtactctaccgctaaaggagcagttgaccacaagcttagcttggaaagcctcacctcttacttttccattgagtcatctaccaaaggagatgtcaagggttcggttctttctcgggaatattcaggaactattgctagtgaggccaacacttacttgaattccaagagcacacggtcttcagtgaagctgcagggcacttccaaaattgatgatatctggaaccttgaagtaaaagaaaattttgctggagaagccacactccaacgcatatattccctctgggagcacagtacgaaaaaccacttacagctagagggcctctttttcaccaacggagaacatacaagcaaagccaccctggaactctctccatggcaaatgtcagctcttgttcaggtccatgcaagtcagcccagttccttccatgatttccctgaccttggccaggaagtggccctgaatgctaacactaagaaccagaagatcagatggaaaaatgaagtccggattcattctgggtctttccagagccaggtcgagctttccaatgaccaagaaaaggcacaccttgacattgcaggatccttagaaggacacctaaggttcctcaaaaatatcatcctaccagtctatgacaagagcttatgggatttcctaaagctggatgtaaccaccagcattggtaggagacagcatcttcgtgtttcaactgcctttgtgtacaccaaaaaccccaatggctattcattctccatccctgtaaaagttttggctgataaattcattattcctgggctgaaactaaatgatctaaattcagttcttgtcatgcctacgttccatgtcccatttacagatcttcaggttccatcgtgcaaacttgacttcagagaaatacaaatctataagaagctgagaacttcatcatttgccctcaacctaccaacactccccgaggtaaaattccctgaagttgatgtgttaacaaaatattctcaaccagaagactccttgattcccttttttgagataaccgtgcctgaatctcagttaactgtgtcccagttcacgcttccaaaaagtgtttcagatggcattgctgctttggatctaaatgcagtagccaacaagatcgcagactttgagttgcccaccatcatcgtgcctgagcagaccattgagattccctccattaagttctctgtacctgctggaattgtcattccttcctttcaagcactgactgcacgctttgaggtagactctcccgtgtataatgccacttggagtgccagtttgaaaaacaaagcagattatgttgaaacagtcctggattccacatgcagctcaaccgtacagttcctagaatatgaactaaatgttttgggaacacacaaaatcgaagatggtacgttagcctctaagactaaaggaacatttgcacaccgtgacttcagtgcagaatatgaagaagatggcaaatatgaaggacttcaggaatgggaaggaaaagcgcacctcaatatcaaaagcccagcgttcaccgatctccatctgcgctaccagaaagacaagaaaggcatctccacctcagcagcctccccagccgtaggcaccgtgggcatggatatggatgaagatgacgacttttctaaatggaacttctactacagccctcaggctcccaagtacaaatagagtgacccgtaaaatccaggattttttgttttttgctacaatcttgaccccctttggctacattcctttttttctgtgaaatatgtgaataataattaaacacttagacttg

SEQ ID NO: 438333 - DNA, 10151 bp, Homo sapiens
  misc_feature (10134)..(10134): n is a, c, g, or t
cattcccaccgggacctgcggggctgagtgcccttctcggttgctgccgctgaggagcccgcccagccagccagggccgcgaggccgaggccaggccgcagcccaggagccgccccaccgcagctggcgatggacccgccgaggcccgcgctgctggcgctgctggcgctgcctgcgctgctgctgctgctgctggcgggcgccagggccgaagaggaaatgctggaaaatgtcagcctggtctgtccaaaagatgcgacccgattcaagcacctccggaagtacacatacaactatgaggctgagagttccagtggagtccctgggactgctgattcaagaagtgccaccaggatcaactgcaaggttgagctggaggttccccagctctgcagcttcatcctgaagaccagccagtgcaccctgaaagaggtgtatggcttcaaccctgagggcaaagccttgctgaagaaaaccaagaactctgaggagtttgctgcagccatgtccaggtatgagctcaagctggccattccagaagggaagcaggttttcctttacccggagaaagatgaacctacttacatcctgaacatcaagaggggcatcatttctgccctcctggttcccccagagacagaagaagccaagcaagtgttgtttctggataccgtgtatggaaactgctccactcactttaccgtcaagacgaggaagggcaatgtggcaacagaaatatccactgaaagagacctggggcagtgtgatcgcttcaagcccatccgcacaggcatcagcccacttgctctcatcaaaggcatgacccgccccttgtcaactctgatcagcagcagccagtcctgtcagtacacactggacgctaagaggaagcatgtggcagaagccatctgcaaggagcaacacctcttcctgcctttctcctacaagaataagtatgggatggtagcacaagtgacacagactttgaaacttgaagacacaccaaagatcaacagccgcttctttggtgaaggtactaagaagatgggcctcgcatttgagagcaccaaatccacatcacctccaaagcaggccgaagctgttttgaagactctccaggaactgaaaaaactaaccatctctgagcaaaatatccagagagctaatctcttcaataagctggttactgagctgagaggcctcagtgatgaagcagtcacatctctcttgccacagctgattgaggtgtccagccccatcactttacaagccttggttcagtgtggacagcctcagtgctccactcacatcctccagtggctgaaacgtgtgcatgccaacccccttctgatagatgtggtcacctacctggtggccctgatccccgagccctcagcacagcagctgcgagagatcttcaacatggcgagggatcagcgcagccgagccaccttgtatgcgctgagccacgcggtcaacaactatcataagacaaaccctacagggacccaggagctgctggacattgctaattacctgatggaacagattcaagatgactgcactggggatgaagattacacctatttgattctgcgggtcattggaaatatgggccaaaccatggagcagttaactccagaactcaagtcttcaatcctgaaatgtgtccaaagtacaaagccatcactgatgatccagaaagctgccatccaggctctgcggaaaatggagcctaaagacaaggaccaggaggttcttcttcagactttccttgatgatgcttctccgggagataagcgactggctgcctatcttatgttgatgaggagtccttcacaggcagatattaacaaaattgtccaaattctaccatgggaacagaatgagcaagtgaagaactttgtggcttcccatattgccaatatcttgaactcagaagaattggatatccaagatctgaaaaagttagtgaaagaagctctgaaagaatctcaacttccaactgtcatggacttcagaaaattctctcggaactatcaactctacaaatctgtttctcttccatcacttgacccagcctcagccaaaatagaagggaatcttatatttgatccaaataactaccttcctaaagaaagcatgctgaaaactaccctcactgcctttggatttgcttcagctgacctcatcgagattggcttggaaggaaaaggctttgagccaacattggaagctctttttgggaagcaaggatttttcccagacagtgtcaacaaagctttgtactgggttaatggtcaagttcctgatggtgtctctaaggtcttagtggaccactttggctataccaaagatgataaacatgagcaggatatggtaaatggaataatgctcagtgttgagaagctgattaaagatttgaaatccaaagaagtcccggaagccagagcctacctccgcatcttgggagaggagcttggttttgccagtctccatgacctccagctcctgggaaagctgcttctgatgggtgcccgcactctgcaggggatcccccagatgattggagaggtcatcaggaagggctcaaagaatgacttttttcttcactacatcttcatggagaatgcctttgaactccccactggagctggattacagttgcaaatatcttcatctggagtcattgctcccggagccaaggctggagtaaaactggaagtagccaacatgcaggctgaactggtggcaaaaccctccgtgtctgtggagtttgtgacaaatatgggcatcatcattccggacttcgctaggagtggggtccagatgaacaccaacttcttccacgagtcgggtctggaggctcatgttgccctaaaagctgggaagctgaagtttatcattccttccccaaagagaccagtcaagctgctcagtggaggcaacacattacatttggtctctaccaccaaaacggaggtgatcccacctctcattgagaacaggcagtcctggtcagtttgcaagcaagtctttcctggcctgaattactgcacctcaggcgcttactccaacgccagctccacagactccgcctcctactatccgctgaccggggacaccagattagagctggaactgaggcctacaggagagattgagcagtattctgtcagcgcaacctatgagctccagagagaggacagagccttggtggataccctgaagtttgtaactcaagcagaaggtgcgaagcagactgaggctaccatgacattcaaatataatcggcagagtatgaccttgtccagtgaagtccaaattccggattttgatgttgacctcggaacaatcctcagagttaatgatgaatctactgagggcaaaacgtcttacagactcaccctggacattcagaacaagaaaattactgaggtcgccctcatgggccacctaagttgtgacacaaaggaagaaagaaaaatcaagggtgttatttccataccccgtttgcaagcagaagccagaagtgagatcctcgcccactggtcgcctgccaaactgcttctccaaatggactcatctgctacagcttatggctccacagtttccaagagggtggcatggcattatgatgaagagaagattgaatttgaatggaacacaggcaccaatgtagataccaaaaaaatgacttccaatttccctgtggatctctccgattatcctaagagcttgcatatgtatgctaatagactcctggatcacagagtccctcaaacagacatgactttccggcacgtgggttccaaattaatagttgcaatgagctcatggcttcagaaggcatctgggagtcttccttatacccagactttgcaagaccacctcaatagcctgaaggagttcaacctccagaacatgggattgccagacttccacatcccagaaaacctcttcttaaaaagcgatggccgggtcaaatataccttgaacaagaacagtttgaaaattgagattcctttgccttttggtggcaaatcctccagagatctaaagatgttagagactgttaggacaccagccctccacttcaagtctgtgggattccatctgccatctcgagagttccaagtccctacttttaccattcccaagttgtatcaactgcaagtgcctctcctgggtgttctagacctctccacgaatgtctacagcaacttgtacaactggtccgcctcctacagtggtggcaacaccagcacagaccatttcagccttcgggctcgttaccacatgaaggctgactctgtggttgacctgctttcctacaatgtgcaaggatctggagaaacaacatatgaccacaagaatacgttcacactatcatgtgatgggtctctacgccacaaatttctagattcgaatatcaaattcagtcatgtagaaaaacttggaaacaacccagtctcaaaaggtttactaatattcgatgcatctagttcctggggaccacagatgtctgcttcagttcatttggactccaaaaagaaacagcatttgtttgtcaaagaagtcaagattgatgggcagttcagagtctcttcgttctatgctaaaggcacatatggcctgtcttgtcagagggatcctaacactggccggctcaatggagagtccaacctgaggtttaactcctcctacctccaaggcaccaaccagataacaggaagatatgaagatggaaccctctccctcacctccacctctgatctgcaaagtggcatcattaaaaatactgcttccctaaagtatgagaactacgagctgactttaaaatctgacaccaatgggaagtataagaactttgccacttctaacaagatggatatgaccttctctaagcaaaatgcactgctgcgttctgaatatcaggctgattacgagtcattgaggttcttcagcctgctttctggatcactaaattcccatggtcttgagttaaatgctgacatcttaggcactgacaaaattaatagtggtgctcacaaggcgacactaaggattggccaagatggaatatctaccagtgcaacgaccaacttgaagtgtagtctcctggtgctggagaatgagctgaatgcagagcttggcctctctggggcatctatgaaattaacaacaaatggccgcttcagggaacacaatgcaaaattcagtctggatgggaaagccgccctcacagagctatcactgggaagtgcttatcaggccatgattctgggtgtcgacagcaaaaacattttcaacttcaaggtcagtcaagaaggacttaagctctcaaatgacatgatgggctcatatgctgaaatgaaatttgaccacacaaacagtctgaacattgcaggcttatcactggacttctcttcaaaacttgacaacatttacagctctgacaagttttataagcaaactgttaatttacagctacagccctattctctggtaactactttaaacagtgacctgaaatacaatgctctggatctcaccaacaatgggaaactacggctagaacccctgaagctgcatgtggctggtaacctaaaaggagcctaccaaaataatgaaataaaacacatctatgccatctcttctgctgccttatcagcaagctataaagcagacactgttgctaaggttcagggtgtggagtttagccatcggctcaacacagacatcgctgggctggcttcagccattgacatgagcacaaactataattcagactcactgcatttcagcaatgtcttccgttctgtaatggccccgtttaccatgaccatcgatgcacatacaaatggcaatgggaaactcgctctctggggagaacatactgggcagctgtatagcaaattcctgttgaaagcagaacctctggcatttactttctctcatgattacaaaggctccacaagtcatcatctcgtgtctaggaaaagcatcagtgcagctcttgaacacaaagtcagtgccctgcttactccagctgagcagacaggcacctggaaactcaagacccaatttaacaacaatgaatacagccaggacttggatgcttacaacactaaagataaaattggcgtggagcttactggacgaactctggctgacctaactctactagactccccaattaaagtgccacttttactcagtgagcccatcaatatcattgatgctttagagatgagagatgccgttgagaagccccaagaatttacaattgttgcttttgtaaagtatgataaaaaccaagatgttcactccattaacctcccattttttgagaccttgcaagaatattttgagaggaatcgacaaaccattatagttgtactggaaaacgtacagagaaacctgaagcacatcaatattgatcaatttgtaagaaaatacagagcagccctgggaaaactcccacagcaagctaatgattatctgaattcattcaattgggagagacaagtttcacatgccaaggagaaactgactgctctcacaaaaaagtatagaattacagaaaatgatatacaaattgcattagatgatgccaaaatcaactttaatgaaaaactatctcaactgcagacatatatgatacaatttgatcagtatattaaagatagttatgatttacatgatttgaaaatagctattgctaatattattgatgaaatcattgaaaaattaaaaagtcttgatgagcactatcatatccgtgtaaatttagtaaaaacaatccatgatctacatttgtttattgaaaatattgattttaacaaaagtggaagtagtactgcatcctggattcaaaatgtggatactaagtaccaaatcagaatccagatacaagaaaaactgcagcagcttaagagacacatacagaatatagacatccagcacctagctggaaagttaaaacaacacattgaggctattgatgttagagtgcttttagatcaattgggaactacaatttcatttgaaagaataaatgatgttcttgagcatgtcaaacactttgttataaatcttattggggattttgaagtagctgagaaaatcaatgccttcagagccaaagtccatgagttaatcgagaggtatgaagtagaccaacaaatccaggttttaatggataaattagtagagttggcccaccaatacaagttgaaggagactattcagaagctaagcaatgtcctacaacaagttaagataaaagattactttgagaaattggttggatttattgatgatgctgtcaagaagcttaatgaattatcttttaaaacattcattgaagatgttaacaaattccttgacatgttgataaagaaattaaagtcatttgattaccaccagtttgtagatgaaaccaatgacaaaatccgtgaggtgactcagagactcaatggtgaaattcaggctctggaactaccacaaaaagctgaagcattaaaactgtttttagaggaaaccaaggccacagttgcagtgtatctggaaagcctacaggacaccaaaataaccttaatcatcaattggttacaggaggctttaagttcagcatctttggctcacatgaaggccaaattccgagagactctagaagatacacgagaccgaatgtatcaaatggacattcagcaggaacttcaacgatacctgtctctggtaggccaggtttatagcacacttgtcacctacatttctgattggtggactcttgctgctaagaaccttactgactttgcagagcaatattctatccaagattgggctaaacgtatgaaagcattggtagagcaagggttcactgttcctgaaatcaagaccatccttgggaccatgcctgcctttgaagtcagtcttcaggctcttcagaaagctaccttccagacacctgattttatagtccccctaacagatttgaggattccatcagttcagataaacttcaaagacttaaaaaatataaaaatcccatccaggttttccacaccagaatttaccatccttaacaccttccacattccttcctttacaattgactttgtagaaatgaaagtaaagatcatcagaaccattgaccagatgctgaacagtgagctgcagtggcccgttccagatatatatctcagggatctgaaggtggaggacattcctctagcgagaatcaccctgccagacttccgtttaccagaaatcgcaattccagaattcataatcccaactctcaaccttaatgattttcaagttcctgaccttcacataccagaattccagcttccccacatctcacacacaattgaagtacctacttttggcaagctatacagtattctgaaaatccaatctcctcttttcacattagatgcaaatgctgacatagggaatggaaccacctcagcaaacgaagcaggtatcgcagcttccatcactgccaaaggagagtccaaattagaagttctcaattttgattttcaagcaaatgcacaactctcaaaccctaagattaatccgctggctctgaaggagtcagtgaagttctccagcaagtacctgagaacggagcatgggagtgaaatgctgttttttggaaatgctattgagggaaaatcaaacacagtggcaagtttacacacagaaaaaaatacactggagcttagtaatggagtgattgtcaagataaacaatcagcttaccctggatagcaacactaaatacttccacaaattgaacatccccaaactggacttctctagtcaggctgacctgcgcaacgagatcaagacactgttgaaagctggccacatagcatggacttcttctggaaaagggtcatggaaatgggcctgccccagattctcagatgagggaacacatgaatcacaaattagtttcaccatagaaggacccctcacttcctttggactgtccaataagatcaatagcaaacacctaagagtaaaccaaaacttggtttatgaatctggctccctcaacttttctaaacttgaaattcaatcacaagtcgattcccagcatgtgggccacagtgttctaactgctaaaggcatggcactgtttggagaagggaaggcagagtttactgggaggcatgatgctcatttaaatggaaaggttattggaactttgaaaaattctcttttcttttcagcccagccatttgagatcacggcatccacaaacaatgaagggaatttgaaagttcgttttccattaaggttaacagggaagatagacttcctgaataactatgcactgtttctgagtcccagtgcccagcaagcaagttggcaagtaagtgctaggttcaatcagtataagtacaaccaaaatttctctgctggaaacaacgagaacattatggaggcccatgtaggaataaatggagaagcaaatctggatttcttaaacattcctttaacaattcctgaaatgcgtctaccttacacaataatcacaactcctccactgaaagatttctctctatgggaaaaaacaggcttgaaggaattcttgaaaacgacaaagcaatcatttgatttaagtgtaaaagctcagtataagaaaaacaaacacaggcattccatcacaaatcctttggctgtgctttgtgagtttatcagtcagagcatcaaatcctttgacaggcattttgaaaaaaacagaaacaatgcattagattttgtcaccaaatcctataatgaaacaaaaattaagtttgataagtacaaagctgaaaaatctcacgacgagctccccaggacctttcaaattcctggatacactgttccagttgtcaatgttgaagtgtctccattcaccatagagatgtcggcattcggctatgtgttcccaaaagcagtcagcatgcctagtttctccatcctaggttctgacgtccgtgtgccttcatacacattaatcctgccatcattagagctgccagtccttcatgtccctagaaatctcaagctttctcttccacatttcaaggaattgtgtaccataagcctgagatttggaaagaataaaacnccgaattgcagaagagc

SEQ ID NO: 438334 - DNA, 776 bp, Homo sapiens
taatgtaattctattttgtttttatgtatgtgatatctgtttctgttgagatttgggagttattgaaatctctgtaatgtgtatggtagaaaatttcttgtgaccttaaaattttaccagttatttatagaaagagaaaatgggaaatgttttataggctttttactagcagtatcagtgaacacttgaactccattattcatgaaaataacacgttaggattggaatacgtctattcaaaagtgaaagaatataaagtgtttagttttttgtttttactctaaagatagaattggggagtaaacttcagtttttgtttagagtggatctgaatatttaaaatcctataataatttttgtgaatcttcattctttgagtatgggattgtaaaagacaaactatatcctacagtagtatcatcatcagtatcaaaggtctcctttttttacttggaaaagtaattcacaaacattataaaaatactattcaaacagtaccaaagagtagattagcaaaagtaagtttttttccctagcctgtctcatttttccatcattacacagactacttggaatgtcttagatgtccttgtattgtaattttctgtgtaggtagaaataaatgtagctttcttattttacacaaataggaacttactgtatatactgttctgcactttgcttttattaaagatcttttgataaagaactatattgataagcagtaaagatgtcatgctcctggcccaataaaatattgttagcattgtcataaa

SEQ ID NO: 438335 - DNA, 347 bp, Homo sapiens
ggaggggccagcggccgattagttcaaaagtaattcacaaacattataaaaatactattcaaacagtaccaaagagtagattagcaaaagtaagtttttttccctagcctgtctcatttttccatcattacacagactacttggaatgtcttagatgtccttgtattgtaattttctgtgtaggtagaaataaatgtagctttcttattttacacaaataggaacttactgtatatactgttctgcactttgcttttattaaagatcttttgataaagaactatattgataagcagtaaagatgtcatgctcctggcccaataaaatattgttagcattgtcataaa

SEQ ID NO: 438336 - DNA, 3079 bp, Homo sapiens
tccgaggcttctagtgccacgaaggcctcctgcctgggttgtccttatggcgcctgtgagtttagttctagaaaagatatttgtattttaacttttccatctaacaaacagtagcacaggcatcttagtctggacaacaacgtacaagctgaattcctggctagttccctcattatcaaaccctgacacagtagtaggcgcgagtcaggcagtgtggggacagccccgagttgccgaaagtccccggcccgttttcctcctgtgaagacatagctgcgggtggctgtgctggtggcgttcaagatgtcgaccaagaatttccgagtcagtgacggggactggatttgccctgacaaaaaatgtggaaatgtaaactttgctagaagaaccagctgtaatcgatgtggtcgggagaaaacaactgaggccaagatgatgaaagctgggggcactgaaataggaaagacacttgcagaaaagagccgaggcctatttagtgctaatgactggcaatgtaaaacttgcagcaatgtgaattgggccagaagatcagagtgtaatatgtgtaatactccaaagtatgctaaattagaagaaagaacaggatatggtggtggttttaatgaaagagaaaatgttgaatatatagaaagagaagaatctgatggtgaatatgatgagtttggacgtaaaaagaaaaaatacagagggaaagcagttggtcctgcatctatattaaaggaagttgaagataaagaatcagagggagaagaagaggatgaggatgaagatctttctaaatataagttagatgaggatgaggatgaagatgacgctgatctctcaaaatataatcttgatgccagtgaagaagaagatagtaataaaaagaaatctaatagacgaagtcgctcaaagtctcgatcttcacattcacgatcttcatcacgctcatcctccccctcaagttcaaggtctaggtccaggtcccgttcaagaagttcttccagttcgcagtcaagatctcgttccagttccagagaacgttcgagatctcgtgggtcgaaatcaagatccagctccaggtcccacaggggctcttcttccccacgaaaaagatcttattcaagttcatcatcttctcctgagaggaacagaaagagaagtcgttctagatcttcttcatctggtgatcgcaaaaaaagacgaacaagatcacggtcacccgaaagacgccacaggtcatcatctggatcatcccattctggttcccgttcaagttcaaaaaagaaataatgtattaaaatttacatcttaaaaaaatccagtacagtgcatgaagcatatttttaaagaagttggtgtcttacttggtcagaagtgctaaatctgctagtagaggtgcatgcctttcattgcttttcaaaacaatacagctgtgtttatttgtgaagttaaaagtaaatagcattttaagccataatgtcccaaaatagatgttctgtcattcattatttacaaccatttgcttcatttaaaaccatttcagctataacaaagtactttgcttcctaatttaaacccatttttgtcatttccaaatacatcctgtccattggctaagacaggattacctaggcttgcctgaactttgggcatggaagaaagactggaaactagttggaaacaacatacttatggaaaagaaagtcagcctttttatgctgttaacagatgtcagagtgattctcaccaaaaaaagttaaactatgttgtaagcagccaactgtaaatgtctattttgaaattccctatgctaagggtgccttagaatcattgtgtctcttttatccagctttacttttttgctccacatttaatgcaaaagaatcttgtgatgtctacaaggagagaagtgggatatattttcctttctgacacataatttggggcaaaaaagaaagtcttaagagtttatcttttctctgctgatacggttgcttgataaagacatctcaaaatgtttaccaatgttttaagaagctttgtgtgatattcttccaaatgtagttaccaaatataatatggtagaaaaggctaaatcatacttaatgagcaaattgaagtaagcttttaaagtatatttctcttttggtgaaaggccaatggagacattgtgaatttaagtgaacatttgcctcaagatgttaactataaacacactgcatacaattttcttctgaataacaaatgaatgcttattgctgcatgatgtaagcaaaagtcattatttttcctattcatttgaaataagttatggcttaaaatgcttttggagtttatttctcaaaattaaaatctggtcacatgagctttagtttgttttctggtttaaaaaataaaaaggtttctcttaacagtatttccagtgacaatgcaaggtaagtatatcaaaggaaatcaacagttgtgcttgggggctttttgttatgggatattgatttcttgttttttttccgtaacattgtctgctgcaatttaaataaaaattacgacattttaagatatttcatagacaaaccaaacaaaaatatatgtttttactttaaagtgaatgtttttctcttcagctgatctaaaaatgaaagcaagatatcttatgtagaaatattttgataatatttttacagtgagctttcccatgtttttatgtcttaagtttctttgctgcgtttatgtaggttgcacaagaacttttactcacttgtaattgtgcctcagactttttgaaagtctaccttctaaattgccccgacgatctagattctacatgttaccattggtttattcttgtgctttctgtatttaaaactttggctgtactaagcaaatgcaaggttataatttagctaatagtagtttacagacaattctgatgattatgatttcatttggtttaactaagctgtactagttcatttcataaggaaatgatactgtagacaaatgtaaataaagcctgtgagtcaagcatcaagtggtgtttgttagaaataaactagagatttttaaactctga

SEQ ID NO: 438337 - DNA, 3108 bp, Homo sapiens
tccgaggcttctagtgccacgaaggcctcctgcctgggttgtccttatggcgcctgtgagtttagttctagaaaagatatttgtattttaacttttccatctaacaaacagtagcacaggcatcttagtctggacaacaacgtacaagctgaattcctggctagttccctcattatcaaaccctgacacagtagtaggcgcgagtcaggcagtgtggggacagccccgagttgccgaaagtccccggcccgttttcctcctgtgaagacatagctgcgggtggctgtgctggtggcgttcaagatgtcgaccaagaatttccgagtcagtgacggggactggatttgccctgacaaaaaatgtggaaatgtaaactttgctagaagaaccagctgtaatcgatgtggtcgggagaaaacaactgaggccaagatgatgaaagctgggggcactgaaataggaaagacacttgcagaaaagagccgaggcctatttagtgctaatgactggcaatgtaaaacttgcagcaatgtgaattgggccagaagatcagagtgtaatatgtgtaatactccaaagtatgctaaattagaagaaagaacaggatatggtggtggttttaatgaaagagaaaatgttgaatatatagaaagagaagaatctgatggtgaatatgatgagtttggacgtaaaaagaaaaaatacagagggaaagcagttggtcctgcatctatattaaaggaagttgaagataaagaatcagagggagaagaagaggatgaggatgaagatctttctaaatataagttagatgaggatgaggatgaagatgacgctgatctctcaaaatataatcttgatgccagtgaagaagaagatagtaataaaaagaaatctaatagacgaagtcgctcaaagtctcgatcttcacattcacgatcttcatcacgctcatcctccccctcaagttcaaggtctaggtccaggtcccgttcaagaagttcttccagttcgcagtcaagatctcgttccagttccagagaacgttcgagatctcgtgggtcgaaatcaagatccagctccaggtcccacaggggctcttcttccccacgaaaaagatcttattcaagttcatcatcttctcctgagaggaacagaaagagaagtcgttctagatcttcttcatctggtgatcgcaaaaaaagacgaacaagatcacggtcacccgaaagccaggtgattggtgaaaacactaaacaaccctgagcccagggccaacccctacggaacaccactactttacccagacgccacaggtcatcatctggatcatcccattctggttcccgttcaagttcaaaaaagaaataatgtattaaaatttacatcttaaaaaaatccagtacagtgcatgaagcatatttttaaagaagttggtgtcttacttggtcagaagtgctaaatctgctagtagaggtgcatgcctttcattgcttttcaaaacaatacagctgtgtttatttgtgaagttaaaagtaaatagcattttaagccataatgtcccaaaatagatgttctgtcattcattatttacaaccatttgcttcatttaaaaccatttcagctataacaaagtactttgcttcctaatttaaacccatttttgtcatttccaaatacatcctgtccattggctaagacaggattacctaggcttgcctgaactttgggcatggaagaaagactggaaactagttggaaacaacatacttatggaaaagaaagtcagcctttttatgctgttaacagatgtcagagtgattctcaccaaaaaaagttaaactatgttgtaagcagccaactgtaaatgtctattttgaaattccctatgctaagggtgccttagaatcattgtgtctcttttatccagctttacttttttgctccacatttaatgcaaaagaatcttgtgatgtctacaaggagagaagtgggatatattttcctttctgacacataatttggggcaaaaaagaaagtcttaagagtttatcttttctctgctgatacggttgcttgataaagacatctcaaaatgtttaccaatgttttaagaagctttgtgtgatattcttccaaatgtagttaccaaatataatatggtagaaaaggctaaatcatacttaatgagcaaattgaagtaagcttttaaagtatatttctcttttggtgaaaggccaatggagacattgtgaatttaagtgaacatttgcctcaagatgttaactataaacacactgcatacaattttcttctgaataacaaatgaatgcttattgctgcatgatgtaagcaaaagtcattatttttcctattcatttgaaataagttatggcttaaaatgcttttggagtttatttctcaaaattaaaatctggtcacatgagctttagtttgttttctggtttaaaaaataaaaaggtttctcttaacagtatttccagtgacaatgcaaggtaagtatatcaaaggaaatcaacagttgtgcttgggggctttttgttatgggatattgatttcttgttttttttccgtaacattgtctgctgcaatttaaataaaaattacgacattttaagatatttcatagacaaaccaaacaaaaatatatgtttttactttaaagtgaatgtttttctcttcagctgatctaaaaatgaaagcaagatatcttatgtagaaatattttgataatatttttacagtgagctttcccatgtttttatgtcttaagtttctttgctgcgtttatgtaggttgcacaagaacttttactcacttgtaattgtgcctcagactttttgaaagtctaccttctaaattgccccgacgatctagattctacatgttaccattggtttattcttgtgctttctgtatttaaaactttggctgtactaagcaaatgcaaggttataatttagctaatagtagtttacagacaattctgatgattatgatttcatttggtttaactaagctgtactagttcatttcataaggaaatgatactgtagacaaatgtaaataaagcctgtgagtcaagca

SEQ ID NO: 438338 - DNA, 868 bp, Homo sapiens
tccgaggcttctagtgccacgaaggcctcctgcctgggttgtccttatggcgcctgtgagtttagttctagaaaagatatttgtattttaacttttccatctaacaaacagtagcacaggcatcttagtctggacaacaacgtacaagctgaattcctggctagttccctcattatcaaaccctgacacagtagtaggcgcgagtcaggcagtgtggggacagccccgagttgccgaaagtccccggcccgttttcctcctgtgaagacatagctgcgggtggctgtgctggtggcgttcaagatgtcgaccaagaatttccgagtcagtgacggggactggatttgccctgacaaaaaatgtggaaatgtaaactttgctagaagaaccagctgtaatcgatgtggtcgggagaaaacaactgaggccaagatgatgaaagctgggggcactgaaataggaaagacacttgcagaaaagagccgaggcctatttagtgctaatgactggcaatgtaaaacttgcagcaatgtgaattgggccagaagatcagagtgtaatatgtgtaatactccaaagtatgctaaattagaagaaagaacaggatatggtggtggttttaatgaaagagaaaatgttgaatatatagaaagagaagaatctgatggtgaatatgatgagtttggacgtaaaaagaaaaaatacagagggaaagcagttggtcctgcatctatattaaaggaagttgaagataaagaatcagagggagaagaagaggatgaggatgaagatctttctaaatataagttagatgaggatgaggatgaagatgacgctgatctctcaaaatataatcttgatgccagtg

SEQ ID NO: 438339 - DNA, 444 bp, Homo sapiens
gggtagaaatcttgctttcatttttagatcagctgaagagaaaaacattcactttaaagcaagatatcttatgtagaaatattttgataatatttttacagtgagctttcccatgtttttatgtcttaagtttctttgctgcgtttatgtaggttgcacaagaacttttactcacttgtaattgtgcctcagactttttgaaagtctaccttctaaattgccccgacgatctagattctacatgttaccattggtttattcttgtgctttctgtatttaaaactttggctgtactaagcaaatgcaaggttataatttagctaatagtagtttacagacaattctgatgattatgatttcatttggtttaactaagctgtactagttcatttcataaggaaatgatactgtagacaaatgtaaataaagcctgtgagtcaagca

SEQ ID NO: 438340 - DNA, 1029 bp, Homo sapiens
gcctgaaagcttaacaaagtggggctataactagtaattttttggtaaaaatatagtgatctttttctacagggtattattataagggacaaattatagttgtaaattagattaatgaattttgtgagttttaaaatttgtacgaaccatgtctcccttgtgtcatattttccaataatataattacctaacaatgacagaattatacattttccctttaattctctaagcattgagtaaacagaaaaatatagggatgaaatacacacatgccaacattcaaaactttgtactaactagaaacaaaaatagaaggggatttataaaggaaaatgatggagacattttagagaaattaagtataaatcgcaacattctgttttcttggatgtattctgggtagcttctagttacttgtaaacaaagtattcattgtttttgtaataaagtgataatgttttgttttatagttgagtggctttagggtaatttaatcacctggaaagtgatatttttttaattaccttttgttactaaatcttatctaatttaaaatactatgttttgaaagtatatatcttgtatagttatctttttatatgaaaatgaactctaatacatatctttctttcagtgttcatatcacaaagctcaattaaatggtcctggaaaaaaaaaatcgttccatgttgttccaggtcccgttcaagaagttcttccagttcgcagtcaagatctcgttccagttccagagaacgttcgagatctcgtgggtcgaaatcaagatccagctccaggtcccacaggggctcttcttccccacgaaaaagatcttattcaagttcatcatcttctcctgagaggaacagaaagagaagtcgttctagatcttcttcatctggtgatcgcaaaaaaagacgaacaagatcacggtcacccgaaagacgccacaggtcatcatctggatcatcccattctggttcccgttcaagttcaaaaaagaaataatgtattaaaatttacatctta

SEQ ID NO: 438341 - DNA, 989 bp, Homo sapiens
tccgaggcttctagtgccacgaaggcctcctgcctgggttgtccttatggcgcctgtgagtttagttctagaaaagatatttgtattttaacttttccatctaacaaacagtagcacaggcatcttagtctggacaacaacgtacaagctgaattcctggctagttccctcattatcaaaccctgacacagtagtaggcgcgagtcaggcagtgtggggacagccccgagttgccgaaagtccccggcccgttttcctcctgtgaagacatagctgcgggtggctgtgctggtggcgttcaagatgtcgaccaagaatttccgagtcagtgacggggactggatttgccctgacaaaaaatgtggaaatgtaaactttgctagaagaaccagctgtaatcgatgtggtcgggagaaaacaactgaggccaagatgatgaaagctgggggcactgaaataggaaagacacttgcagaaaagagccgaggcctatttagtgctaatgactggcaatgtaaaacttgcagcaatgtgaattgggccagaagatcagagtgtaatatgtgtaatactccaaagtatgctaaattagaagaaagaacaggtttctcttcttttggccactgatgttgggattcttcgcagccatccctggccctctttctttcctctattttcatggtgttttcttctaagcccaaagtttaagtaactttgccatgataacccaagtttatgtctccagctcagacttctttgacccatatatccagctgcctattcaacattgccatgcaaatgtcaaactcattatattcaaactgaatttgtgattttacccctgggacctgaccctcttccaatgatctctttctcatgattagtaccactcaccatacatttattacataagctggaaatctagatgtccttcttagcctaaatagccctttcttgatatctcccataccccaaaaattcttttccat

SEQ ID NO: 438342 - DNA, 503 bp, Homo sapiens
aaggccttctgacaaggatctcgtttttttcttccctcacctaaggtatgcaccgtacctccttcaccgcccccaccaacccccgtttgattgattgtttattctgtctcctttgcaggtttctcttcttttggccactgatgttgggattcttcgcagccatccctggccctctttctttcctctattttcatggtgttttcttctaagcccaaagtttaagtaactttgccatgataacccaagtttatgtctccagctcagacttctttgacccatatatccagctgcctattcaacattgccatgcaaatgtcaaactcattatattcaaactgaatttgtgattttacccctgggacctgaccctcttccaatgatctctttctcatgattagtaccactcaccatacatttattacataagctggaaatctagatgtccttcttagcctaaatagccctttcttgatatctcccataccccaaaaattcttttccat

SEQ ID NO: 438343 - DNA, 3154 bp, Homo sapiens
tccgaggcttctagtgccacgaaggcctcctgcctgggttgtccttatggcgcctgtgagtttagttctagaaaagatatttgtattttaacttttccatctaacaaacagtagcacaggcatcttagtctggacaacaacgtacaagctgaattcctggctagttccctcattatcaaaccctgacacagtagtaggcgcgagtcaggcagtgtggggacagccccgagttgccgaaagtccccggcccgttttcctcctgtgaagacatagctgcgggtggctgtgctggtggcgttcaagatgtcgaccaagaatttccgagtcagtgacggggactggatttgccctgacaaaaaatgtggaaatgtaaactttgctagaagaaccagctgtaatcgatgtggtcgggagaaaacaactgaggccaagatgatgaaagctgggggcactgaaataggaaagacacttgcagaaaagagccgaggcctatttagtgctaatgactggcaatgtaaaacttgcagcaatgtgaattgggccagaagatcagagtgtaatatgtgtaatactccaaagtatgctaaattagaagaaagaacaggatatggtggtggttttaatgaaagagaaaatgttgaatatatagaaagagaagaatctgatggtgaatatgatgagtttggacgtaaaaagaaaaaatacagagggaaagcagttggtcctgcatctatattaaaggaagttgaagataaagaatcagagggagaagaagaggatgaggatgaagatctttctaaatataagttagatgaggatgaggatgaagatgacgctgatctctcaaaatataatcttgatgccagtgaagaagaagatagtaataaaaagaaatctaatagacgaagtcgctcaaagtctcgatcttcacattcacgatcttcatcacgctcatcctccccctcaagttcaaggtctaggtccaggtcccgttcaagaagttcttccagttcgcagtcaagatctcgttccagttccagagaacgttcgagatctcgtgggtcgaaatcaagatccagctccaggtcccacaggggctcttcttccccacgaaaaagatcttattcaagttcatcatcttctcctgagaggaacagaaagagaagtcgttctagatcttcttcatctggtgatcgcaaaaaaagacgaacaagatcacggtcacccgaaagccaggtgattggtgaaaacactaaacaaccctgagcccagggccaacccctacggaacaccactactttacccagacgccacaggtcatcatctggatcatcccattctggttcccgttcaagttcaaaaaagaaataatgtattaaaatttacatcttaaaaaaatccagtacagtgcatgaagcatatttttaaagaagttggtgtcttacttggtcagaagtgctaaatctgctagtagaggtgcatgcctttcattgcttttcaaaacaatacagctgtgtttatttgtgaagttaaaagtaaatagcattttaagccataatgtcccaaaatagatgttctgtcattcattatttacaaccatttgcttcatttaaaaccatttcagctataacaaagtactttgcttcctaatttaaacccatttttgtcatttccaaatacatcctgtccattggctaagacaggattacctaggcttgcctgaactttgggcatggaagaaagactggaaactagttggaaacaacatacttatggaaaagaaagtcagcctttttatgctgttaacagatgtcagagtgattctcaccaaaaaaagttaaactatgttgtaagcagccaactgtaaatgtctattttgaaattccctatgctaagggtgccttagaatcattgtgtctcttttatccagctttacttttttgctccacatttaatgcaaaagaatcttgtgatgtctacaaggagagaagtgggatatattttcctttctgacacataatttggggcaaaaaagaaagtcttaagagtttatcttttctctgctgatacggttgcttgataaagacatctcaaaatgtttaccaatgttttaagaagctttgtgtgatattcttccaaatgtagttaccaaatataatatggtagaaaaggctaaatcatacttaatgagcaaattgaagtaagcttttaaagtatatttctcttttggtgaaaggccaatggagacattgtgaatttaagtgaacatttgcctcaagatgttaactataaacacactgcatacaattttcttctgaataacaaatgaatgcttattgctgcatgatgtaagcaaaagtcattatttttcctattcatttgaaataagttatggcttaaaatgcttttggagtttatttctcaaaattaaaatctggtcacatgagctttagtttgttttctggtttaaaaaataaaaaggtttctcttaacagtatttccagtgacaatgcaaggtaagtatatcaaaggaaatcaacagttgtgcttgggggctttttgttatgggatattgatttcttgttttttttccgtaacattgtctgctgcaatttaaataaaaattacgacattttaagatatttcatagacaaaccaaacaaaaatatatgtttttactttaaagtgaatgtttttctcttcagctgatctaaaaatgaaagcaagatatcttatgtagaaatattttgataatatttttacagtgagctttcccatgtttttatgtcttaagtttctttgctgcgtttatgtaggttgcacaagaacttttactcacttgtaattgtgcctcagactttttgaaagtctaccttctaaattgccccgacgatctagattctacatgttaccattggtttattcttgtgctttctgtatttaaaactttggctgtactaagcaaatgcaaggttataatttagctaatagtagtttacagacaattctgatgattatgatttcatttggtttaactaagctgtactagttcatttcataaggaaatgatactgtagacaaatgtaaataaagcctgtgagtcaagcatcaagtggtgtttgttagaaataaactagagatttttaaactctga

SEQ ID NO: 438344 - DNA, 7060 bp, Homo sapiens
tccgaggcttctagtgccacgaaggcctcctgcctgggttgtccttatggcgcctgtgagtttagttctagaaaagatatttgtattttaacttttccatctaacaaacagtagcacaggcatcttagtctggacaacaacgtacaagctgaattcctggctagttccctcattatcaaaccctgacacagtagtaggcgcgagtcaggcagtgtggggacagccccgagttgccgaaagtccccggcccgttttcctcctgtgaagacatagctgcgggtggctgtgctggtggcgttcaagatgtcgaccaagaatttccgagtcagtgacggggactggatttgccctgacaaaaaatgtggaaatgtaaactttgctagaagaaccagctgtaatcgatgtggtcgggagaaaacaactgaggccaagatgatgaaagctgggggcactgaaataggaaagacacttgcagaaaagagccgaggcctatttagtgctaatgactggcaatgtaaaacttgcagcaatgtgaattgggccagaagatcagagtgtaatatgtgtaatactccaaagtatgctaaattagaagaaagaacaggatatggtggtggttttaatgaaagagaaaatgttgaatatatagaaagagaagaatctgatggtgaatatgatgagtttggacgtaaaaagaaaaaatacagagggaaagcagttggtcctgcatctatattaaaggaagttgaagataaagaatcagagggagaagaagaggatgaggatgaagatctttctaaatataagttagatgaggatgaggatgaagatgacgctgatctctcaaaatataatcttgatgccagtgaagaagaagatagtaataaaaagaaatctaatagacgaagtcgctcaaagtctcgatcttcacattcacgatcttcatcacgctcatcctccccctcaagttcaaggtctaggtccaggtcccgttcaagaagttcttccagttcgcagtcaagatctcgttccagttccagagaacgttcgagatctcgtgggtcgaaatcaaggtgaatgaggtagcatctctctgtaaagcagagagaaaaatatttaaaggctgcagaaggtgttgctgctttttttccccttattttgcttctacttgtcgattttattttagcattagaaaactaatgcacttgcctcagcttaattttctcaccatgaaatgtttccattgccagcagtgtgccaagacattcccatgattgaaatcaggtggctattttgcaatatgcagcgtttattattttggcactaagatgttatgaagtaggaagatgaagccaagtcttatcgccacatctctagtatattaagattatatatggccaggcacagtgattcatgcctataatcccagcactttgggaagctgaggtgggaggatcacttgaggccaggagttcaaggttgtagtgaaccttgatcacagcactgtaatccagcctgggtgacagaggagtgtctcaaaaaaaaaaaaaaaaattaatagtagttcaaataaaattacatatgtaaataaaaagaaaaattttcttcattattaaaaggaagaaaaataaccctgcctcaaaacaggtcctgttttgcacggcagttgtttcaatattttcagaaacaaatttgccatttatatcagataaagttactagagtactgtatatacattttcctttctaattttacacacgctattatttatagagcacaaaacactcaaaactaaatcaggaagtatagtcggttagttgagataggatgtggtcttaagtagtaaacagtgttctaaagtttcaggttgcatgtagtcacatctgtagagggaaacataatttgaaagatgctcttgcaggaaatttttctttgtttagtcaaaatatgctctctttgtttttaagttaatttattatgacctaaaggcatctaaaaaataaataagaaaatgaaattccatatttgtggaaattcatattgaagtctaactgtggctgttttggtaaaagtatttgctgctttgaatcaaatttagcattaaagggctgccacagtataatcatgttaaggagaaaagaatgttgtgcacacttgcattataagccaataagaaatagataacaaggccaggctcagtggctcacgcctgtaatcccaataccttgggaggccaaggtgggcgggctgcttgagcccaggagttcaagaccagcctgggcaatatagtgagacctcgtctactaaaaataaaaattaaaacaaccagccaggcatggtggtgtgttcttataggctgaggtggaaggatcactggagccctggagattaagggtgcagtgagccatgcttatgctactgcaccacagcctggggaacagagcaagatcctgtctcaaaaaaaaaaaaaaaaaatagaagtagagagcaaattattttttattgttaccattatttagtaacaatatttaagcgctttataggtaaaaatccttaagttctggtattccctttgggaaccattataattaaggtttacagaacacccatcatattcttcccaaacattttttcattgcttgtaactttccaaagaattctccttttgggctttctggttttattttaagcccaaaggtgaattttttgggaagtttgagctaaattccttcaaccaaaatatacaagtgaagaaaaaaaatttgtatttaaacatttgcacatttacttctacctgaagcatgtgaatgtcaacacttcatatttcataagtagtgggttttcataaaaatagtattgtaaatataaatcatcttaaagttagtttttatttcttcttgaatatttagcagttaagtacagttactagtcttttgttgctgtgccatatacctggtttttccataacagtttaatgagttgaataattccacatggaattatgtttattttcctcaggaagtggtatataagatacatattttaatcctcaaatggaaggatgtagttcctaaacgtaaagtcctgttaatgcagttatctgctgattttataatactataatatttgtgtatactttgaaaagccttaaaaaaagtttaaattctattttgatatagtaagcagggttttaattacacatgatagaattttaaagagacaaaattaaaatgtttaagtagaatgttttcatggttgatccagaagtcttctgttgaataagcagtaagtattcttccttataaaattttcatagttgttataaatcctgtttatttttggagctatctgataactaaataatcttccttatttcttcttttaatgaaatgtttgatttgtttctcaatcaatgaagatccagctccaggtcccacaggggctcttcttccccacgaaaaagatcttattcaagttcatcatcttctcctgagaggaacagaaagagaagtcgttctagatcttcttcatctggtgatcgcaaaaaaagacgaacaagatcacggtcacccgaaagttgggtttctgtagaaataagaatgggtgttcttaagtgtgtttaatagataaagtaaactttcctagtcaagggttagatttttattatctcttgtgttccgactttctacttttcaactttgaacttcaaaaaaacattactttgcttatcctttgtactttgatcaggttgtttagaattgtagatcaaaccattctttgatcattttattgtttaaatttttagttccatttataatttttatagccaactctcggttatttctgtcttttgagattgcaattcagaagctgtatgtcgaagtaatttatgagttgacttttatacttaggcttctttaaatactaatagtcaagaattctagagcatctaataaaaaattaactttcagatcattgggaatctgtcctcatttaaatatgtgtaaatgcatttccacagcaaattgcttcatgccctttgtctataaggaaattattccttgtagctaatacatttttcattttgcagtccaaatcttttttgagaaaggcctatattaggttactttatctgtactgacacttttaatattggaagaatgcaactgtcatctgtcagccttttctgcaacaggctaattactcagtttcattaattttctctttgttcccaattatatagtcattttaatggctttatttgtagtctttgcaaatttttcatattttattagcttgtgaaaataaagattatgtaaagtctattaattgctgggttcagtggtaggattatctcatgattcctacttgtacagaatgattagttttgcttcttcacattttggagtttagatgttaagatttcacacagtcttgtttctctgcatttgtttctttgtaaaaaaaattactctgtttttgagtggaattcattctgttgctttcttaccacttctgcaaatttttatcttagccacatataatccccctagtttgttgtcatctaaacttaatgaacatgttctctattccataagccaggtgattggtgaaaacactaaacaaccctgagcccagggccaacccctacggaacaccactactttacccaggttgatattgacttattcatactagctgcatgaatataaccctatagcaaattgtacaatcatcttgtgtgacctagatttccaaaacttatttatgagtatattttctcatacacagaagccttgctgtatcttttttacataatagacttcttacactttctacaccgtgtcacagggattggtttagtcacacttccattaccaagtttatatgcttttgttgtacattttctgtaattttacacatttttgcaaggcttttctttgatatcttaaataattgagaggtggctatattttgaaatgagattcttttgaaattgtagagaattttttattgtatttatatgataactgggctcatatccaaagtctaaacatcagataattttatgtgtgtaagttcctatctcaatttttaatttttttgctagcatcatggtactgaattttgtatactttcacagtcttaagaatgaatgctgagatttagctctagcttactagaatgcctactctctccattatgtcttacagacgccacaggtcatcatctggatcatcccattctggttcccgttcaagttcaaaaaagaaataatgtattaaaatttacatcttaaaaaaatccagtacagtgcatgaagcatatttttaaagaagttggtgtcttacttggtcagaagtgctaaatctgctagtagaggtgcatgcctttcattgcttttcaaaacaatacagctgtgtttatttgtgaagttaaaagtaaatagcattttaagccataatgtcccaaaatagatgttctgtcattcattatttacaaccatttgcttcatttaaaaccatttcagctataacaaagtactttgcttcctaatttaaacccatttttgtcatttccaaatacatcctgtccattggctaagacaggattacctaggcttgcctgaactttgggcatggaagaaagactggaaactagttggaaacaacatacttatggaaaagaaagtcagcctttttatgctgttaacagatgtcagagtgattctcaccaaaaaaagttaaactatgttgtaagcagccaactgtaaatgtctattttgaaattccctatgctaagggtgccttagaatcattgtgtctcttttatccagctttacttttttgctccacatttaatgcaaaagaatcttgtgatgtctacaaggagagaagtgggatatattttcctttctgacacataatttggggcaaaaaagaaagtcttaagagtttatcttttctctgctgatacggttgcttgataaagacatctcaaaatgtttaccaatgttttaagaagctttgtgtgatattcttccaaatgtagttaccaaatataatatggtagaaaaggctaaatcatacttaatgagcaaattgaagtaagcttttaaagtatatttctcttttggtgaaaggccaatggagacattgtgaatttaagtgaacatttgcctcaagatgttaactataaacacactgcatacaattttcttctgaataacaaatgaatgcttattgctgcatgatgtaagcaaaagtcattatttttcctattcatttgaaataagttatggcttaaaatgcttttggagtttatttctcaaaattaaaatctggtcacatgagctttagtttgttttctggtttaaaaaataaaaaggtttctcttaacagtatttccagtgacaatgcaaggtaagtatatcaaaggaaatcaacagttgtgcttgggggctttttgttatgggatattgatttcttgttttttttccgtaacattgtctgctgcaatttaaataaaaattacgacattttaagatatttcatagacaaaccaaacaaaaatatatgtttttactttaaagtgaatgtttttctcttcagctgatctaaaaatgaaagcaagatatcttatgtagaaatattttgataatatttttacagtgagctttcccatgtttttatgtcttaagtttctttgctgcgtttatgtaggttgcacaagaacttttactcacttgtaattgtgcctcagactttttgaaagtctaccttctaaattgccccgacgatctagattctacatgttaccattggtttattcttgtgctttctgtatttaaaactttggctgtactaagcaaatgcaaggttataatttagctaatagtagtttacagacaattctgatgattatgatttcatttggtttaactaagctgtactagttcatttcataaggaaatgatactgtagacaaatgtaaataaagcctgtgagtcaagcatcaagtggtgtttgttagaaataaactagagatttttaaactctga

SEQ ID NO: 438345 - DNA, 7006 bp, Homo sapiens
tccgaggcttctagtgccacgaaggcctcctgcctgggttgtccttatggcgcctgtgagtttagttctagaaaagatatttgtattttaacttttccatctaacaaacagtagcacaggcatcttagtctggacaacaacgtacaagctgaattcctggctagttccctcattatcaaaccctgacacagtagtaggcgcgagtcaggcagtgtggggacagccccgagttgccgaaagtccccggcccgttttcctcctgtgaagacatagctgcgggtggctgtgctggtggcgttcaagatgtcgaccaagaatttccgagtcagtgacggggactggatttgccctgacaaaaaatgtggaaatgtaaactttgctagaagaaccagctgtaatcgatgtggtcgggagaaaacaactgaggccaagatgatgaaagctgggggcactgaaataggaaagacacttgcagaaaagagccgaggcctatttagtgctaatgactggcaatgtaaaacttgcagcaatgtgaattgggccagaagatcagagtgtaatatgtgtaatactccaaagtatgctaaattagaagaaagaacaggatatggtggtggttttaatgaaagagaaaatgttgaatatatagaaagagaagaatctgatggtgaatatgatgagtttggacgtaaaaagaaaaaatacagagggaaagcagttggtcctgcatctatattaaaggaagttgaagataaagaatcagagggagaagaagaggatgaggatgaagatctttctaaatataagttagatgaggatgaggatgaagatgacgctgatctctcaaaatataatcttgatgccagtgaagaagaagatagtaataaaaagaaatctaatagacgaagtcgctcaaagtctcgatcttcacattcacgatcttcatcacgctcatcctccccctcaagttcaaggtctaggtccaggtcccgttcaagaagttcttccagttcgcagtcaagatctcgttccagttccagagaacgttcgagatctcgtgggtcgaaatcaaggtgaatgaggtagcatctctctgtaaagcagagagaaaaatatttaaaggctgcagaaggtgttgctgctttttttccccttattttgcttctacttgtcgattttattttagcattagaaaactaatgcacttgcctcagcttaattttctcaccatgaaatgtttccattgccagcagtgtgccaagacattcccatgattgaaatcaggtggctattttgcaatatgcagcgtttattattttggcactaagatgttatgaagtaggaagatgaagccaagtcttatcgccacatctctagtatattaagattatatatggccaggcacagtgattcatgcctataatcccagcactttgggaagctgaggtgggaggatcacttgaggccaggagttcaaggttgtagtgaaccttgatcacagcactgtaatccagcctgggtgacagaggagtgtctcaaaaaaaaaaaaaaaaattaatagtagttcaaataaaattacatatgtaaataaaaagaaaaattttcttcattattaaaaggaagaaaaataaccctgcctcgccatttatatcagataaagttactagagtactgtatatacattttcctttctaattttacacacgctattatttatagagcacaaaacactcaaaactaaatcaggaagtatagtcggttagttgagataggatgtggtcttaagtagtaaacagtgttctaaagtttcaggttgcatgtagtcacatctgtagagggaaacataatttgaaagatgctcttgcaggaaatttttctttgtttagtcaaaatatgctctctttgtttttaagttaatttattatgacctaaaggcatctaaaaaataaataagaaaatgaaattccatatttgtggaaattcatattgaagtctaactgtggctgttttggtaaaagtatttgctgctttgaatcaaatttagcattaaagggctgccacagtataatcatgttaaggagaaaagaatgttgtgcacacttgcattataagccaataagaaatagataacaaggccaggctcagtggctcacgcctgtaatcccaataccttgggaggccaaggtgggcgggctgcttgagcccaggagttcaagaccagcctgggcaatatagtgagacctcgtctactaaaaataaaaattaaaacaaccagccaggcatggtggtgtgttcttataggctgaggtggaaggatcactggagccctggagattaagggtgcagtgagccatgcttatgctactgcaccacagcctggggaacagagcaagatcctgtctcaaaaaaaaaaaaaaaaaatagaagtagagagcaaattattttttattgttaccattatttagtaacaatatttaagcgctttataggtaaaaatccttaagttctggtattccctttgggaaccattataattaaggtttacagaacacccatcatattcttcccaaacattttttcattgcttgtaactttccaaagaattctccttttgggctttctggttttattttaagcccaaaggtgaattttttgggaagtttgagctaaattccttcaaccaaaatatacaagtgaagaaaaaaaatttgtatttaaacatttgcacatttacttctacctgaagcatgtgaatgtcaacacttcatatttcataagtagtgggttttcataaaaatagtattgtaaatataaatcatcttaaagttagtttttatttcttcttgaatatttagcagttaagtacagttactagtcttttgttgctgtgccatatacctggtttttccataacagtttaatgagttgaataattccacatggaattatgtttattttcctcaggaagtggtatataagatacatattttaatcctcaaatggaaggatgtagttcctaaacgtaaagtcctgttaatgcagttatctgctgattttataatactataatatttgtgtatactttgaaaagccttaaaaaaagtttaaattctattttgatatagtaagcagggttttaattacacatgatagaattttaaagagacaaaattaaaatgtttaagtagaatgttttcatggttgatccagaagtcttctgttgaataagcagtaagtattcttccttataaaattttcatagttgttataaatcctgtttatttttggagctatctgataactaaataatcttccttatttcttcttttaatgaaatgtttgatttgtttctcaatcaatgaagatccagctccaggtcccacaggggctcttcttccccacgaaaaagatcttattcaagttcatcatcttctcctgagaggaacagaaagagaagtcgttctagatcttcttcatctggtgatcgcaaaaaaagacgaacaagatcacggtcacccgaaagttgggtttctgtagaaataagaatgggtgttcttaagtgtgtttaatagataaagtaaactttcctagtcaagggttagatttttattatctcttgtgttccgactttctacttttcaactttgaacttcaaaaaaacattactttgcttatcctttgtactttgatcaggttgtttagaattgtagatcaaaccattctttgatcattttattgtttaaatttttagttccatttataatttttatagccaactctcggttatttctgtcttttgagattgcaattcagaagctgtatgtcgaagtaatttatgagttgacttttatacttaggcttctttaaatactaatagtcaagaattctagagcatctaataaaaaattaactttcagatcattgggaatctgtcctcatttaaatatgtgtaaatgcatttccacagcaaattgcttcatgccctttgtctataaggaaattattccttgtagctaatacatttttcattttgcagtccaaatcttttttgagaaaggcctatattaggttactttatctgtactgacacttttaatattggaagaatgcaactgtcatctgtcagccttttctgcaacaggctaattactcagtttcattaattttctctttgttcccaattatatagtcattttaatggctttatttgtagtctttgcaaatttttcatattttattagcttgtgaaaataaagattatgtaaagtctattaattgctgggttcagtggtaggattatctcatgattcctacttgtacagaatgattagttttgcttcttcacattttggagtttagatgttaagatttcacacagtcttgtttctctgcatttgtttctttgtaaaaaaaattactctgtttttgagtggaattcattctgttgctttcttaccacttctgcaaatttttatcttagccacatataatccccctagtttgttgtcatctaaacttaatgaacatgttctctattccataagccaggtgattggtgaaaacactaaacaaccctgagcccagggccaacccctacggaacaccactactttacccaggttgatattgacttattcatactagctgcatgaatataaccctatagcaaattgtacaatcatcttgtgtgacctagatttccaaaacttatttatgagtatattttctcatacacagaagccttgctgtatcttttttacataatagacttcttacactttctacaccgtgtcacagggattggtttagtcacacttccattaccaagtttatatgcttttgttgtacattttctgtaattttacacatttttgcaaggcttttctttgatatcttaaataattgagaggtggctatattttgaaatgagattcttttgaaattgtagagaattttttattgtatttatatgataactgggctcatatccaaagtctaaacatcagataattttatgtgtgtaagttcctatctcaatttttaatttttttgctagcatcatggtactgaattttgtatactttcacagtcttaagaatgaatgctgagatttagctctagcttactagaatgcctactctctccattatgtcttacagacgccacaggtcatcatctggatcatcccattctggttcccgttcaagttcaaaaaagaaataatgtattaaaatttacatcttaaaaaaatccagtacagtgcatgaagcatatttttaaagaagttggtgtcttacttggtcagaagtgctaaatctgctagtagaggtgcatgcctttcattgcttttcaaaacaatacagctgtgtttatttgtgaagttaaaagtaaatagcattttaagccataatgtcccaaaatagatgttctgtcattcattatttacaaccatttgcttcatttaaaaccatttcagctataacaaagtactttgcttcctaatttaaacccatttttgtcatttccaaatacatcctgtccattggctaagacaggattacctaggcttgcctgaactttgggcatggaagaaagactggaaactagttggaaacaacatacttatggaaaagaaagtcagcctttttatgctgttaacagatgtcagagtgattctcaccaaaaaaagttaaactatgttgtaagcagccaactgtaaatgtctattttgaaattccctatgctaagggtgccttagaatcattgtgtctcttttatccagctttacttttttgctccacatttaatgcaaaagaatcttgtgatgtctacaaggagagaagtgggatatattttcctttctgacacataatttggggcaaaaaagaaagtcttaagagtttatcttttctctgctgatacggttgcttgataaagacatctcaaaatgtttaccaatgttttaagaagctttgtgtgatattcttccaaatgtagttaccaaatataatatggtagaaaaggctaaatcatacttaatgagcaaattgaagtaagcttttaaagtatatttctcttttggtgaaaggccaatggagacattgtgaatttaagtgaacatttgcctcaagatgttaactataaacacactgcatacaattttcttctgaataacaaatgaatgcttattgctgcatgatgtaagcaaaagtcattatttttcctattcatttgaaataagttatggcttaaaatgcttttggagtttatttctcaaaattaaaatctggtcacatgagctttagtttgttttctggtttaaaaaataaaaaggtttctcttaacagtatttccagtgacaatgcaaggtaagtatatcaaaggaaatcaacagttgtgcttgggggctttttgttatgggatattgatttcttgttttttttccgtaacattgtctgctgcaatttaaataaaaattacgacattttaagatatttcatagacaaaccaaacaaaaatatatgtttttactttaaagtgaatgtttttctcttcagctgatctaaaaatgaaagcaagatatcttatgtagaaatattttgataatatttttacagtgagctttcccatgtttttatgtcttaagtttctttgctgcgtttatgtaggttgcacaagaacttttactcacttgtaattgtgcctcagactttttgaaagtctaccttctaaattgccccgacgatctagattctacatgttaccattggtttattcttgtgctttctgtatttaaaactttggctgtactaagcaaatgcaaggttataatttagctaatagtagtttacagacaattctgatgattatgatttcatttggtttaactaagctgtactagttcatttcataaggaaatgatactgtagacaaatgtaaataaagcctgtgagtcaagcatcaagtggtgtttgttagaaataaactagagatttttaaactctga

SEQ ID NO: 438346 - DNA, 5424 bp, Homo sapiens
tccgaggcttctagtgccacgaaggcctcctgcctgggttgtccttatggcgcctgtgagtttagttctagaaaagatatttgtattttaacttttccatctaacaaacagtagcacaggcatcttagtctggacaacaacgtacaagctgaattcctggctagttccctcattatcaaaccctgacacagtagtaggcgcgagtcaggcagtgtggggacagccccgagttgccgaaagtccccggcccgttttcctcctgtgaagacatagctgcgggtggctgtgctggtggcgttcaagatgtcgaccaagaatttccgagtcagtgacggggactggatttgccctgacaaaaaatgtggaaatgtaaactttgctagaagaaccagctgtaatcgatgtggtcgggagaaaacaactgaggccaagatgatgaaagctgggggcactgaaataggaaagacacttgcagaaaagagccgaggcctatttagtgctaatgactggcaatgtaaaacttgcagcaatgtgaattgggccagaagatcagagtgtaatatgtgtaatactccaaagtatgctaaattagaagaaagaacaggatatggtggtggttttaatgaaagagaaaatgttgaatatatagaaagagaagaatctgatggtgaatatgatgagtttggacgtaaaaagaaaaaatacagagggaaagcagttggtcctgcatctatattaaaggaagttgaagataaagaatcagagggagaagaagaggatgaggatgaagatctttctaaatataagttagatgaggatgaggatgaagatgacgctgatctctcaaaatataatcttgatgccagtgaagaagaagatagtaataaaaagaaatctaatagacgaagtcgctcaaagtctcgatcttcacattcacgatcttcatcacgctcatcctccccctcaagttcaaggtctaggtccaggtcccgttcaagaagttcttccagttcgcagtcaagatctcgttccagttccagagaacgttcgagatctcgtgggtcgaaatcaaggtgaatgaggtagcatctctctgtaaagcagagagaaaaatatttaaaggctgcagaaggtgttgctgctttttttccccttattttgcttctacttgtcgattttattttagcattagaaaactaatgcacttgcctcagcttaattttctcaccatgaaatgtttccattgccagcagtgtgccaagacattcccatgattgaaatcaggtggctattttgcaatatgcagcgtttattattttggcactaagatgttatgaagtaggaagatgaagccaagtcttatcgccacatctctagtatattaagattatatatggccaggcacagtgattcatgcctataatcccagcactttgggaagctgaggtgggaggatcacttgaggccaggagttcaaggttgtagtgaaccttgatcacagcactgtaatccagcctgggtgacagaggagtgtctcaaaaaaaaaaaaaaaaattaatagtagttcaaataaaattacatatgtaaataaaaagaaaaattttcttcattattaaaaggaagaaaaataaccctgcctcaaaacaggtcctgttttgcacggcagttgtttcaatattttcagaaacaaatttgccatttatatcagataaagttactagagtactgtatatacattttcctttctaattttacacacgctattatttatagagcacaaaacactcaaaactaaatcaggaagtatagtcggttagttgagataggatgtggtcttaagtagtaaacagtgttctaaagtttcaggttgcatgtagtcacatctgtagagggaaacataatttgaaagatgctcttgcaggaaatttttctttgtttagtcaaaatatgctctctttgtttttaagttaatttattatgacctaaaggcatctaaaaaataaataagaaaatgaaattccatatttgtggaaattcatattgaagtctaactgtggctgttttggtaaaagtatttgctgctttgaatcaaatttagcattaaagggctgccacagtataatcatgttaaggagaaaagaatgttgtgcacacttgcattataagccaataagaaatagataacaaggccaggctcagtggctcacgcctgtaatcccaataccttgggaggccaaggtgggcgggctgcttgagcccaggagttcaagaccagcctgggcaatatagtgagacctcgtctactaaaaataaaaattaaaacaaccagccaggcatggtggtgtgttcttataggctgaggtggaaggatcactggagccctggagattaagggtgcagtgagccatgcttatgctactgcaccacagcctggggaacagagcaagatcctgtctcaaaaaaaaaaaaaaaaaatagaagtagagagcaaattattttttattgttaccattatttagtaacaatatttaagcgctttataggtaaaaatccttaagttctggtattccctttgggaaccattataattaaggtttacagaacacccatcatattcttcccaaacattttttcattgcttgtaactttccaaagaattctccttttgggctttctggttttattttaagcccaaaggtgaattttttgggaagtttgagctaaattccttcaaccaaaatatacaagtgaagaaaaaaaatttgtatttaaacatttgcacatttacttctacctgaagcatgtgaatgtcaacacttcatatttcataagtagtgggttttcataaaaatagtattgtaaatataaatcatcttaaagttagtttttatttcttcttgaatatttagcagttaagtacagttactagtcttttgttgctgtgccatatacctggtttttccataacagtttaatgagttgaataattccacatggaattatgtttattttcctcaggaagtggtatataagatacatattttaatcctcaaatggaaggatgtagttcctaaacgtaaagtcctgttaatgcagttatctgctgattttataatactataatatttgtgtatactttgaaaagccttaaaaaaagtttaaattctattttgatatagtaagcagggttttaattacacatgatagaattttaaagagacaaaattaaaatgtttaagtagaatgttttcatggttgatccagaagtcttctgttgaataagcagtaagtattcttccttataaaattttcatagttgttataaatcctgtttatttttggagctatctgataactaaataatcttccttatttcttcttttaatgaaatgtttgatttgtttctcaatcaatgaagatccagctccaggtcccacaggggctcttcttccccacgaaaaagatcttattcaagttcatcatcttctcctgagaggaacagaaagagaagtcgttctagatcttcttcatctggtgatcgcaaaaaaagacgaacaagatcacggtcacccgaaagacgccacaggtcatcatctggatcatcccattctggttcccgttcaagttcaaaaaagaaataatgtattaaaatttacatcttaaaaaaatccagtacagtgcatgaagcatatttttaaagaagttggtgtcttacttggtcagaagtgctaaatctgctagtagaggtgcatgcctttcattgcttttcaaaacaatacagctgtgtttatttgtgaagttaaaagtaaatagcattttaagccataatgtcccaaaatagatgttctgtcattcattatttacaaccatttgcttcatttaaaaccatttcagctataacaaagtactttgcttcctaatttaaacccatttttgtcatttccaaatacatcctgtccattggctaagacaggattacctaggcttgcctgaactttgggcatggaagaaagactggaaactagttggaaacaacatacttatggaaaagaaagtcagcctttttatgctgttaacagatgtcagagtgattctcaccaaaaaaagttaaactatgttgtaagcagccaactgtaaatgtctattttgaaattccctatgctaagggtgccttagaatcattgtgtctcttttatccagctttacttttttgctccacatttaatgcaaaagaatcttgtgatgtctacaaggagagaagtgggatatattttcctttctgacacataatttggggcaaaaaagaaagtcttaagagtttatcttttctctgctgatacggttgcttgataaagacatctcaaaatgtttaccaatgttttaagaagctttgtgtgatattcttccaaatgtagttaccaaatataatatggtagaaaaggctaaatcatacttaatgagcaaattgaagtaagcttttaaagtatatttctcttttggtgaaaggccaatggagacattgtgaatttaagtgaacatttgcctcaagatgttaactataaacacactgcatacaattttcttctgaataacaaatgaatgcttattgctgcatgatgtaagcaaaagtcattatttttcctattcatttgaaataagttatggcttaaaatgcttttggagtttatttctcaaaattaaaatctggtcacatgagctttagtttgttttctggtttaaaaaataaaaaggtttctcttaacagtatttccagtgacaatgcaaggtaagtatatcaaaggaaatcaacagttgtgcttgggggctttttgttatgggatattgatttcttgttttttttccgtaacattgtctgctgcaatttaaataaaaattacgacattttaagatatttcatagacaaaccaaacaaaaatatatgtttttactttaaagtgaatgtttttctcttcagctgatctaaaaatgaaagcaagatatcttatgtagaaatattttgataatatttttacagtgagctttcccatgtttttatgtcttaagtttctttgctgcgtttatgtaggttgcacaagaacttttactcacttgtaattgtgcctcagactttttgaaagtctaccttctaaattgccccgacgatctagattctacatgttaccattggtttattcttgtgctttctgtatttaaaactttggctgtactaagcaaatgcaaggttataatttagctaatagtagtttacagacaattctgatgattatgatttcatttggtttaactaagctgtactagttcatttcataaggaaatgatactgtagacaaatgtaaataaagcctgtgagtcaagcatcaagtggtgtttgttagaaataaactagagatttttaaactctga

SEQ ID NO: 438347 - DNA, 6772 bp, Homo sapiens
gcctgaaagcttaacaaagtggggctataactagtaattttttggtaaaaatatagtgatctttttctacagggtattattataagggacaaattatagttgtaaattagattaatgaattttgtgagttttaaaatttgtacgaaccatgtctcccttgtgtcatattttccaataatataattacctaacaatgacagaattatacattttccctttaattctctaagcattgagtaaacagaaaaatatagggatgaaatacacacatgccaacattcaaaactttgtactaactagaaacaaaaatagaaggggatttataaaggaaaatgatggagacattttagagaaattaagtataaatcgcaacattctgttttcttggatgtattctgggtagcttctagttacttgtaaacaaagtattcattgtttttgtaataaagtgataatgttttgttttatagttgagtggctttagggtaatttaatcacctggaaagtgatatttttttaattaccttttgttactaaatcttatctaatttaaaatactatgttttgaaagtatatatcttgtatagttatctttttatatgaaaatgaactctaatacatatctttctttcagtgttcatatcacaaagctcaattaaatggtcctggaaaaaaaaaatcgttccatgttgttccaggtcccgttcaagaagttcttccagttcgcagtcaagatctcgttccagttccagagaacgttcgagatctcgtgggtcgaaatcaaggtgaatgaggtagcatctctctgtaaagcagagagaaaaatatttaaaggctgcagaaggtgttgctgctttttttccccttattttgcttctacttgtcgattttattttagcattagaaaactaatgcacttgcctcagcttaattttctcaccatgaaatgtttccattgccagcagtgtgccaagacattcccatgattgaaatcaggtggctattttgcaatatgcagcgtttattattttggcactaagatgttatgaagtaggaagatgaagccaagtcttatcgccacatctctagtatattaagattatatatggccaggcacagtgattcatgcctataatcccagcactttgggaagctgaggtgggaggatcacttgaggccaggagttcaaggttgtagtgaaccttgatcacagcactgtaatccagcctgggtgacagaggagtgtctcaaaaaaaaaaaaaaaaattaatagtagttcaaataaaattacatatgtaaataaaaagaaaaattttcttcattattaaaaggaagaaaaataaccctgcctcaaaacaggtcctgttttgcacggcagttgtttcaatattttcagaaacaaatttgccatttatatcagataaagttactagagtactgtatatacattttcctttctaattttacacacgctattatttatagagcacaaaacactcaaaactaaatcaggaagtatagtcggttagttgagataggatgtggtcttaagtagtaaacagtgttctaaagtttcaggttgcatgtagtcacatctgtagagggaaacataatttgaaagatgctcttgcaggaaatttttctttgtttagtcaaaatatgctctctttgtttttaagttaatttattatgacctaaaggcatctaaaaaataaataagaaaatgaaattccatatttgtggaaattcatattgaagtctaactgtggctgttttggtaaaagtatttgctgctttgaatcaaatttagcattaaagggctgccacagtataatcatgttaaggagaaaagaatgttgtgcacacttgcattataagccaataagaaatagataacaaggccaggctcagtggctcacgcctgtaatcccaataccttgggaggccaaggtgggcgggctgcttgagcccaggagttcaagaccagcctgggcaatatagtgagacctcgtctactaaaaataaaaattaaaacaaccagccaggcatggtggtgtgttcttataggctgaggtggaaggatcactggagccctggagattaagggtgcagtgagccatgcttatgctactgcaccacagcctggggaacagagcaagatcctgtctcaaaaaaaaaaaaaaaaaatagaagtagagagcaaattattttttattgttaccattatttagtaacaatatttaagcgctttataggtaaaaatccttaagttctggtattccctttgggaaccattataattaaggtttacagaacacccatcatattcttcccaaacattttttcattgcttgtaactttccaaagaattctccttttgggctttctggttttattttaagcccaaaggtgaattttttgggaagtttgagctaaattccttcaaccaaaatatacaagtgaagaaaaaaaatttgtatttaaacatttgcacatttacttctacctgaagcatgtgaatgtcaacacttcatatttcataagtagtgggttttcataaaaatagtattgtaaatataaatcatcttaaagttagtttttatttcttcttgaatatttagcagttaagtacagttactagtcttttgttgctgtgccatatacctggtttttccataacagtttaatgagttgaataattccacatggaattatgtttattttcctcaggaagtggtatataagatacatattttaatcctcaaatggaaggatgtagttcctaaacgtaaagtcctgttaatgcagttatctgctgattttataatactataatatttgtgtatactttgaaaagccttaaaaaaagtttaaattctattttgatatagtaagcagggttttaattacacatgatagaattttaaagagacaaaattaaaatgtttaagtagaatgttttcatggttgatccagaagtcttctgttgaataagcagtaagtattcttccttataaaattttcatagttgttataaatcctgtttatttttggagctatctgataactaaataatcttccttatttcttcttttaatgaaatgtttgatttgtttctcaatcaatgaagatccagctccaggtcccacaggggctcttcttccccacgaaaaagatcttattcaagttcatcatcttctcctgagaggaacagaaagagaagtcgttctagatcttcttcatctggtgatcgcaaaaaaagacgaacaagatcacggtcacccgaaagttgggtttctgtagaaataagaatgggtgttcttaagtgtgtttaatagataaagtaaactttcctagtcaagggttagatttttattatctcttgtgttccgactttctacttttcaactttgaacttcaaaaaaacattactttgcttatcctttgtactttgatcaggttgtttagaattgtagatcaaaccattctttgatcattttattgtttaaatttttagttccatttataatttttatagccaactctcggttatttctgtcttttgagattgcaattcagaagctgtatgtcgaagtaatttatgagttgacttttatacttaggcttctttaaatactaatagtcaagaattctagagcatctaataaaaaattaactttcagatcattgggaatctgtcctcatttaaatatgtgtaaatgcatttccacagcaaattgcttcatgccctttgtctataaggaaattattccttgtagctaatacatttttcattttgcagtccaaatcttttttgagaaaggcctatattaggttactttatctgtactgacacttttaatattggaagaatgcaactgtcatctgtcagccttttctgcaacaggctaattactcagtttcattaattttctctttgttcccaattatatagtcattttaatggctttatttgtagtctttgcaaatttttcatattttattagcttgtgaaaataaagattatgtaaagtctattaattgctgggttcagtggtaggattatctcatgattcctacttgtacagaatgattagttttgcttcttcacattttggagtttagatgttaagatttcacacagtcttgtttctctgcatttgtttctttgtaaaaaaaattactctgtttttgagtggaattcattctgttgctttcttaccacttctgcaaatttttatcttagccacatataatccccctagtttgttgtcatctaaacttaatgaacatgttctctattccataagccaggtgattggtgaaaacactaaacaaccctgagcccagggccaacccctacggaacaccactactttacccaggttgatattgacttattcatactagctgcatgaatataaccctatagcaaattgtacaatcatcttgtgtgacctagatttccaaaacttatttatgagtatattttctcatacacagaagccttgctgtatcttttttacataatagacttcttacactttctacaccgtgtcacagggattggtttagtcacacttccattaccaagtttatatgcttttgttgtacattttctgtaattttacacatttttgcaaggcttttctttgatatcttaaataattgagaggtggctatattttgaaatgagattcttttgaaattgtagagaattttttattgtatttatatgataactgggctcatatccaaagtctaaacatcagataattttatgtgtgtaagttcctatctcaatttttaatttttttgctagcatcatggtactgaattttgtatactttcacagtcttaagaatgaatgctgagatttagctctagcttactagaatgcctactctctccattatgtcttacagacgccacaggtcatcatctggatcatcccattctggttcccgttcaagttcaaaaaagaaataatgtattaaaatttacatcttaaaaaaatccagtacagtgcatgaagcatatttttaaagaagttggtgtcttacttggtcagaagtgctaaatctgctagtagaggtgcatgcctttcattgcttttcaaaacaatacagctgtgtttatttgtgaagttaaaagtaaatagcattttaagccataatgtcccaaaatagatgttctgtcattcattatttacaaccatttgcttcatttaaaaccatttcagctataacaaagtactttgcttcctaatttaaacccatttttgtcatttccaaatacatcctgtccattggctaagacaggattacctaggcttgcctgaactttgggcatggaagaaagactggaaactagttggaaacaacatacttatggaaaagaaagtcagcctttttatgctgttaacagatgtcagagtgattctcaccaaaaaaagttaaactatgttgtaagcagccaactgtaaatgtctattttgaaattccctatgctaagggtgccttagaatcattgtgtctcttttatccagctttacttttttgctccacatttaatgcaaaagaatcttgtgatgtctacaaggagagaagtgggatatattttcctttctgacacataatttggggcaaaaaagaaagtcttaagagtttatcttttctctgctgatacggttgcttgataaagacatctcaaaatgtttaccaatgttttaagaagctttgtgtgatattcttccaaatgtagttaccaaatataatatggtagaaaaggctaaatcatacttaatgagcaaattgaagtaagcttttaaagtatatttctcttttggtgaaaggccaatggagacattgtgaatttaagtgaacatttgcctcaagatgttaactataaacacactgcatacaattttcttctgaataacaaatgaatgcttattgctgcatgatgtaagcaaaagtcattatttttcctattcatttgaaataagttatggcttaaaatgcttttggagtttatttctcaaaattaaaatctggtcacatgagctttagtttgttttctggtttaaaaaataaaaaggtttctcttaacagtatttccagtgacaatgcaaggtaagtatatcaaaggaaatcaacagttgtgcttgggggctttttgttatgggatattgatttcttgttttttttccgtaacattgtctgctgcaatttaaataaaaattacgacattttaagatatttcatagacaaaccaaacaaaaatatatgtttttactttaaagtgaatgtttttctcttcagctgatctaaaaatgaaagcaagatatcttatgtagaaatattttgataatatttttacagtgagctttcccatgtttttatgtcttaagtttctttgctgcgtttatgtaggttgcacaagaacttttactcacttgtaattgtgcctcagactttttgaaagtctaccttctaaattgccccgacgatctagattctacatgttaccattggtttattcttgtgctttctgtatttaaaactttggctgtactaagcaaatgcaaggttataatttagctaatagtagtttacagacaattctgatgattatgatttcatttggtttaactaagctgtactagttcatttcataaggaaatgatactgtagacaaatgtaaataaagcctgtgagtcaagcatcaagtggtgtttgttagaaataaactagagatttttaaactctga

SEQ ID NO: 438348 - DNA, 6855 bp, Homo sapiens
  misc_feature (11)..(11): n is a, c, g, or t
  misc_feature (16)..(16): n is a, c, g, or t
  misc_feature (31)..(31): n is a, c, g, or t
  misc_feature (51)..(51): n is a, c, g, or t
gtgaccaattnatatngtggtaacacccatnattgaaaaccacgcgtttgngttttataaaacacagcagctgtcggtcgattccggatgcctgtggcgtcagatgtcgacagaattcgagtcagtggacgggactggatggccctgacaaaaaatgtggaaatgtaaactttgctagaagaaccagctgtaatcgatgtggtcgggagaaaacaactgaggccaagatgatgaaagctgggggcactgaaataggaaagacacttgcagaaaagagccgaggcctatttagtgctaatgactggcaatgtaaaacttgcagcaatgtgaattgggccagaagatcagagtgtaatatgtgtaatactccaaagtatgctaaattagaagaaagaacaggatatggtggtggttttaatgaaagagaaaatgttgaatatatagaaagagaagaatctgatggtgaatatgatgagtttggacgtaaaaagaaaaaatacagagggaaagcagttggtcctgcatctatattaaaggaagttgaagataaagaatcagagggagaagaagaggatgaggatgaagatctttctaaatataagttagatgaggatgaggatgaagatgacgctgatctctcaaaatataatcttgatgccagtgaagaagaagatagtaataaaaagaaatctaatagacgaagtcgctcaaagtctcgatcttcacattcacgatcttcatcacgctcatcctccccctcaagttcaaggtctaggtccaggtcccgttcaagaagttcttccagttcgcagtcaagatctcgttccagttccagagaacgttcgagatctcgtgggtcgaaatcaaggtgaatgaggtagcatctctctgtaaagcagagagaaaaatatttaaaggctgcagaaggtgttgctgctttttttccccttattttgcttctacttgtcgattttattttagcattagaaaactaatgcacttgcctcagcttaattttctcaccatgaaatgtttccattgccagcagtgtgccaagacattcccatgattgaaatcaggtggctattttgcaatatgcagcgtttattattttggcactaagatgttatgaagtaggaagatgaagccaagtcttatcgccacatctctagtatattaagattatatatggccaggcacagtgattcatgcctataatcccagcactttgggaagctgaggtgggaggatcacttgaggccaggagttcaaggttgtagtgaaccttgatcacagcactgtaatccagcctgggtgacagaggagtgtctcaaaaaaaaaaaaaaaaattaatagtagttcaaataaaattacatatgtaaataaaaagaaaaattttcttcattattaaaaggaagaaaaataaccctgcctcaaaacaggtcctgttttgcacggcagttgtttcaatattttcagaaacaaatttgccatttatatcagataaagttactagagtactgtatatacattttcctttctaattttacacacgctattatttatagagcacaaaacactcaaaactaaatcaggaagtatagtcggttagttgagataggatgtggtcttaagtagtaaacagtgttctaaagtttcaggttgcatgtagtcacatctgtagagggaaacataatttgaaagatgctcttgcaggaaatttttctttgtttagtcaaaatatgctctctttgtttttaagttaatttattatgacctaaaggcatctaaaaaataaataagaaaatgaaattccatatttgtggaaattcatattgaagtctaactgtggctgttttggtaaaagtatttgctgctttgaatcaaatttagcattaaagggctgccacagtataatcatgttaaggagaaaagaatgttgtgcacacttgcattataagccaataagaaatagataacaaggccaggctcagtggctcacgcctgtaatcccaataccttgggaggccaaggtgggcgggctgcttgagcccaggagttcaagaccagcctgggcaatatagtgagacctcgtctactaaaaataaaaattaaaacaaccagccaggcatggtggtgtgttcttataggctgaggtggaaggatcactggagccctggagattaagggtgcagtgagccatgcttatgctactgcaccacagcctggggaacagagcaagatcctgtctcaaaaaaaaaaaaaaaaaatagaagtagagagcaaattattttttattgttaccattatttagtaacaatatttaagcgctttataggtaaaaatccttaagttctggtattccctttgggaaccattataattaaggtttacagaacacccatcatattcttcccaaacattttttcattgcttgtaactttccaaagaattctccttttgggctttctggttttattttaagcccaaaggtgaattttttgggaagtttgagctaaattccttcaaccaaaatatacaagtgaagaaaaaaaatttgtatttaaacatttgcacatttacttctacctgaagcatgtgaatgtcaacacttcatatttcataagtagtgggttttcataaaaatagtattgtaaatataaatcatcttaaagttagtttttatttcttcttgaatatttagcagttaagtacagttactagtcttttgttgctgtgccatatacctggtttttccataacagtttaatgagttgaataattccacatggaattatgtttattttcctcaggaagtggtatataagatacatattttaatcctcaaatggaaggatgtagttcctaaacgtaaagtcctgttaatgcagttatctgctgattttataatactataatatttgtgtatactttgaaaagccttaaaaaaagtttaaattctattttgatatagtaagcagggttttaattacacatgatagaattttaaagagacaaaattaaaatgtttaagtagaatgttttcatggttgatccagaagtcttctgttgaataagcagtaagtattcttccttataaaattttcatagttgttataaatcctgtttatttttggagctatctgataactaaataatcttccttatttcttcttttaatgaaatgtttgatttgtttctcaatcaatgaagatccagctccaggtcccacaggggctcttcttccccacgaaaaagatcttattcaagttcatcatcttctcctgagaggaacagaaagagaagtcgttctagatcttcttcatctggtgatcgcaaaaaaagacgaacaagatcacggtcacccgaaagttgggtttctgtagaaataagaatgggtgttcttaagtgtgtttaatagataaagtaaactttcctagtcaagggttagatttttattatctcttgtgttccgactttctacttttcaactttgaacttcaaaaaaacattactttgcttatcctttgtactttgatcaggttgtttagaattgtagatcaaaccattctttgatcattttattgtttaaatttttagttccatttataatttttatagccaactctcggttatttctgtcttttgagattgcaattcagaagctgtatgtcgaagtaatttatgagttgacttttatacttaggcttctttaaatactaatagtcaagaattctagagcatctaataaaaaattaactttcagatcattgggaatctgtcctcatttaaatatgtgtaaatgcatttccacagcaaattgcttcatgccctttgtctataaggaaattattccttgtagctaatacatttttcattttgcagtccaaatcttttttgagaaaggcctatattaggttactttatctgtactgacacttttaatattggaagaatgcaactgtcatctgtcagccttttctgcaacaggctaattactcagtttcattaattttctctttgttcccaattatatagtcattttaatggctttatttgtagtctttgcaaatttttcatattttattagcttgtgaaaataaagattatgtaaagtctattaattgctgggttcagtggtaggattatctcatgattcctacttgtacagaatgattagttttgcttcttcacattttggagtttagatgttaagatttcacacagtcttgtttctctgcatttgtttctttgtaaaaaaaattactctgtttttgagtggaattcattctgttgctttcttaccacttctgcaaatttttatcttagccacatataatccccctagtttgttgtcatctaaacttaatgaacatgttctctattccataagccaggtgattggtgaaaacactaaacaaccctgagcccagggccaacccctacggaacaccactactttacccaggttgatattgacttattcatactagctgcatgaatataaccctatagcaaattgtacaatcatcttgtgtgacctagatttccaaaacttatttatgagtatattttctcatacacagaagccttgctgtatcttttttacataatagacttcttacactttctacaccgtgtcacagggattggtttagtcacacttccattaccaagtttatatgcttttgttgtacattttctgtaattttacacatttttgcaaggcttttctttgatatcttaaataattgagaggtggctatattttgaaatgagattcttttgaaattgtagagaattttttattgtatttatatgataactgggctcatatccaaagtctaaacatcagataattttatgtgtgtaagttcctatctcaatttttaatttttttgctagcatcatggtactgaattttgtatactttcacagtcttaagaatgaatgctgagatttagctctagcttactagaatgcctactctctccattatgtcttacagacgccacaggtcatcatctggatcatcccattctggttcccgttcaagttcaaaaaagaaataatgtattaaaatttacatcttaaaaaaatccagtacagtgcatgaagcatatttttaaagaagttggtgtcttacttggtcagaagtgctaaatctgctagtagaggtgcatgcctttcattgcttttcaaaacaatacagctgtgtttatttgtgaagttaaaagtaaatagcattttaagccataatgtcccaaaatagatgttctgtcattcattatttacaaccatttgcttcatttaaaaccatttcagctataacaaagtactttgcttcctaatttaaacccatttttgtcatttccaaatacatcctgtccattggctaagacaggattacctaggcttgcctgaactttgggcatggaagaaagactggaaactagttggaaacaacatacttatggaaaagaaagtcagcctttttatgctgttaacagatgtcagagtgattctcaccaaaaaaagttaaactatgttgtaagcagccaactgtaaatgtctattttgaaattccctatgctaagggtgccttagaatcattgtgtctcttttatccagctttacttttttgctccacatttaatgcaaaagaatcttgtgatgtctacaaggagagaagtgggatatattttcctttctgacacataatttggggcaaaaaagaaagtcttaagagtttatcttttctctgctgatacggttgcttgataaagacatctcaaaatgtttaccaatgttttaagaagctttgtgtgatattcttccaaatgtagttaccaaatataatatggtagaaaaggctaaatcatacttaatgagcaaattgaagtaagcttttaaagtatatttctcttttggtgaaaggccaatggagacattgtgaatttaagtgaacatttgcctcaagatgttaactataaacacactgcatacaattttcttctgaataacaaatgaatgcttattgctgcatgatgtaagcaaaagtcattatttttcctattcatttgaaataagttatggcttaaaatgcttttggagtttatttctcaaaattaaaatctggtcacatgagctttagtttgttttctggtttaaaaaataaaaaggtttctcttaacagtatttccagtgacaatgcaaggtaagtatatcaaaggaaatcaacagttgtgcttgggggctttttgttatgggatattgatttcttgttttttttccgtaacattgtctgctgcaatttaaataaaaattacgacattttaagatatttcatagacaaaccaaacaaaaatatatgtttttactttaaagtgaatgtttttctcttcagctgatctaaaaatgaaagcaagatatcttatgtagaaatattttgataatatttttacagtgagctttcccatgtttttatgtcttaagtttctttgctgcgtttatgtaggttgcacaagaacttttactcacttgtaattgtgcctcagactttttgaaagtctaccttctaaattgccccgacgatctagattctacatgttaccattggtttattcttgtgctttctgtatttaaaactttggctgtactaagcaaatgcaaggttataatttagctaatagtagtttacagacaattctgatgattatgatttcatttggtttaactaagctgtactagttcatttcataaggaaatgatactgtagacaaatgtaaataaagcctgtgagtcaagcatcaagtggtgtttgttagaaataaactagagatttttaaactctga

SEQ ID NO: 438349 - DNA, 6811 bp, Homo sapiens
cgctaatggaagataccttgtgattgctggaaaataatcgcactcctttcacaccacaatctaatacgagcaccgtcgacgggcgactggatttgccctgtaccacaaagatgtggaaatgtaaactttgctagaagaaccagctgtaatcgatgtggtcgggagaaaacaactgaggccaagatgatgaaagctgggggcactgaaataggaaagacacttgcagaaaagagccgaggcctatttagtgctaatgactggcaatgtaaaacttgcagcaatgtgaattgggccagaagatcagagtgtaatatgtgtaatactccaaagtatgctaaattagaagaaagaacaggatatggtggtggttttaatgaaagagaaaatgttgaatatatagaaagagaagaatctgatggtgaatatgatgagtttggacgtaaaaagaaaaaatacagagggaaagcagttggtcctgcatctatattaaaggaagttgaagataaagaatcagagggagaagaagaggatgaggatgaagatctttctaaatataagttagatgaggatgaggatgaagatgacgctgatctctcaaaatataatcttgatgccagtgaagaagaagatagtaataaaaagaaatctaatagacgaagtcgctcaaagtctcgatcttcacattcacgatcttcatcacgctcatcctccccctcaagttcaaggtctaggtccaggtcccgttcaagaagttcttccagttcgcagtcaagatctcgttccagttccagagaacgttcgagatctcgtgggtcgaaatcaaggtgaatgaggtagcatctctctgtaaagcagagagaaaaatatttaaaggctgcagaaggtgttgctgctttttttccccttattttgcttctacttgtcgattttattttagcattagaaaactaatgcacttgcctcagcttaattttctcaccatgaaatgtttccattgccagcagtgtgccaagacattcccatgattgaaatcaggtggctattttgcaatatgcagcgtttattattttggcactaagatgttatgaagtaggaagatgaagccaagtcttatcgccacatctctagtatattaagattatatatggccaggcacagtgattcatgcctataatcccagcactttgggaagctgaggtgggaggatcacttgaggccaggagttcaaggttgtagtgaaccttgatcacagcactgtaatccagcctgggtgacagaggagtgtctcaaaaaaaaaaaaaaaaattaatagtagttcaaataaaattacatatgtaaataaaaagaaaaattttcttcattattaaaaggaagaaaaataaccctgcctcaaaacaggtcctgttttgcacggcagttgtttcaatattttcagaaacaaatttgccatttatatcagataaagttactagagtactgtatatacattttcctttctaattttacacacgctattatttatagagcacaaaacactcaaaactaaatcaggaagtatagtcggttagttgagataggatgtggtcttaagtagtaaacagtgttctaaagtttcaggttgcatgtagtcacatctgtagagggaaacataatttgaaagatgctcttgcaggaaatttttctttgtttagtcaaaatatgctctctttgtttttaagttaatttattatgacctaaaggcatctaaaaaataaataagaaaatgaaattccatatttgtggaaattcatattgaagtctaactgtggctgttttggtaaaagtatttgctgctttgaatcaaatttagcattaaagggctgccacagtataatcatgttaaggagaaaagaatgttgtgcacacttgcattataagccaataagaaatagataacaaggccaggctcagtggctcacgcctgtaatcccaataccttgggaggccaaggtgggcgggctgcttgagcccaggagttcaagaccagcctgggcaatatagtgagacctcgtctactaaaaataaaaattaaaacaaccagccaggcatggtggtgtgttcttataggctgaggtggaaggatcactggagccctggagattaagggtgcagtgagccatgcttatgctactgcaccacagcctggggaacagagcaagatcctgtctcaaaaaaaaaaaaaaaaaatagaagtagagagcaaattattttttattgttaccattatttagtaacaatatttaagcgctttataggtaaaaatccttaagttctggtattccctttgggaaccattataattaaggtttacagaacacccatcatattcttcccaaacattttttcattgcttgtaactttccaaagaattctccttttgggctttctggttttattttaagcccaaaggtgaattttttgggaagtttgagctaaattccttcaaccaaaatatacaagtgaagaaaaaaaatttgtatttaaacatttgcacatttacttctacctgaagcatgtgaatgtcaacacttcatatttcataagtagtgggttttcataaaaatagtattgtaaatataaatcatcttaaagttagtttttatttcttcttgaatatttagcagttaagtacagttactagtcttttgttgctgtgccatatacctggtttttccataacagtttaatgagttgaataattccacatggaattatgtttattttcctcaggaagtggtatataagatacatattttaatcctcaaatggaaggatgtagttcctaaacgtaaagtcctgttaatgcagttatctgctgattttataatactataatatttgtgtatactttgaaaagccttaaaaaaagtttaaattctattttgatatagtaagcagggttttaattacacatgatagaattttaaagagacaaaattaaaatgtttaagtagaatgttttcatggttgatccagaagtcttctgttgaataagcagtaagtattcttccttataaaattttcatagttgttataaatcctgtttatttttggagctatctgataactaaataatcttccttatttcttcttttaatgaaatgtttgatttgtttctcaatcaatgaagatccagctccaggtcccacaggggctcttcttccccacgaaaaagatcttattcaagttcatcatcttctcctgagaggaacagaaagagaagtcgttctagatcttcttcatctggtgatcgcaaaaaaagacgaacaagatcacggtcacccgaaagttgggtttctgtagaaataagaatgggtgttcttaagtgtgtttaatagataaagtaaactttcctagtcaagggttagatttttattatctcttgtgttccgactttctacttttcaactttgaacttcaaaaaaacattactttgcttatcctttgtactttgatcaggttgtttagaattgtagatcaaaccattctttgatcattttattgtttaaatttttagttccatttataatttttatagccaactctcggttatttctgtcttttgagattgcaattcagaagctgtatgtcgaagtaatttatgagttgacttttatacttaggcttctttaaatactaatagtcaagaattctagagcatctaataaaaaattaactttcagatcattgggaatctgtcctcatttaaatatgtgtaaatgcatttccacagcaaattgcttcatgccctttgtctataaggaaattattccttgtagctaatacatttttcattttgcagtccaaatcttttttgagaaaggcctatattaggttactttatctgtactgacacttttaatattggaagaatgcaactgtcatctgtcagccttttctgcaacaggctaattactcagtttcattaattttctctttgttcccaattatatagtcattttaatggctttatttgtagtctttgcaaatttttcatattttattagcttgtgaaaataaagattatgtaaagtctattaattgctgggttcagtggtaggattatctcatgattcctacttgtacagaatgattagttttgcttcttcacattttggagtttagatgttaagatttcacacagtcttgtttctctgcatttgtttctttgtaaaaaaaattactctgtttttgagtggaattcattctgttgctttcttaccacttctgcaaatttttatcttagccacatataatccccctagtttgttgtcatctaaacttaatgaacatgttctctattccataagccaggtgattggtgaaaacactaaacaaccctgagcccagggccaacccctacggaacaccactactttacccaggttgatattgacttattcatactagctgcatgaatataaccctatagcaaattgtacaatcatcttgtgtgacctagatttccaaaacttatttatgagtatattttctcatacacagaagccttgctgtatcttttttacataatagacttcttacactttctacaccgtgtcacagggattggtttagtcacacttccattaccaagtttatatgcttttgttgtacattttctgtaattttacacatttttgcaaggcttttctttgatatcttaaataattgagaggtggctatattttgaaatgagattcttttgaaattgtagagaattttttattgtatttatatgataactgggctcatatccaaagtctaaacatcagataattttatgtgtgtaagttcctatctcaatttttaatttttttgctagcatcatggtactgaattttgtatactttcacagtcttaagaatgaatgctgagatttagctctagcttactagaatgcctactctctccattatgtcttacagacgccacaggtcatcatctggatcatcccattctggttcccgttcaagttcaaaaaagaaataatgtattaaaatttacatcttaaaaaaatccagtacagtgcatgaagcatatttttaaagaagttggtgtcttacttggtcagaagtgctaaatctgctagtagaggtgcatgcctttcattgcttttcaaaacaatacagctgtgtttatttgtgaagttaaaagtaaatagcattttaagccataatgtcccaaaatagatgttctgtcattcattatttacaaccatttgcttcatttaaaaccatttcagctataacaaagtactttgcttcctaatttaaacccatttttgtcatttccaaatacatcctgtccattggctaagacaggattacctaggcttgcctgaactttgggcatggaagaaagactggaaactagttggaaacaacatacttatggaaaagaaagtcagcctttttatgctgttaacagatgtcagagtgattctcaccaaaaaaagttaaactatgttgtaagcagccaactgtaaatgtctattttgaaattccctatgctaagggtgccttagaatcattgtgtctcttttatccagctttacttttttgctccacatttaatgcaaaagaatcttgtgatgtctacaaggagagaagtgggatatattttcctttctgacacataatttggggcaaaaaagaaagtcttaagagtttatcttttctctgctgatacggttgcttgataaagacatctcaaaatgtttaccaatgttttaagaagctttgtgtgatattcttccaaatgtagttaccaaatataatatggtagaaaaggctaaatcatacttaatgagcaaattgaagtaagcttttaaagtatatttctcttttggtgaaaggccaatggagacattgtgaatttaagtgaacatttgcctcaagatgttaactataaacacactgcatacaattttcttctgaataacaaatgaatgcttattgctgcatgatgtaagcaaaagtcattatttttcctattcatttgaaataagttatggcttaaaatgcttttggagtttatttctcaaaattaaaatctggtcacatgagctttagtttgttttctggtttaaaaaataaaaaggtttctcttaacagtatttccagtgacaatgcaaggtaagtatatcaaaggaaatcaacagttgtgcttgggggctttttgttatgggatattgatttcttgttttttttccgtaacattgtctgctgcaatttaaataaaaattacgacattttaagatatttcatagacaaaccaaacaaaaatatatgtttttactttaaagtgaatgtttttctcttcagctgatctaaaaatgaaagcaagatatcttatgtagaaatattttgataatatttttacagtgagctttcccatgtttttatgtcttaagtttctttgctgcgtttatgtaggttgcacaagaacttttactcacttgtaattgtgcctcagactttttgaaagtctaccttctaaattgccccgacgatctagattctacatgttaccattggtttattcttgtgctttctgtatttaaaactttggctgtactaagcaaatgcaaggttataatttagctaatagtagtttacagacaattctgatgattatgatttcatttggtttaactaagctgtactagttcatttcataaggaaatgatactgtagacaaatgtaaataaagcctgtgagtcaagcatcaagtggtgtttgttagaaataaactagagatttttaaactctga

SEQ ID NO: 438350 - DNA, 7419 bp, Homo sapiens
tccgaggcttctagtgccacgaaggcctcctgcctgggttgtccttatggcgcctgtgagtttagttctagaaaagatatttgtattttaacttttccatctaacaaacagtagcacaggcatcttagtctggacaacaacgtacaagctgaattcctggctagttccctcattatcaaaccctgacacagtagtaggcgcgagtcaggcagtgtggggacagccccgagttgccgaaagtccccggcccgttttcctcctgtgaagacatagctgcgggtggctgtgctggtggcgttcaagatgtcgaccaagaatttccgagtcagtgacggggactggatttgccctgacaaaaaatgtggaaatgtaaactttgctagaagaaccagctgtaatcgatgtggtcgggagaaaacaactgaggccaagatgatgaaagctgggggcactgaaataggaaagacacttgcagaaaagagccgaggcctatttagtgctaatgactggcaatgtaaaacttgcagcaatgtgaattgggccagaagatcagagtgtaatatgtgtaatactccaaagtatgctaaattagaagaaagaacaggatatggtggtggttttaatgaaagagaaaatgttgaatatatagaaagagaagaatctgatggtgaatatgatgagtttggacgtaaaaagaaaaaatacagagggaaagcagttggtcctgcatctatattaaaggaagttgaagataaagaatcagagggagaagaagaggatgaggatgaagatctttctaaatataagttagatgaggatgaggatgaagatgacgctgatctctcaaaatataatcttgatgccagtgaagaagaagatagtaataaaaagaaatctaatagacgaagtcgctcaaagtctcgatcttcacattcacgatcttcatcacgctcatcctccccctcaagttcaaggtctaggtccaggtcccgttcaagaagttcttccagttcgcagtcaagatctcgttccagttccagagaacgttcgagatctcgtgggtcgaaatcaaggtgaatgaggtagcatctctctgtaaagcagagagaaaaatatttaaaggctgcagaaggtgttgctgctttttttccccttattttgcttctacttgtcgattttattttagcattagaaaactaatgcacttgcctcagcttaattttctcaccatgaaatgtttccattgccagcagtgtgccaagacattcccatgattgaaatcaggtggctattttgcaatatgcagcgtttattattttggcactaagatgttatgaagtaggaagatgaagccaagtcttatcgccacatctctagtatattaagattatatatggccaggcacagtgattcatgcctataatcccagcactttgggaagctgaggtgggaggatcacttgaggccaggagttcaaggttgtagtgaaccttgatcacagcactgtaatccagcctgggtgacagaggagtgtctcaaaaaaaaaaaaaaaaattaatagtagttcaaataaaattacatatgtaaataaaaagaaaaattttcttcattattaaaaggaagaaaaataaccctgcctcaaaacaggtcctgttttgcacggcagttgtttcaatattttcagaaacaaatttgccatttatatcagataaagttactagagtactgtatatacattttcctttctaattttacacacgctattatttatagagcacaaaacactcaaaactaaatcaggaagtatagtcggttagttgagataggatgtggtcttaagtagtaaacagtgttctaaagtttcaggttgcatgtagtcacatctgtagagggaaacataatttgaaagatgctcttgcaggaaatttttctttgtttagtcaaaatatgctctctttgtttttaagttaatttattatgacctaaaggcatctaaaaaataaataagaaaatgaaattccatatttgtggaaattcatattgaagtctaactgtggctgttttggtaaaagtatttgctgctttgaatcaaatttagcattaaagggctgccacagtataatcatgttaaggagaaaagaatgttgtgcacacttgcattataagccaataagaaatagataacaaggccaggctcagtggctcacgcctgtaatcccaataccttgggaggccaaggtgggcgggctgcttgagcccaggagttcaagaccagcctgggcaatatagtgagacctcgtctactaaaaataaaaattaaaacaaccagccaggcatggtggtgtgttcttataggctgaggtggaaggatcactggagccctggagattaagggtgcagtgagccatgcttatgctactgcaccacagcctggggaacagagcaagatcctgtctcaaaaaaaaaaaaaaaaaatagaagtagagagcaaattattttttattgttaccattatttagtaacaatatttaagcgctttataggtaaaaatccttaagttctggtattccctttgggaaccattataattaaggtttacagaacacccatcatattcttcccaaacattttttcattgcttgtaactttccaaagaattctccttttgggctttctggttttattttaagcccaaaggtgaattttttgggaagtttgagctaaattccttcaaccaaaatatacaagtgaagaaaaaaaatttgtatttaaacatttgcacatttacttctacctgaagcatgtgaatgtcaacacttcatatttcataagtagtgggttttcataaaaatagtattgtaaatataaatcatcttaaagttagtttttatttcttcttgaatatttagcagttaagtacagttactagtcttttgttgctgtgccatatacctggtttttccataacagtttaatgagttgaataattccacatggaattatgtttattttcctcaggaagtggtatataagatacatattttaatcctcaaatggaaggatgtagttcctaaacgtaaagtcctgttaatgcagttatctgctgattttataatactataatatttgtgtatactttgaaaagccttaaaaaaagtttaaattctattttgatatagtaagcagggttttaattacacatgatagaattttaaagagacaaaattaaaatgtttaagtagaatgttttcatggttgatccagaagtcttctgttgaataagcagtaagtattcttccttataaaattttcatagttgttataaatcctgtttatttttggagctatctgataactaaataatcttccttatttcttcttttaatgaaatgtttgatttgtttctcaatcaatgaagatccagctccaggtcccacaggggctcttcttccccacgaaaaagatcttattcaagttcatcatcttctcctgagaggaacagaaagagaagtcgttctagatcttcttcatctggtgatcgcaaaaaaagacgaacaagatcacggtcacccgaaagttgggtttctgtagaaataagaatgggtgttcttaagtgtgtttaatagataaagtaaactttcctagtcaagggttagatttttattatctcttgtgttccgactttctacttttcaactttgaacttcaaaaaaacattactttgcttatcctttgtactttgatcaggttgtttagaattgtagatcaaaccattctttgatcattttattgtttaaatttttagttccatttataatttttatagccaactctcggttatttctgtcttttgagattgcaattcagaagctgtatgtcgaagtaatttatgagttgacttttatacttaggcttctttaaatactaatagtcaagaattctagagcatctaataaaaaattaactttcagatcattgggaatctgtcctcatttaaatatgtgtaaatgcatttccacagcaaattgcttcatgccctttgtctataaggaaattattccttgtagctaatacatttttcattttgcagtccaaatcttttttgagaaaggcctatattaggttactttatctgtactgacacttttaatattggaagaatgcaactgtcatctgtcagccttttctgcaacaggctaattactcagtttcattaattttctctttgttcccaattatatagtcattttaatggctttatttgtagtctttgcaaatttttcatattttattagcttgtgaaaataaagattatgtaaagtctattaattgctgggttcagtggtaggattatctcatgattcctacttgtacagaatgattagttttgcttcttcacattttggagtttagatgttaagatttcacacagtcttgtttctctgcatttgtttctttgtaaaaaaaattactctgtttttgagtggaattcattctgttgctttcttaccacttctgcaaatttttatcttagccacatataatccccctagtttgttgtcatctaaacttaatgaacatgttctctattccataagccaggtgattggtgaaaacactaaacaaccctgagcccagggccaacccctacggaacaccactactttacccaggttgatattgacttattcatactagctgcatgaatataaccctatagcaaattgtacaatcatcttgtgtgacctagatttccaaaacttatttatgagtatattttctcatacacagaagccttgctgtatcttttttacataatagacttcttacactttctacaccgtgtcacagggattggtttagtcacacttccattaccaagtttatatgcttttgttgtacattttctgtaattttacacatttttgcaaggcttttctttgatatcttaaataattgagaggtggctatattttgaaatgagattcttttgaaattgtagagaattttttattgtatttatatgataactgggctcatatccaaagtctaaacatcagataattttatgtgtgtaagttcctatctcaatttttaatttttttgctagcatcatggtactgaattttgtatactttcacagtcttaagaatgaatgctgagatttagctctagcttactagaatgcctactctctccattatgtcttacagacgccacaggtcatcatctggatcatcccattctggttcccgttcaagttcaaaaaagaaataatgtattaaaatttacatcttaaaaaaatccagtacagtgcatgaagcatatttttaaagaagttggtgtcttacttggtcagaagtgctaaatctgctagtagaggtgcatgcctttcattgcttttcaaaacaatacagctgtgtttatttgtgaagttaaaagtaaatagcattttaagccataatgtcccaaaatagatgttctgtcattcattatttacaaccatttgcttcatttaaaaccatttcagctataacaaagtactttgcttcctaatttaaacccatttttgtcatttccaaatacatcctgtccattggctaagacaggattacctaggcttgcctgaactttgggcatggaagaaagactggaaactagttggaaacaacatacttatggaaaagaaagtcagcctttttatgctgttaacagatgtcagagtgattctcaccaaaaaaagttaaactatgttgtaagcagccaactgtaaatgtctattttgaaattccctatgctaagggtgccttagaatcattgtgtctcttttatccagctttacttttttgctccacatttaatgcaaaagaatcttgtgatgtctacaaggagagaagtgggatatattttcctttctgacacataatttggggcaaaaaagaaagtcttaagagtttatcttttctctgctgatacggttgcttgataaagacatctcaaaatgtttaccaatgttttaagaagctttgtgtgatattcttccaaatgtagttaccaaatataatatggtagaaaaggctaaatcatacttaatgagcaaattgaagtaagcttttaaagtatatttctcttttggtgaaaggccaatggagacattgtgaatttaagtgaacatttgcctcaagatgttaactataaacacactgcatacaattttcttctgaataacaaatgaatgcttattgctgcatgatgtaagcaaaagtcattatttttcctattcatttgaaataagttatggcttaaaatgcttttggagtttatttctcaaaattaaaatctggtcacatgagctttagtttgttttctggtttaaaaaataaaaaggtttctcttaacagtatttccagtgacaatgcaaggtaagtatatcaaaggaaatcaacagttgtgcttgggggctttttgttatgggatattgatttcttgttttttttccgtaacattgtctgctgcaatttaaataaaaattacgacattttaagatatttcatagacaaaccaaacaaaaatatatgtttttactttaaagtgaatgtttttctcttcagctgatctaaaaatgaaagcaagatatcttatgtagaaatattttgataatatttttacagtgagctttcccatgtttttatgtcttaagtttctttgctgcgtttatgtaggttgcacaagaacttttactcacttgtaattgtgcctcagactttttgaaagtctaccttctaaattgccccgacgatctagattctacatgttaccattggtttattcttgtgctttctgtatttaaaactttggctgtactaagcaaatgcaaggttataatttagctaatagtagtttacagacaattctgatgattatgatttcatttggtttaactaagctgtactagttcatttcataaggaaatgatactgtagacaaatgtaaataaagcctgtgagtcaagcatcaagtggtgtttgttagaaataaactagagatttttaaactctgaaaaaaaaaaaaaaaaaaaaaacaaacaaaacaaaaaacatgtgtgtggggcgcgcccttgggccctctagaaaaaagtttttctaaaacccattctcgttttggggcgcggcgcggggccccccatagttgggtatacacttcgacactgtcggtccataacgcgtgtcccctaagagaacaacccggggctcataaagatcgtcgcttgtggttttcctacccacattaaaaaaacgcccggggggaaagccaggacaggtgtctgaaacaactcccagaaggaactcaagggggccataaccgggactctacaataggggttctcaaagcgaaccttgaatatcaatttccgcccgt

SEQ ID NO: 438351 - DNA, 6805 bp, Homo sapiens
tccgaggcttctagtgccacgaaggcctcctgcctgggttgtccttatggcgcctgtgagtttagttctagaaaagatatttgtattttaacttttccatctaacaaacagtagcacaggcatcttagtctggacaacaacgtacaagctgaattcctggctagttccctcattatcaaaccctgacacagtagtaggcgcgagtcaggcagtgtggggacagccccgagttgccgaaagtccccggcccgttttcctcctgtgaagacatagctgcgggtggctgtgctggtggcgttcaagatgtcgaccaagaatttccgagtcagtgacggggactggatttgccctgacaaaaaatgtggaaatgtaaactttgctagaagaaccagctgtaatcgatgtggtcgggagaaaacaactgaggccaagatgatgaaagctgggggcactgaaataggaaagacacttgcagaaaagagccgaggcctatttagtgctaatgactggcaatgtaaaacttgcagcaatgtgaattgggccagaagatcagagtgtaatatgtgtaatactccaaagtatgctaaattagaagaaagaacaggatatggtggtggttttaatgaaagagaaaatgttgaatatatagaaagagaagaatctgatggtgaatatgatgagtttggacgtaaaaagaaaaaatacagagggaaagcagttggtcctgcatctatattaaaggaagttgaagataaagaatcagagggagaagaagaggatgaggatgaagatctttctaaatataagttagatgaggatgaggatgaagatgacgctgatctctcaaaatataatcttgatgccagtgaagaagaagatagtaataaaaagaaatctaatagacgaagtcgctcaaagtctcgatcttcacattcacgatcttcatcacgctcatcctccccctcaagttcaaggtctaggtccaggtcccgttcaagaagttcttccagttcgcagtcaagatctcgttccagttccagagaacgttcgagatctcgtgggtcgaaatcaaggtgaatgaggtagcatctctctgtaaagcagagagaaaaatatttaaaggctgcagaaggtgttgctgctttttttccccttattttgcttctacttgtcgattttattttagcattagaaaactaatgcacttgcctcagcttaattttctcaccatgaaatgtttccattgccagcagtgtgccaagacattcccatgattgaaatcaggtggctattttgcaatatgcagcgtttattattttggcactaagatgttatgaagtaggaagatgaagccaagtcttatcgccacatctctagtatattaagattatatatggccaggcacagtgattcatgcctataatcccagcactttgggaagctgaggtgggaggatcacttgaggccaggagttcaaggttgtagtgaaccttgatcacagcactgtaatccagcctgggtgacagaggagtgtctcaaaaaaaaaaaaaaaaattaatagtagttcaaataaaattacatatgtaaataaaaagaaaaattttcttcattattaaaaggaagaaaaataaccctgcctcaaaacaggtcctgttttgcacggcagttgtttcaatattttcagaaacaaatttgccatttatatcagataaagttactagagtactgtatatacattttcctttctaattttacacacgctattatttatagagcacaaaacactcaaaactaaatcaggaagtatagtcggttagttgagataggatgtggtcttaagtagtaaacagtgttctaaagtttcaggttgcatgtagtcacatctgtagagggaaacataatttgaaagatgctcttgcaggaaatttttctttgtttagtcaaaatatgctctctttgtttttaagttaatttattatgacctaaaggcatctaaaaaataaataagaaaatgaaattccatatttgtggaaattcatattgaagtctaactgtggctgttttggtaaaagtatttgctgctttgaatcaaatttagcattaaagggctgccacagtataatcatgttaaggagaaaagaatgttgtgcacacttgcattataagccaataagaaatagataacaaggccaggctcagtggctcacgcctgtaatcccaataccttgggaggccaaggtgggcgggctgcttgagcccaggagttcaagaccagcctgggcaatatagtgagacctcgtctactaaaaataaaaattaaaacaaccagccaggcatggtggtgtgttcttataggctgaggtggaaggatcactggagccctggagattaagggtgcagtgagccatgcttatgctactgcaccacagcctggggaacagagcaagatcctgtctcaaaaaaaaaaaaaaaaaatagaagtagagagcaaattattttttattgttaccattatttagtaacaatatttaagcgctttataggtaaaaatccttaagttctggtattccctttgggaaccattataattaaggtttacagaacacccatcatattcttcccaaacattttttcattgcttgtaactttccaaagaattctccttttgggctttctggttttattttaagcccaaaggtgaattttttgggaagtttgagctaaattccttcaaccaaaatatacaagtgaagaaaaaaaatttgtatttaaacatttgcacatttacttctacctgaagcatgtgaatgtcaacacttcatatttcataagtagtgggttttcataaaaatagtattgtaaatataaatcatcttaaagttagtttttatttcttcttgaatatttagcagttaagtacagttactagtcttttgttgctgtgccatatacctggtttttccataacagtttaatgagttgaataattccacatggaattatgtttattttcctcaggaagtggtatataagatacatattttaatcctcaaatggaaggatgtagttcctaaacgtaaagtcctgttaatgcagttatctgctgattttataatactataatatttgtgtatactttgaaaagccttaaaaaaagtttaaattctattttgatatagtaagcagggttttaattacacatgatagaattttaaagagacaaaattaaaatgtttaagtagaatgttttcatggttgatccagaagtcttctgttgaataagcagtaagtattcttccttataaaattttcatagttgttataaatcctgtttatttttggagctatctgataactaaataatcttccttatttcttcttttaatgaaatgtttgatttgtttctcaatcaatgaagatccagctccaggtcccacaggggctcttcttccccacgaaaaagatcttattcaagttcatcatcttctcctgagaggaacagaaagagaagtcgttctagatcttcttcatctggtgatcgcaaaaaaagacgaacaagatcacggtcacccgaaagttgggtttctgtagaaataagaatgggtgttcttaagtgtgtttaatagataaagtaaactttcctagtcaagggttagatttttattatctcttgtgttccgactttctacttttcaactttgaacttcaaaaaaacattactttgcttatcctttgtactttgatcaggttgtttagaattgtagatcaaaccattctttgatcattttattgtttaaatttttagttccatttataatttttatagccaactctcggttatttctgtcttttgagattgcaattcagaagctgtatgtcgaagtaatttatgagttgacttttatacttaggcttctttaaatactaatagtcaagaattctagagcatctaataaaaaattaactttcagatcattgggaatctgtcctcatttaaatatgtgtaaatgcatttccacagcaaattgcttcatgccctttgtctataaggaaattattccttgtagctaatacatttttcattttgcagtccaaatcttttttgagaaaggcctatattaggttactttatctgtactgacacttttaatattggaagaatgcaactgtcatctgtcagccttttctgcaacaggctaattactcagtttcattaattttctctttgttcccaattatatagtcattttaatggctttatttgtagtctttgcaaatttttcatattttattagcttgtgaaaataaagattatgtaaagtctattaattgctgggttcagtggtaggattatctcatgattcctacttgtacagaatgattagttttgcttcttcacattttggagtttagatgttaagatttcacacagtcttgtttctctgcatttgtttctttgtaaaaaaaattactctgtttttgagtggaattcattctgttgctttcttaccacttctgcaaatttttatcttagccacatataatccccctagtttgttgtcatctaaacttaatgaacatgttctctattccataagccaggtgattggtgaaaacactaaacaaccctgagcccagggccaacccctacggaacaccactactttacccaggttgatattgacttattcatactagctgcatgaatataaccctatagcaaattgtacaatcatcttgtgtgacctagatttccaaaacttatttatgagtatattttctcatacacagaagccttgctgtatcttttttacataatagacttcttacactttctacaccgtgtcacagggattggtttagtcacacttccattaccaagtttatatgcttttgttgtacattttctgtaattttacacatttttgcaaggcttttctttgatatcttaaataattgagaggtggctatattttgaaatgagattcttttgaaattgtagagaattttttattgtatttatatgataactgggctcatatccaaagtctaaacatcagataattttatgtgtgtaagttcctatctcaatttttaatttttttgctagcatcatggtactgaattttgtatactttcacagtcttaagaatgaatgctgagatttagctctagcttactagaatgcctactctctccattatgtcttacagacgccacaggtcatcatctggatcatcccattctggttcccgttcaagttcaaaaaagaaataatgtattaaaatttacatcttaaaaaaatccagtacagtgcatgaagcatatttttaaagaagttggtgtcttacttggtcagaagtgctaaatctgctagtagaggtgcatgcctttcattgcttttcaaaacaatacagctgtgtttatttgtgaagttaaaagtaaatagcattttaagccataatgtcccaaaatagatgttctgtcattcattatttacaaccatttgcttcatttaaaaccatttcagctataacaaagtactttgcttcctaatttaaacccatttttgtcatttccaaatacatcctgtccattggctaagacaggattacctaggcttgcctgaactttgggcatggaagaaagactggaaactagttggaaacaacatacttatggaaaagaaatcttaagagtttatcttttctctgctgatacggttgcttgataaagacatctcaaaatgtttaccaatgttttaagaagctttgtgtgatattcttccaaatgtagttaccaaatataatatggtagaaaaggctaaatcatacttaatgagcaaattgaagtaagcttttaaagtatatttctcttttggtgaaaggccaatggagacattgtgaatttaagtgaacatttgcctcaagatgttaactataaacacactgcatacaattttcttctgaataacaaatgaatgcttattgctgcatgatgtaagcaaaagtcattatttttcctattcatttgaaataagttatggcttaaaatgcttttggagtttatttctcaaaattaaaatctggtcacatgagctttagtttgttttctggtttaaaaaataaaaaggtttctcttaacagtatttccagtgacaatgcaaggtaagtatatcaaaggaaatcaacagttgtgcttgggggctttttgttatgggatattgatttcttgttttttttccgtaacattgtctgctgcaatttaaataaaaattacgacattttaagatatttcatagacaaaccaaacaaaaatatatgtttttactttaaagtgaatgtttttctcttcagctgatctaaaaatgaaagcaagatatcttatgtagaaatattttgataatatttttacagtgagctttcccatgtttttatgtcttaagtttctttgctgcgtttatgtaggttgcacaagaacttttactcacttgtaattgtgcctcagactttttgaaagtctaccttctaaattgccccgacgatctagattctacatgttaccattggtttattcttgtgctttctgtatttaaaactttggctgtactaagcaaatgcaaggttataatttagctaatagtagtttacagacaattctgatgattatgatttcatttggtttaactaagctgtactagttcatttcataaggaaatgatactgtagacaaatgtaaataaagcctgtgagtcaagcatcaagtggtgtttgttagaaataaactagagatttttaaactctga

SEQ ID NO: 438352 - DNA, 7006 bp, Homo sapiens
tccgaggcttctagtgccacgaaggcctcctgcctgggttgtccttatggcgcctgtgagtttagttctagaaaagatatttgtattttaacttttccatctaacaaacagtagcacaggcatcttagtctggacaacaacgtacaagctgaattcctggctagttccctcattatcaaaccctgacacagtagtaggcgcgagtcaggcagtgtggggacagccccgagttgccgaaagtccccggcccgttttcctcctgtgaagacatagctgcgggtggctgtgctggtggcgttcaagatgtcgaccaagaatttccgagtcagtgacggggactggatttgccctgacaaaaaatgtggaaatgtaaactttgctagaagaaccagctgtaatcgatgtggtcgggagaaaacaactgaggccaagatgatgaaagctgggggcactgaaataggaaagacacttgcagaaaagagccgaggcctatttagtgctaatgactggcaatgtaaaacttgcagcaatgtgaattgggccagaagatcagagtgtaatatgtgtaatactccaaagtatgctaaattagaagaaagaacaggatatggtggtggttttaatgaaagagaaaatgttgaatatatagaaagagaagaatctgatggtgaatatgatgagtttggacgtaaaaagaaaaaatacagagggaaagcagttggtcctgcatctatattaaaggaagttgaagataaagaatcagagggagaagaagaggatgaggatgaagatctttctaaatataagttagatgaggatgaggatgaagatgacgctgatctctcaaaatataatcttgatgccagtgaagaagaagatagtaataaaaagaaatctaatagacgaagtcgctcaaagtctcgatcttcacattcacgatcttcatcacgctcatcctccccctcaagttcaaggtctaggtccaggtcccgttcaagaagttcttccagttcgcagtcaagatctcgttccagttccagagaacgttcgagatctcgtgggtcgaaatcaaggtgaatgaggtagcatctctctgtaaagcagagagaaaaatatttaaaggctgcagaaggtgttgctgctttttttccccttattttgcttctacttgtcgattttattttagcattagaaaactaatgcacttgcctcagcttaattttctcaccatgaaatgtttccattgccagcagtgtgccaagacattcccatgattgaaatcaggtggctattttgcaatatgcagcgtttattattttggcactaagatgttatgaagtaggaagatgaagccaagtcttatcgccacatctctagtatattaagattatatatggccaggcacagtgattcatgcctataatcccagcactttgggaagctgaggtgggaggatcacttgaggccaggagttcaaggttgtagtgaaccttgatcacagcactgtaatccagcctgggtgacagaggagtgtctcaaaaaaaaaaaaaaaaattaatagtagttcaaataaaattacatatgtaaataaaaagaaaaattttcttcattattaaaaggaagaaaaataaccctgcctcaaaacaggtcctgttttgcacggcagttgtttcaatattttcagaaacaaatttgccatttatatcagataaagttactagagtactgtatatacattttcctttctaattttacacacgctattatttatagagcacaaaacactcaaaactaaatcaggaagtatagtcggttagttgagataggatgtggtcttaagtagtaaacagtgttctaaagtttcaggttgcatgtagtcacatctgtagagggaaacataatttgaaagatgctcttgcaggaaatttttctttgtttagtcaaaatatgctctctttgtttttaagttaatttattatgacctaaaggcatctaaaaaataaataagaaaatgaaattccatatttgtggaaattcatattgaagtctaactgtggctgttttggtaaaagtatttgctgctttgaatcaaatttagcattaaagggctgccacagtataatcatgttaaggagaaaagaatgttgtgcacacttgcattataagccaataagaaatagataacaaggccaggctcagtggctcacgcctgtaatcccaataccttgggaggccaaggtgggcgggctgcttgagcccaggagttcaagaccagcctgggcaatatagtgagacctcgtctactaaaaataaaaattaaaacaaccagccaggcatggtggtgtgttcttataggctgaggtggaaggatcactggagccctggagattaagggtgcagtgagccatgcttatgctactgcaccacagcctggggaacagagcaagatcctgtctcaaaaaaaaaaaaaaaaaatagaagtagagagcaaattattttttattgttaccattatttagtaacaatatttaagcgctttataggtaaaaatccttaagttctggtattccctttgggaaccattataattaaggtttacagaacacccatcatattcttcccaaacattttttcattgcttgtaactttccaaagaattctccttttgggctttctggttttattttaagcccaaaggtgaattttttgggaagtttgagctaaattccttcaaccaaaatatacaagtgaagaaaaaaaatttgtatttaaacatttgcacatttacttctacctgaagcatgtgaatgtcaacacttcatatttcataagtagtgggttttcataaaaatagtattgtaaatataaatcatcttaaagttagtttttatttcttcttgaatatttagcagttaagtacagttactagtcttttgttgctgtgccatatacctggtttttccataacagtttaatgagttgaataattccacatggaattatgtttattttcctcaggaagtggtatataagatacatattttaatcctcaaatggaaggatgtagttcctaaacgtaaagtcctgttaatgcagttatctgctgattttataatactataatatttgtgtatactttgaaaagccttaaaaaaagtttaaattctattttgatatagtaagcagggttttaattacacatgatagaattttaaagagacaaaattaaaatgtttaagtagaatgttttcatggttgatccagaagtcttctgttgaataagcagtaagtattcttccttataaaattttcatagttgttataaatcctgtttatttttggagctatctgataactaaataatcttccttatttcttcttttaatgaaatgtttgatttgtttctcaatcaatgaagatccagctccaggtcccacaggggctcttcttccccacgaaaaagatcttattcaagttcatcatcttctcctgagaggaacagaaagagaagtcgttctagatcttcttcatctggtgatcgcaaaaaaagacgaacaagatcacggtcacccgaaagttgggtttctgtagaaataagaatgggtgttcttaagtgtgtttaatagataaagtaaactttcctagtcaagggttagatttttattatctcttgtgttccgactttctacttttcaactttgaacttcaaaaaaacattactttgcttatcctttgtactttgatcaggttgtttagaattgtagatcaaaccattctttgatcattttattgtttaaatttttagttccatttataatttttatagccaactctcggttatttctgtcttttgagattgcaattcagaagctgtatgtcgaagtaatttatgagttgacttttatacttaggcttctttaaatactaatagtcaagaattctagagcatctaataaaaaattaactttcagatcattgggaatctgtcctcatttaaatatgtgtaaatgcatttccacagcaaattgcttcatgccctttgtctataaggaaattattccttgtagctaatacatttttcattttgcagtccaaatcttttttgagaaaggcctatattaggttactttatctgtactgacacttttaatattggaagaatgcaactgtcatctgtcagccttttctgcaacaggctaattactcagtttcattaattttctctttgttcccaattatatagtcattttaatggctttatttgtagtctttgcaaatttttcatattttattagcttgtgaaaataaagattatgtaaagtctattaattgctgggttcagtggtaggattatctcatgattcctacttgtacagaatgattagttttgcttcttcacattttggagtttagatgttaagatttcacacagtcttgtttctctgcatttgtttctttgtaaaaaaaattactctgtttttgagtggaattcattctgttgctttcttaccacttctgcaaatttttatcttagccacatataatccccctagtttgttgtcatctaaacttaatgaacatgttctctattccataagccaggtgattggtgaaaacactaaacaaccctgagcccagggccaacccctacggaacaccactactttacccaggttgatattgacttattcatactagctgcatgaatataaccctatagcaaattgtacaatcatcttgtgtgacctagatttccaaaacttatttatgagtatattttctcatacacagaagccttgctgtatcttttttacataatagacttcttacactttctacaccgtgtcacagggattggtttagtcacacttccattaccaagtttatatgcttttgttgtacattttctgtaattttacacatttttgcaaggcttttctttgatatcttaaataattgagaggtggctatattttgaaatgagattcttttgaaattgtagagaattttttattgtatttatatgataactgggctcatatccaaagtctaaacatcagataattttatgtgtgtaagttcctatctcaatttttaatttttttgctagcatcatggtactgaattttgtatactttcacagtcttaagaatgaatgctgagatttagctctagcttactagaatgcctactctctccattatgtcttacagacgccacaggtcatcatctggatcatcccattctggttcccgttcaagttcaaaaaagaaataatgtattaaaatttacatcttaaaaaaatccagtacagtgcatgaagcatatttttaaagaagttggtgtcttacttggtcagaagtgctaaatctgctagtagaggtgcatgcctttcattgcttttcaaaacaatacagctgtgtttatttgtgaagttaaaagtaaatagcattttaagccataatgtcccaaaatagatgttctgtcattcattatttacaaccatttgcttcatttaaaaccatttcagctataacaaagtactttgcttcctaatttaaacccatttttgtcatttccaaatacatcctgtccattggctaagacaggattacctaggcttgcctgaactttgggcatggaagaaagactggaaactagttggaaacaacatacttatggaaaagaaagtcagcctttttatgctgttaacagatgtcagagtgattctcaccaaaaaaagttaaactatgttgtaagcagccaactgtaaatgtctattttgaaattccctatgctaagggtgccttagaatcattgtgtctcttttatccagctttacttttttgctccacatttaatgcaaaagaatcttgtgatgtctacaaggagagaagtgggatatattttcctttctgacacataatttggggcaaaaaagaaagtcttaagagtttatcttttctctgctgatacggttgcttgataaagacatctcaaaatgtttaccaatgttttaagaagctttgtgtgatattcttccaaatgtagttaccaaatataatatggtagtctcttttggtgaaaggccaatggagacattgtgaatttaagtgaacatttgcctcaagatgttaactataaacacactgcatacaattttcttctgaataacaaatgaatgcttattgctgcatgatgtaagcaaaagtcattatttttcctattcatttgaaataagttatggcttaaaatgcttttggagtttatttctcaaaattaaaatctggtcacatgagctttagtttgttttctggtttaaaaaataaaaaggtttctcttaacagtatttccagtgacaatgcaaggtaagtatatcaaaggaaatcaacagttgtgcttgggggctttttgttatgggatattgatttcttgttttttttccgtaacattgtctgctgcaatttaaataaaaattacgacattttaagatatttcatagacaaaccaaacaaaaatatatgtttttactttaaagtgaatgtttttctcttcagctgatctaaaaatgaaagcaagatatcttatgtagaaatattttgataatatttttacagtgagctttcccatgtttttatgtcttaagtttctttgctgcgtttatgtaggttgcacaagaacttttactcacttgtaattgtgcctcagactttttgaaagtctaccttctaaattgccccgacgatctagattctacatgttaccattggtttattcttgtgctttctgtatttaaaactttggctgtactaagcaaatgcaaggttataatttagctaatagtagtttacagacaattctgatgattatgatttcatttggtttaactaagctgtactagttcatttcataaggaaatgatactgtagacaaatgtaaataaagcctgtgagtcaagcatcaagtggtgtttgttagaaataaactagagatttttaaactctga

SEQ ID NO: 438353 - DNA, 6193 bp, Homo sapiens
tccgaggcttctagtgccacgaaggcctcctgcctgggttgtccttatggcgcctgtgagtttagttctagaaaagatatttgtattttaacttttccatctaacaaacagtagcacaggcatcttagtctggacaacaacgtacaagctgaattcctggctagttccctcattatcaaaccctgacacagtagtaggcgcgagtcaggcagtgtggggacagccccgagttgccgaaagtccccggcccgttttcctcctgtgaagacatagctgcgggtggctgtgctggtggcgttcaagatgtcgaccaagaatttccgagtcagtgacggggactggatttgccctgacaaaaaatgtggaaatgtaaactttgctagaagaaccagctgtaatcgatgtggtcgggagaaaacaactgaggccaagatgatgaaagctgggggcactgaaataggaaagacacttgcagaaaagagccgaggcctatttagtgctaatgactggcaatgtaaaacttgcagcaatgtgaattgggccagaagatcagagtgtaatatgtgtaatactccaaagtatgctaaattagaagaaagaacaggatatggtggtggttttaatgaaagagaaaatgttgaatatatagaaagagaagaatctgatggtgaatatgatgagtttggacgtaaaaagaaaaaatacagagggaaagcagttggtcctgcatctatattaaaggaagttgaagataaagaatcagagggagaagaagaggatgaggatgaagatctttctaaatataagttagatgaggatgaggatgaagatgacgctgatctctcaaaatataatcttgatgccagtgaagaagaagatagtaataaaaagaaatctaatagacgaagtcgctcaaagtctcgatcttcacattcacgatcttcatcacgctcatcctccccctcaagttcaaggtctaggtccaggtcccgttcaagaagttcttccagttcgcagtcaagatctcgttccagttccagagaacgttcgagatctcgtgggtcgaaatcaaggtgaatgaggtagcatctctctgtaaagcagagagaaaaatatttaaaggctgcagaaggtgttgctgctttttttccccttattttgcttctacttgtcgattttattttagcattagaaaactaatgcacttgcctcagcttaattttctcaccatgaaatgtttccattgccagcagtgtgccaagacattcccatgattgaaatcaggtggctattttgcaatatgcagcgtttattattttggcactaagatgttatgaagtaggaagatgaagccaagtcttatcgccacatctctagtatattaagattatatatggccaggcacagtgattcatgcctataatcccagcactttgggaagctgaggtgggaggatcacttgaggccaggagttcaaggttgtagtgaaccttgatcacagcactgtaatccagcctgggtgacagaggagtgtctcaaaaaaaaaaaaaaaaattaatagtagttcaaataaaattacatatgtaaataaaaagaaaaattttcttcattattaaaaggaagaaaaataaccctgcctcaaaacaggtcctgttttgcacggcagttgtttcaatattttcagaaacaaatttgccatttatatcagataaagttactagagtactgtatatacattttcctttctaattttacacacgctattatttatagagcacaaaacactcaaaactaaatcaggaagtatagtcggttagttgagataggatgtggtcttaagtagtaaacagtgttctaaagtttcaggttgcatgtagtcacatctgtagagggaaacataatttgaaagatgctcttgcaggaaatttttctttgtttagtcaaaatatgctctctttgtttttaagttaatttattatgacctaaaggcatctaaaaaataaataagaaaatgaaattccatatttgtggaaattcatattgaagtctaactgtggctgttttggtaaaagtatttgctgctttgaatcaaatttagcattaaagggctgccacagtataatcatgttaaggagaaaagaatgttgtgcacacttgcattataagccaataagaaatagataacaaggccaggctcagtggctcacgcctgtaatcccaataccttgggaggccaaggtgggcgggctgcttgagcccaggagttcaagaccagcctgggcaatatagtgagacctcgtctactaaaaataaaaattaaaacaaccagccaggcatggtggtgtgttcttataggctgaggtggaaggatcactggagccctggagattaagggtgcagtgagccatgcttatgctactgcaccacagcctggggaacagagcaagatcctgtctcaaaaaaaaaaaaaaaaaatagaagtagagagcaaattattttttattgttaccattatttagtaacaatatttaagcgctttataggtaaaaatccttaagttctggtattccctttgggaaccattataattaaggtttacagaacacccatcatattcttcccaaacattttttcattgcttgtaactttccaaagaattctccttttgggctttctggttttattttaagcccaaaggtgaattttttgggaagtttgagctaaattccttcaaccaaaatatacaagtgaagaaaaaaaatttgtatttaaacatttgcacatttacttctacctgaagcatgtgaatgtcaacacttcatatttcataagtagtgggttttcataaaaatagtattgtaaatataaatcatcttaaagttagtttttatttcttcttgaatatttagcagttaagtacagttactagtcttttgttgctgtgccatatacctggtttttccataacagtttaatgagttgaataattccacatggaattatgtttattttcctcaggaagtggtatataagatacatattttaatcctcaaatggaaggatgtagttcctaaacgtaaagtcctgttaatgcagttatctgctgattttataatactataatatttgtgtatactttgaaaagccttaaaaaaagtttaaattctattttgatatagtaagcagggttttaattacacatgatagaattttaaagagacaaaattaaaatgtttaagtagaatgttttcatggttgatccagaagtcttctgttgaataagcagtaagtattcttccttataaaattttcatagttgttataaatcctgtttatttttggagctatctgataactaaataatcttccttatttcttcttttaatgaaatgtttgatttgtttctcaatcaatgaagatccagctccaggtcccacaggggctcttcttccccacgaaaaagatcttattcaagttcatcatcttctcctgagaggaacagaaagagaagtcgttctagatcttcttcatctggtgatcgcaaaaaaagacgaacaagatcacggtcacccgaaagttgggtttctgtagaaataagaatgggtgttcttaagtgtgtttaatagataaagtaaactttcctagtcaagggttagatttttattatctcttgtgttccgactttctacttttcaactttgaacttcaaaaaaacattactttgcttatcctttgtactttgatcaggttgtttagaattgtagatcaaaccattctttgatcattttattgtttaaatttttagttccatttataatttttatagccaactctcggttatttctgtcttttgagattgcaattcagaagctgtatgtcgaagtaatttatgagttgacttttatacttaggcttctttaaatactaatagtcaagaattctagagcatctaataaaaaattaactttcagatcattgggaatctgtcctcatttaaatatgtgtaaatgcatttccacagcaaattgcttcatgccctttgtctataaggaaattattccttgtagctaatacatttttcattttgcagtccaaatcttttttgagaaaggcctatattaggttactttatctgtactgacacttttaatattggaagaatgcaactgtcatctgtcagccttttctgcaacaggctaattactcagtttcattaattttctctttgttcccaattatatagtcattttaatggctttatttgtagtctttgcaaatttttcatattttattagcttgtgaaaataaagattatgtaaagtctattaattgctgggttcagtggtaggattatctcatgattcctacttgtacagaatgattagttttgcttcttcacattttggagtttagatgttaagatttcacacagtcttgtttctctgcatttgtttctttgtaaaaaaaattactctgtttttgagtggaattcattctgttgctttcttaccacttctgcaaatttttatcttagccacatataatccccctagtttgttgtcatctaaacttaatgaacatgttctctattccataagccaggtgattggtgaaaacactaaacaaccctgagcccagggccaacccctacggaacaccactactttacccaggttgatattgacttattcatactagctgcatgaatataaccctatagcaaattgtacaatcatcttgtgtgacctagatttccaaaacttatttatgagtatattttctcatacacagaagccttgctgtatcttttttacataatagacttcttacactttctacaccgtgtcacagggattggtttagtcacacttccattaccaagtttatatgcttttgttgtacattttctgtaattttacacatttttgcaaggcttttctttgatatcttaaataattgagaggtggctatattttgaaatgagattcttttgaaattgtagagaattttttattgtatttatatgataactgggctcatatccaaagtctaaacatcagataattttatgtgtgtaagttcctatctcaatttttaatttttttgctagcatcatggtactgaattttgtatactttcacagtcttaagaatgaatgctgagatttagctctagcttactagaatgcctactctctccattatgtcttacagacgccacaggtcatcatctggatcatcccattctggttcccgttcaagttcaaaaaagaaataatgtattaaaatttacatcttaaaaaaatccagtacagtgcatgaagcatatttttaaagaagttggtgtcttacttggtcagaagtgctaaatctgctagtagaggtgcatgcctttcattgcttttcaaaacaatacagctgtgtttatttgtgaagttaaaatgcttttggagtttatttctcaaaattaaaatctggtcacatgagctttagtttgttttctggtttaaaaaataaaaaggtttctcttaacagtatttccagtgacaatgcaaggtaagtatatcaaaggaaatcaacagttgtgcttgggggctttttgttatgggatattgatttcttgttttttttccgtaacattgtctgctgcaatttaaataaaaattacgacattttaagatatttcatagacaaaccaaacaaaaatatatgtttttactttaaagtgaatgtttttctcttcagctgatctaaaaatgaaagcaagatatcttatgtagaaatattttgataatatttttacagtgagctttcccatgtttttatgtcttaagtttctttgctgcgtttatgtaggttgcacaagaacttttactcacttgtaattgtgcctcagactttttgaaagtctaccttctaaattgccccgacgatctagattctacatgttaccattggtttattcttgtgctttctgtatttaaaactttggctgtactaagcaaatgcaaggttataatttagctaatagtagtttacagacaattctgatgattatgatttcatttggtttaactaagctgtactagttcatttcataaggaaatgatactgtagacaaatgtaaataaagcctgtgagtcaagcatcaagtggtgtttgttagaaataaactagagatttttaaactctga

SEQ ID NO: 438354 - DNA, 2791 bp, Homo sapiens
gcctgaaagcttaacaaagtggggctataactagtaattttttggtaaaaatatagtgatctttttctacagggtattattataagggacaaattatagttgtaaattagattaatgaattttgtgagttttaaaatttgtacgaaccatgtctcccttgtgtcatattttccaataatataattacctaacaatgacagaattatacattttccctttaattctctaagcattgagtaaacagaaaaatatagggatgaaatacacacatgccaacattcaaaactttgtactaactagaaacaaaaatagaaggggatttataaaggaaaatgatggagacattttagagaaattaagtataaatcgcaacattctgttttcttggatgtattctgggtagcttctagttacttgtaaacaaagtattcattgtttttgtaataaagtgataatgttttgttttatagttgagtggctttagggtaatttaatcacctggaaagtgatatttttttaattaccttttgttactaaatcttatctaatttaaaatactatgttttgaaagtatatatcttgtatagttatctttttatatgaaaatgaactctaatacatatctttctttcagtgttcatatcacaaagctcaattaaatggtcctggaaaaaaaaaatcgttccatgttgttccaggtcccgttcaagaagttcttccagttcgcagtcaagatctcgttccagttccagagaacgttcgagatctcgtgggtcgaaatcaagatccagctccaggtcccacaggggctcttcttccccacgaaaaagatcttattcaagttcatcatcttctcctgagaggaacagaaagagaagtcgttctagatcttcttcatctggtgatcgcaaaaaaagacgaacaagatcacggtcacccgaaagacgccacaggtcatcatctggatcatcccattctggttcccgttcaagttcaaaaaagaaataatgtattaaaatttacatcttaaaaaaatccagtacagtgcatgaagcatatttttaaagaagttggtgtcttacttggtcagaagtgctaaatctgctagtagaggtgcatgcctttcattgcttttcaaaacaatacagctgtgtttatttgtgaagttaaaagtaaatagcattttaagccataatgtcccaaaatagatgttctgtcattcattatttacaaccatttgcttcatttaaaaccatttcagctataacaaagtactttgcttcctaatttaaacccatttttgtcatttccaaatacatcctgtccattggctaagacaggattacctaggcttgcctgaactttgggcatggaagaaagactggaaactagttggaaacaacatacttatggaaaagaaagtcagcctttttatgctgttaacagatgtcagagtgattctcaccaaaaaaagttaaactatgttgtaagcagccaactgtaaatgtctattttgaaattccctatgctaagggtgccttagaatcattgtgtctcttttatccagctttacttttttgctccacatttaatgcaaaagaatcttgtgatgtctacaaggagagaagtgggatatattttcctttctgacacataatttggggcaaaaaagaaagtcttaagagtttatcttttctctgctgatacggttgcttgataaagacatctcaaaatgtttaccaatgttttaagaagctttgtgtgatattcttccaaatgtagttaccaaatataatatggtagaaaaggctaaatcatacttaatgagcaaattgaagtaagcttttaaagtatatttctcttttggtgaaaggccaatggagacattgtgaatttaagtgaacatttgcctcaagatgttaactataaacacactgcatacaattttcttctgaataacaaatgaatgcttattgctgcatgatgtaagcaaaagtcattatttttcctattcatttgaaataagttatggcttaaaatgcttttggagtttatttctcaaaattaaaatctggtcacatgagctttagtttgttttctggtttaaaaaataaaaaggtttctcttaacagtatttccagtgacaatgcaaggtaagtatatcaaaggaaatcaacagttgtgcttgggggctttttgttatgggatattgatttcttgttttttttccgtaacattgtctgctgcaatttaaataaaaattacgacattttaagatatttcatagacaaaccaaacaaaaatatatgtttttactttaaagtgaatgtttttctcttcagctgatctaaaaatgaaagcaagatatcttatgtagaaatattttgataatatttttacagtgagctttcccatgtttttatgtcttaagtttctttgctgcgtttatgtaggttgcacaagaacttttactcacttgtaattgtgcctcagactttttgaaagtctaccttctaaattgccccgacgatctagattctacatgttaccattggtttattcttgtgctttctgtatttaaaactttggctgtactaagcaaatgcaaggttataatttagctaatagtagtttacagacaattctgatgattatgatttcatttggtttaactaagctgtactagttcatttcataaggaaatgatactgtagacaaatgtaaataaagcctgtgagtcaagcatcaagtggtgtttgttagaaataaactagagatttttaaactctga

SEQ ID NO: 438355 - DNA, 2866 bp, Homo sapiens
gcctgaaagcttaacaaagtggggctataactagtaattttttggtaaaaatatagtgatctttttctacagggtattattataagggacaaattatagttgtaaattagattaatgaattttgtgagttttaaaatttgtacgaaccatgtctcccttgtgtcatattttccaataatataattacctaacaatgacagaattatacattttccctttaattctctaagcattgagtaaacagaaaaatatagggatgaaatacacacatgccaacattcaaaactttgtactaactagaaacaaaaatagaaggggatttataaaggaaaatgatggagacattttagagaaattaagtataaatcgcaacattctgttttcttggatgtattctgggtagcttctagttacttgtaaacaaagtattcattgtttttgtaataaagtgataatgttttgttttatagttgagtggctttagggtaatttaatcacctggaaagtgatatttttttaattaccttttgttactaaatcttatctaatttaaaatactatgttttgaaagtatatatcttgtatagttatctttttatatgaaaatgaactctaatacatatctttctttcagtgttcatatcacaaagctcaattaaatggtcctggaaaaaaaaaatcgttccatgttgttccaggtcccgttcaagaagttcttccagttcgcagtcaagatctcgttccagttccagagaacgttcgagatctcgtgggtcgaaatcaagatccagctccaggtcccacaggggctcttcttccccacgaaaaagatcttattcaagttcatcatcttctcctgagaggaacagaaagagaagtcgttctagatcttcttcatctggtgatcgcaaaaaaagacgaacaagatcacggtcacccgaaagccaggtgattggtgaaaacactaaacaaccctgagcccagggccaacccctacggaacaccactactttacccagacgccacaggtcatcatctggatcatcccattctggttcccgttcaagttcaaaaaagaaataatgtattaaaatttacatcttaaaaaaatccagtacagtgcatgaagcatatttttaaagaagttggtgtcttacttggtcagaagtgctaaatctgctagtagaggtgcatgcctttcattgcttttcaaaacaatacagctgtgtttatttgtgaagttaaaagtaaatagcattttaagccataatgtcccaaaatagatgttctgtcattcattatttacaaccatttgcttcatttaaaaccatttcagctataacaaagtactttgcttcctaatttaaacccatttttgtcatttccaaatacatcctgtccattggctaagacaggattacctaggcttgcctgaactttgggcatggaagaaagactggaaactagttggaaacaacatacttatggaaaagaaagtcagcctttttatgctgttaacagatgtcagagtgattctcaccaaaaaaagttaaactatgttgtaagcagccaactgtaaatgtctattttgaaattccctatgctaagggtgccttagaatcattgtgtctcttttatccagctttacttttttgctccacatttaatgcaaaagaatcttgtgatgtctacaaggagagaagtgggatatattttcctttctgacacataatttggggcaaaaaagaaagtcttaagagtttatcttttctctgctgatacggttgcttgataaagacatctcaaaatgtttaccaatgttttaagaagctttgtgtgatattcttccaaatgtagttaccaaatataatatggtagaaaaggctaaatcatacttaatgagcaaattgaagtaagcttttaaagtatatttctcttttggtgaaaggccaatggagacattgtgaatttaagtgaacatttgcctcaagatgttaactataaacacactgcatacaattttcttctgaataacaaatgaatgcttattgctgcatgatgtaagcaaaagtcattatttttcctattcatttgaaataagttatggcttaaaatgcttttggagtttatttctcaaaattaaaatctggtcacatgagctttagtttgttttctggtttaaaaaataaaaaggtttctcttaacagtatttccagtgacaatgcaaggtaagtatatcaaaggaaatcaacagttgtgcttgggggctttttgttatgggatattgatttcttgttttttttccgtaacattgtctgctgcaatttaaataaaaattacgacattttaagatatttcatagacaaaccaaacaaaaatatatgtttttactttaaagtgaatgtttttctcttcagctgatctaaaaatgaaagcaagatatcttatgtagaaatattttgataatatttttacagtgagctttcccatgtttttatgtcttaagtttctttgctgcgtttatgtaggttgcacaagaacttttactcacttgtaattgtgcctcagactttttgaaagtctaccttctaaattgccccgacgatctagattctacatgttaccattggtttattcttgtgctttctgtatttaaaactttggctgtactaagcaaatgcaaggttataatttagctaatagtagtttacagacaattctgatgattatgatttcatttggtttaactaagctgtactagttcatttcataaggaaatgatactgtagacaaatgtaaataaagcctgtgagtcaagcatcaagtggtgtttgttagaaataaactagagatttttaaactctga

SEQ ID NO: 438356 - DNA, 2305 bp, Homo sapiens
gccagaaggtttaaaaataatattttttataacaaaaacccctacggggttttttttacataatagacttcttacactttctacaccgtgtcacagggattggtttagtcacacttccattaccaagtttatatgcttttgttgtacattttctgtaattttacacatttttgcaaggcttttctttgatatcttaaataattgagaggtggctatattttgaaatgagattcttttgaaattgtagagaattttttattgtatttatatgataactgggctcatatccaaagtctaaacatcagataattttatgtgtgtaagttcctatctcaatttttaatttttttgctagcatcatggtactgaattttgtatactttcacagtcttaagaatgaatgctgagatttagctctagcttactagaatgcctactctctccattatgtcttacagacgccacaggtcatcatctggatcatcccattctggttcccgttcaagttcaaaaaagaaataatgtattaaaatttacatcttaaaaaaatccagtacagtgcatgaagcatatttttaaagaagttggtgtcttacttggtcagaagtgctaaatctgctagtagaggtgcatgcctttcattgcttttcaaaacaatacagctgtgtttatttgtgaagttaaaagtaaatagcattttaagccataatgtcccaaaatagatgttctgtcattcattatttacaaccatttgcttcatttaaaaccatttcagctataacaaagtactttgcttcctaatttaaacccatttttgtcatttccaaatacatcctgtccattggctaagacaggattacctaggcttgcctgaactttgggcatggaagaaagactggaaactagttggaaacaacatacttatggaaaagaaagtcagcctttttatgctgttaacagatgtcagagtgattctcaccaaaaaaagttaaactatgttgtaagcagccaactgtaaatgtctattttgaaattccctatgctaagggtgccttagaatcattgtgtctcttttatccagctttacttttttgctccacatttaatgcaaaagaatcttgtgatgtctacaaggagagaagtgggatatattttcctttctgacacataatttggggcaaaaaagaaagtcttaagagtttatcttttctctgctgatacggttgcttgataaagacatctcaaaatgtttaccaatgttttaagaagctttgtgtgatattcttccaaatgtagttaccaaatataatatggtagaaaaggctaaatcatacttaatgagcaaattgaagtaagcttttaaagtatatttctcttttggtgaaaggccaatggagacattgtgaatttaagtgaacatttgcctcaagatgttaactataaacacactgcatacaattttcttctgaataacaaatgaatgcttattgctgcatgatgtaagcaaaagtcattatttttcctattcatttgaaataagttatggcttaaaatgcttttggagtttatttctcaaaattaaaatctggtcacatgagctttagtttgttttctggtttaaaaaataaaaaggtttctcttaacagtatttccagtgacaatgcaaggtaagtatatcaaaggaaatcaacagttgtgcttgggggctttttgttatgggatattgatttcttgttttttttccgtaacattgtctgctgcaatttaaataaaaattacgacattttaagatatttcatagacaaaccaaacaaaaatatatgtttttactttaaagtgaatgtttttctcttcagctgatctaaaaatgaaagcaagatatcttatgtagaaatattttgataatatttttacagtgagctttcccatgtttttatgtcttaagtttctttgctgcgtttatgtaggttgcacaagaacttttactcacttgtaattgtgcctcagactttttgaaagtctaccttctaaattgccccgacgatctagattctacatgttaccattggtttattcttgtgctttctgtatttaaaactttggctgtactaagcaaatgcaaggttataatttagctaatagtagtttacagacaattctgatgattatgatttcatttggtttaactaagctgtactagttcatttcataaggaaatgatactgtagacaaatgtaaataaagcctgtgagtcaagcatcaagtggtgtttgttagaaataaactagagatttttaaactctga

SEQ ID NO: 438357 - DNA, 2212 bp, Homo sapiens
tccgaggcttctagtgccacgaaggcctcctgcctgggttgtccttatggcgcctgtgagtttagttctagaaaagatatttgtattttaacttttccatctaacaaacagtagcacaggcatcttagtctggacaacaacgtacaagctgaattcctggctagttccctcattatcaaaccctgacacagtagtaggcgcgagtcaggcagtgtggggacagccccgagttgccgaaagtccccggcccgttttcctcctgtgaagacatagctgcgggtggctgtgctggtggcgttcaagatgtcgaccaagaatttccgagtcagtgacggggactggatttgccctgacaaaaaatgtggaaatgtaaactttgctagaagaaccagctgtaatcgatgtggtcgggagaaaacaactgaggccaagatgatgaaagctgggggcactgaaataggaaagacacttgcagaaaagagccgaggcctatttagtgctaatgactggcaatgtaaaacttgcagcaatgtgaattgggccagaagatcagagtgtaatatgtgtaatactccaaagtatgctaaattagaagaaagaacaggatatggtggtggttttaatgaaagagaaaatgttgaatatatagaaagagaagaatctgatggtgaatatgatgagtttggacgtaaaaagaaaaaatacagagggaaagcagttggtcctgcatctatattaaaggaagttgaagataaagaatcagagggagaagaagaggatgaggatgaagatctttctaaatataagttagatgaggatgaggatgaagatgacgctgatctctcaaaatataatcttgatgccagtgaagaagaagatagtaataaaaagaaatctaatagacgaagtcgctcaaagtctcgatcttcacattcacgatcttcatcacgctcatcctccccctcaagttcaaggtctaggtccaggtcccgttcaagaagttcttccagttcgcagtcaagatctcgttccagttccagagaacgttcgagatctcgtgggtcgaaatcaagatccagctccaggtcccacaggggctcttcttccccacgaaaaagatcttattcaagttcatcatcttctcctgagaggaacagaaagagaagtcgttctagatcttcttcatctggtgatcgcaaaaaaagacgaacaagatcacggtcacccgaaagacgccacaggtcatcatctggatcatcccattctggttcccgttcaagttcaaaaaagaaataatgtattaaaatttacatcttaaaaaaatccagtacagtgcatgaagcatatttttaaagaagttggtgtcttacttggtcagaagtgctaaatctgctagtagaggtgcatgcctttcattgcttttcaaaacaatacagctgtgtttatttgtgaagttaaaatgcttttggagtttatttctcaaaattaaaatctggtcacatgagctttagtttgttttctggtttaaaaaataaaaaggtttctcttaacagtatttccagtgacaatgcaaggtaagtatatcaaaggaaatcaacagttgtgcttgggggctttttgttatgggatattgatttcttgttttttttccgtaacattgtctgctgcaatttaaataaaaattacgacattttaagatatttcatagacaaaccaaacaaaaatatatgtttttactttaaagtgaatgtttttctcttcagctgatctaaaaatgaaagcaagatatcttatgtagaaatattttgataatatttttacagtgagctttcccatgtttttatgtcttaagtttctttgctgcgtttatgtaggttgcacaagaacttttactcacttgtaattgtgcctcagactttttgaaagtctaccttctaaattgccccgacgatctagattctacatgttaccattggtttattcttgtgctttctgtatttaaaactttggctgtactaagcaaatgcaaggttataatttagctaatagtagtttacagacaattctgatgattatgatttcatttggtttaactaagctgtactagttcatttcataaggaaatgatactgtagacaaatgtaaataaagcctgtgagtcaagcatcaagtggtgtttgttagaaataaactagagatttttaaactctga

SEQ ID NO: 438358 - DNA, 3737 bp, Homo sapiens
tccgaggcttctagtgccacgaaggcctcctgcctgggttgtccttatggcgcctgtgagtttagttctagaaaagatatttgtattttaacttttccatctaacaaacagtagcacaggcatcttagtctggacaacaacgtacaagctgaattcctggctagttccctcattatcaaaccctgacacagtagtaggcgcgagtcaggcagtgtggggacagccccgagttgccgaaagtccccggcccgttttcctcctgtgaagacatagctgcgggtggctgtgctggtggcgttcaagatgtcgaccaagaatttccgagtcagtgacggggactggatttgccctgacaaaaaatgtggaaatgtaaactttgctagaagaaccagctgtaatcgatgtggtcgggagaaaacaactgaggccaagatgatgaaagctgggggcactgaaataggaaagacacttgcagaaaagagccgaggcctatttagtgctaatgactggcaatgtaaaacttgcagcaatgtgaattgggccagaagatcagagtgtaatatgtgtaatactccaaagtatgctaaattagaagaaagaacaggatatggtggtggttttaatgaaagagaaaatgttgaatatatagaaagagaagaatctgatggtgaatatgatgagtttggacgtaaaaagaaaaaatacagagggaaagcagttggtcctgcatctatattaaaggaagttgaagataaagaatcagagggagaagaagaggatgaggatgaagatctttctaaatataagttagatgaggatgaggatgaagatgacgctgatctctcaaaatataatcttgatgccagtgaagaagaagatagtaataaaaagaaatctaatagacgaagtcgctcaaagtctcgatcttcacattcacgatcttcatcacgctcatcctccccctcaagttcaaggtctaggtccaggtcccgttcaagaagttcttccagttcgcagtcaagatctcgttccagttccagagaacgttcgagatctcgtgggtcgaaatcaaggtgaatgaggtagcatctctctgtaaagcagagagaaaaatatttaaaggctgcagaaggtgttgctgctttttttccccttattttgcttctacttgtcgattttattttagcattagaaaactaatgcacttgcctcagcttaattttctcaccatgaaatgtttccattgccagcagtgtgccaagacattcccatgattgaaatcaggtggctattttgcaatatgcagcgtttattattttggcactaagatgttatgaagtaggaagatgaagccaagtcttatcgccacatctctagtatattaagattatatatggccaggcacagtgattcatgcctataatcccagcactttgggaagctgaggtgggaggatcacttgaggccaggagttcaaggttgtagtgaaccttgatcacagcactgtaatccagcctgggtgacagaggagtgtctcaaaaaaaaaaaaaaaaattaatagtagttcaaataaaattacatatgtaaataaaaagaaaaattttcttcattattaaaaggaagaaaaataaccctgcctcaaaacaggtcctgttttgcacggcagttgtttcaatattttcagaaacaaatttgccatttatatcagataaagttactagagtactgtatatacattttcctttctaattttacacacgctattatttatagagcacaaaacactcaaaactaaatcaggaagtatagtcggttagttgagataggatgtggtcttaagtagtaaacagtgttctaaagtttcaggttgcatgtagtcacatctgtagagggaaacataatttgaaagatgctcttgcaggaaatttttctttgtttagtcaaaatatgctctctttgtttttaagttaatttattatgacctaaaggcatctaaaaaataaataagaaaatgaaattccatatttgtggaaattcatattgaagtctaactgtggctgttttggtaaaagtatttgctgctttgaatcaaatttagcattaaagggctgccacagtataatcatgttaaggagaaaagaatgttgtgcacacttgcattataagccaataagaaatagataacaaggccaggctcagtggctcacgcctgtaatcccaataccttgggaggccaaggtgggcgggctgcttgagcccaggagttcaagaccagcctgggcaatatagtgagacctcgtctactaaaaataaaaattaaaacaaccagccaggcatggtggtgtgttcttataggctgaggtggaaggatcactggagccctggagattaagggtgcagtgagccatgcttatgctactgcaccacagcctggggaacagagcaagatcctgtctcaaaaaaaaaaaaaaaaaatagaagtagagagcaaattattttttattgttaccattatttagtaacaatatttaagcgctttataggtaaaaatccttaagttctggtattccctttgggaaccattataattaaggtttacagaacacccatcatattcttcccaaacattttttcattgcttgtaactttccaaagaattctccttttgggctttctggttttattttaagcccaaaggtgaattttttgggaagtttgagctaaattccttcaaccaaaatatacaagtgaagaaaaaaaatttgtatttaaacatttgcacatttacttctacctgaagcatgtgaatgtcaacacttcatatttcataagtagtgggttttcataaaaatagtattgtaaatataaatcatcttaaagttagtttttatttcttcttgaatatttagcagttaagtacagttactagtcttttgttgctgtgccatatacctggtttttccataacagtttaatgagttgaataattccacatggaattatgtttattttcctcaggaagtggtatataagatacatattttaatcctcaaatggaaggatgtagttcctaaacgtaaagtcctgttaatgcagttatctgctgattttataatactataatatttgtgtatactttgaaaagccttaaaaaaagtttaaattctattttgatatagtaagcagggttttaattacacatgatagaattttaaagagacaaaattaaaatgtttaagtagaatgttttcatggttgatccagaagtcttctgttgaataagcagtaagtattcttccttataaaattttcatagttgttataaatcctgtttatttttggagctatctgataactaaataatcttccttatttcttcttttaatgaaatgtttgatttgtttctcaatcaatgaagatccagctccaggtcccacaggggctcttcttccccacgaaaaagatcttattcaagttcatcatcttctcctgagaggaacagaaagagaagtcgttctagatcttcttcatctggtgatcgcaaaaaaagacgaacaagatcacggtcacccgaaagccaggtgattggtgaaaacactaaacaaccctgagcccagggccaacccctacggaacaccactactttacccagacgccacaggtcatcatctggatcatcccattctggttcccgttcaagttcaaaaaagaaataatgtattaaaatttacatctta

SEQ ID NO: 438359 - DNA, 3997 bp, Homo sapiens
tccgaggcttctagtgccacgaaggcctcctgcctgggttgtccttatggcgcctgtgagtttagttctagaaaagatatttgtattttaacttttccatctaacaaacagtagcacaggcatcttagtctggacaacaacgtacaagctgaattcctggctagttccctcattatcaaaccctgacacagtagtaggcgcgagtcaggcagtgtggggacagccccgagttgccgaaagtccccggcccgttttcctcctgtgaagacatagctgcgggtggctgtgctggtggcgttcaagatgtcgaccaagaatttccgagtcagtgacggggactggatttgccctgacaaaaaatgtggaaatgtaaactttgctagaagaaccagctgtaatcgatgtggtcgggagaaaacaactgaggccaagatgatgaaagctgggggcactgaaataggaaagacacttgcagaaaagagccgaggcctatttagtgctaatgactggcaatgtaaaacttgcagcaatgtgaattgggccagaagatcagagtgtaatatgtgtaatactccaaagtatgctaaattagaagaaagaacaggatatggtggtggttttaatgaaagagaaaatgttgaatatatagaaagagaagaatctgatggtgaatatgatgagtttggacgtaaaaagaaaaaatacagagggaaagcagttggtcctgcatctatattaaaggaagttgaagataaagaatcagagggagaagaagaggatgaggatgaagatctttctaaatataagttagatgaggatgaggatgaagatgacgctgatctctcaaaatataatcttgatgccagtgaagaagaagatagtaataaaaagaaatctaatagacgaagtcgctcaaagtctcgatcttcacattcacgatcttcatcacgctcatcctccccctcaagttcaaggtctaggtccaggtcccgttcaagaagttcttccagttcgcagtcaagatctcgttccagttccagagaacgttcgagatctcgtgggtcgaaatcaaggtgaatgaggtagcatctctctgtaaagcagagagaaaaatatttaaaggctgcagaaggtgttgctgctttttttccccttattttgcttctacttgtcgattttattttagcattagaaaactaatgcacttgcctcagcttaattttctcaccatgaaatgtttccattgccagcagtgtgccaagacattcccatgattgaaatcaggtggctattttgcaatatgcagcgtttattattttggcactaagatgttatgaagtaggaagatgaagccaagtcttatcgccacatctctagtatattaagattatatatggccaggcacagtgattcatgcctataatcccagcactttgggaagctgaggtgggaggatcacttgaggccaggagttcaaggttgtagtgaaccttgatcacagcactgtaatccagcctgggtgacagaggagtgtctcaaaaaaaaaaaaaaaaattaatagtagttcaaataaaattacatatgtaaataaaaagaaaaattttcttcattattaaaaggaagaaaaataaccctgcctcaaaacaggtcctgttttgcacggcagttgtttcaatattttcagaaacaaatttgccatttatatcagataaagttactagagtactgtatatacattttcctttctaattttacacacgctattatttatagagcacaaaacactcaaaactaaatcaggaagtatagtcggttagttgagataggatgtggtcttaagtagtaaacagtgttctaaagtttcaggttgcatgtagtcacatctgtagagggaaacataatttgaaagatgctcttgcaggaaatttttctttgtttagtcaaaatatgctctctttgtttttaagttaatttattatgacctaaaggcatctaaaaaataaataagaaaatgaaattccatatttgtggaaattcatattgaagtctaactgtggctgttttggtaaaagtatttgctgctttgaatcaaatttagcattaaagggctgccacagtataatcatgttaaggagaaaagaatgttgtgcacacttgcattataagccaataagaaatagataacaaggccaggctcagtggctcacgcctgtaatcccaataccttgggaggccaaggtgggcgggctgcttgagcccaggagttcaagaccagcctgggcaatatagtgagacctcgtctactaaaaataaaaattaaaacaaccagccaggcatggtggtgtgttcttataggctgaggtggaaggatcactggagccctggagattaagggtgcagtgagccatgcttatgctactgcaccacagcctggggaacagagcaagatcctgtctcaaaaaaaaaaaaaaaaaatagaagtagagagcaaattattttttattgttaccattatttagtaacaatatttaagcgctttataggtaaaaatccttaagttctggtattccctttgggaaccattataattaaggtttacagaacacccatcatattcttcccaaacattttttcattgcttgtaactttccaaagaattctccttttgggctttctggttttattttaagcccaaaggtgaattttttgggaagtttgagctaaattccttcaaccaaaatatacaagtgaagaaaaaaaatttgtatttaaacatttgcacatttacttctacctgaagcatgtgaatgtcaacacttcatatttcataagtagtgggttttcataaaaatagtattgtaaatataaatcatcttaaagttagtttttatttcttcttgaatatttagcagttaagtacagttactagtcttttgttgctgtgccatatacctggtttttccataacagtttaatgagttgaataattccacatggaattatgtttattttcctcaggaagtggtatataagatacatattttaatcctcaaatggaaggatgtagttcctaaacgtaaagtcctgttaatgcagttatctgctgattttataatactataatatttgtgtatactttgaaaagccttaaaaaaagtttaaattctattttgatatagtaagcagggttttaattacacatgatagaattttaaagagacaaaattaaaatgtttaagtagaatgttttcatggttgatccagaagtcttctgttgaataagcagtaagtattcttccttataaaattttcatagttgttataaatcctgtttatttttggagctatctgataactaaataatcttccttatttcttcttttaatgaaatgtttgatttgtttctcaatcaatgaagatccagctccaggtcccacaggggctcttcttccccacgaaaaagatcttattcaagttcatcatcttctcctgagaggaacagaaagagaagtcgttctagatcttcttcatctggtgatcgcaaaaaaagacgaacaagatcacggtcacccgaaagctttctcaaagaggttttgatcagttgtattttttcctcattactgatagaataaatgttcttcgctggaaagcattctttgattgtgaaaggagtttttattctgaaattaaagctttgtaagaccattgtaggagaaacttttcttttttctttttaaatatttattttagagacaggtctcactatgttggccaggctggtcttaaactcctaaccttaagtgatcctcctccagcctcccaaagtgcggggattataggcatgaaccaccatgcccagcttttttctgtttcttaagtccaaggaggccatttcttcataagctgaaaaaactttgaagttatctgtccagccatccttcaggagagggtagaacatgtaaataaaccttattgtcctcaattttctacttaaagt

SEQ ID NO: 438360 - DNA, 1330 bp, Homo sapiens
tccgaggcttctagtgccacgaaggcctcctgcctgggttgtccttatggcgcctgtgagtttagttctagaaaagatatttgtattttaacttttccatctaacaaacagtagcacaggcatcttagtctggacaacaacgtacaagctgaattcctggctagttccctcattatcaaaccctgacacagtagtaggcgcgagtcaggcagtgtggggacagccccgagttgccgaaagtccccggcccgttttcctcctgtgaagacatagctgcgggtggctgtgctggtggcgttcaagatgtcgaccaagaatttccgagtcccgttcaagaagttcttccagttcgcagtcaagatctcgttccagttccagagaacgttcgagatctcgtgggtcgaaatcaagatccagctccaggtcccacaggggctcttcttccccacgaaaaagatcttattcaagttcatcatcttctcctgagaggaacagaaagagaagtcgttctagatcttcttcatctggtgatcgcaaaaaaagacgaacaagatcacggtcacccgaaagccaggtgattggtgaaaacactaaacaaccctgagcccagggccaacccctacggaacaccactactttacccagacgccacaggtcatcatctggatcatcccattctgtgacaatgcaaggtaagtatatcaaaggaaatcaacagttgtgcttgggggctttttgttatgggatattgatttcttgttttttttccgtaacattgtctgctgcaatttaaataaaaattacgacattttaagatatttcatagacaaaccaaacaaaaatatatgtttttactttaaagtgaatgtttttctcttcagctgatctaaaaatgaaagcaagatatcttatgtagaaatattttgataatatttttacagtgagctttcccatgtttttatgtcttaagtttctttgctgcgtttatgtaggttgcacaagaacttttactcacttgtaattgtgcctcagactttttgaaagtctaccttctaaattgccccgacgatctagattctacatgttaccattggtttattcttgtgctttctgtatttaaaactttggctgtactaagcaaatgcaaggttataatttagctaatagtagtttacagacaattctgatgattatgatttcatttggtttaactaagctgtactagttcatttcataaggaaatgatactgtagacaaatgtaaataaagcctgtgagtcaagcatcaagtggtgtttgttagaaataaactagagatttttaaactctga

SEQ ID NO: 438361 - DNA, 1317 bp, Homo sapiens
tccgaggcttctagtgccacgaaggcctcctgcctgggttgtccttatggcgcctgtgagtttagttctagaaaagatatttgtattttaacttttccatctaacaaacagtagcacaggcatcttagtctggacaacaacgtacaagctgaattcctggctagttccctcattatcaaaccctgacacagtagtaggcgcgagtcaggcagtgtggggacagccccgagttgccgaaagtccccggcccgttttcctcctgtgaagacatagctgcgggtggctgtgctggtggcgttcaagatgtcgaccaagaatttccgagtcagtgacggggactggatttgccctgacaaaaaatgtggaaatgtaaactttgctagaagaaccagctgtaatcgatgtggtcgggagaaaacaactgaggccaagatgatgaaagctgggggcactgaaataggaaagacacttgcagaaaagagccgaggcctatttagtgctaatgactggcaatgtaaaacttgcagcaatgtgaattgggccagaagatcagagtgtaatatgtgtaatactccaaagtatgctaaattagaagaaagaacaggatatggtggtggttttaatgaaagagaaaatgttgaatatatagaaagagaagaatctgatggtgaatatgatgagtttggacgtaaaaagaaaaaatacagagggaaagcagttggtcctgcatctatattaaaggaagttgaagataaagaatcagagggagaagaagaggatgaggatgaagatctttctaaatataagttagatgaggatgaggatgaagatgacgctgatctctcaaaatataatcttgatgccagtgaagaagaagatagtaataaaaagaaatctaatagacgaagtcgctcaaagtctcgatcttcacattcacgatcttcatcacgctcatcctccccctcaagttcaaggtctaggtccaggtcccgttcaagaagttcttccagttcgcagtcaagatctcgttccagttccagagaacgttcgagatctcgtgggtcgaaatcaagatccagctccaggtcccacaggggctcttcttccccacgaaaaagatcttattcaagttcatcatcttctcctgagaggaacagaaagagaagtcgttctagatcttcttcatctggtgatcgcaaaaaaagacgaacaagatcacggtcacccgaaagacgccacaggtcatcatctggatcatcccattctggttcccgttcaagttcaaaaaagaaataatgtattaaaatttacatctta

SEQ ID NO: 438362 - DNA, 1741 bp, Homo sapiens
tccgaggcttctagtgccacgaaggcctcctgcctgggttgtccttatggcgcctgtgagtttagttctagaaaagatatttgtattttaacttttccatctaacaaacagtagcacaggcatcttagtctggacaacaacgtacaagctgaattcctggctagttccctcattatcaaaccctgacacagtagtaggcgcgagtcaggcagtgtggggacagccccgagttgccgaaagtccccggcccgttttcctcctgtgaagacatagctgcgggtggctgtgctggtggcgttcaagatgtcgaccaagaatttccgagtcagtgacggggactggatttgccctgacaaaaaatgtggaaatgtaaactttgctagaagaaccagctgtaatcgatgtggtcgggagaaaacaactgaggccaagatgatgaaagctgggggcactgaaataggaaagacacttgcagaaaagagccgaggcctatttagtgctaatgactggcaatgtaaaacttgcagcaatgtgaattgggccagaagatcagagtgtaatatgtgtaatactccaaagtatgctaaattagaagaaagaacaggatatggtggtggttttaatgaaagagaaaatgttgaatatatagaaagagaagaatctgatggtgaatatgatgagtttggacgtaaaaagaaaaaatacagagggaaagcagttggtcctgcatctatattaaaggaagttgaagataaagaatcagagggagaagaagaggatgaggatgaagatctttctaaatataagttagatgaggatgaggatgaagatgacgctgatctctcaaaatataatcttgatgccagtgaagaagaagatagtaataaaaagaaatctaatagacgaagtcgctcaaagtctcgatcttcacattcacgatcttcatcacgctcatcctccccctcaagttcaaggtctaggtccaggtaaacgggtacaggtcaagggtaacaccagtcaaaatgtcagtatctaacttttttatttataaattttgtttttcttgacgaaataaactttcctttttattttaaaaatttaattcaaatcaacttttaaaataatttttcagcttagtaccatacagttgttgtccagtatttttagaaaagtaaagtcttagcatgaaacttccttaacctattttagcctcatgcttttgactaaaatagacttaaaaactgaattaaatttttatatacacttatatttaattaatctaaagagatagcttacatatagaaattaagtaaaggggagatctgtattttcattcaagatgttaaaggctagcacagaaattttctaggcattaaatcattgcttattacataatgtttttaatagtttgctttgatatcagtattgtgaataacggagcaaattcagccatattagttctgttgacttcatgctcataattttgagaagtccaggcgtaaactaaaactcttttggtgtacttgaatattctttgtttgttgatgtaaaatatgtaatctctgattttatagttaacaataaaaataaaattttaggtgagtgaaagcagtgatttaaatttaacagtgtcctcttgaaaaaccttaatcacagttaagtgatggcatgggcaatgaattttaatcatatttaggaataaaatactagatattagtgtataacaattagatatatgtta

SEQ ID NO: 438363 - DNA, 1392 bp, Homo sapiens
tccgaggcttctagtgccacgaaggcctcctgcctgggttgtccttatggcgcctgtgagtttagttctagaaaagatatttgtattttaacttttccatctaacaaacagtagcacaggcatcttagtctggacaacaacgtacaagctgaattcctggctagttccctcattatcaaaccctgacacagtagtaggcgcgagtcaggcagtgtggggacagccccgagttgccgaaagtccccggcccgttttcctcctgtgaagacatagctgcgggtggctgtgctggtggcgttcaagatgtcgaccaagaatttccgagtcagtgacggggactggatttgccctgacaaaaaatgtggaaatgtaaactttgctagaagaaccagctgtaatcgatgtggtcgggagaaaacaactgaggccaagatgatgaaagctgggggcactgaaataggaaagacacttgcagaaaagagccgaggcctatttagtgctaatgactggcaatgtaaaacttgcagcaatgtgaattgggccagaagatcagagtgtaatatgtgtaatactccaaagtatgctaaattagaagaaagaacaggatatggtggtggttttaatgaaagagaaaatgttgaatatatagaaagagaagaatctgatggtgaatatgatgagtttggacgtaaaaagaaaaaatacagagggaaagcagttggtcctgcatctatattaaaggaagttgaagataaagaatcagagggagaagaagaggatgaggatgaagatctttctaaatataagttagatgaggatgaggatgaagatgacgctgatctctcaaaatataatcttgatgccagtgaagaagaagatagtaataaaaagaaatctaatagacgaagtcgctcaaagtctcgatcttcacattcacgatcttcatcacgctcatcctccccctcaagttcaaggtctaggtccaggtcccgttcaagaagttcttccagttcgcagtcaagatctcgttccagttccagagaacgttcgagatctcgtgggtcgaaatcaagatccagctccaggtcccacaggggctcttcttccccacgaaaaagatcttattcaagttcatcatcttctcctgagaggaacagaaagagaagtcgttctagatcttcttcatctggtgatcgcaaaaaaagacgaacaagatcacggtcacccgaaagccaggtgattggtgaaaacactaaacaaccctgagcccagggccaacccctacggaacaccactactttacccagacgccacaggtcatcatctggatcatcccattctggttcccgttcaagttcaaaaaagaaataatgtattaaaatttacatctta

SEQ ID NO: 438364 - DNA, 1293 bp, Homo sapiens
gtcttgcggtgttgcacaggctggtctcgaattcctggactcaagcagtcttcctgtcttggcctcccaaagtgctaggattataggtgtgagccactacgcctggcctgtatctcccttcacatgtcagacagccaattttactgtatttaaattcttcctaaatcctctattcaccaaacctgtatctcatgttgtatttcatattgataaacatcattatcagtacttgataatcctcttagatttcctttttgtgaacactaccactgctttgatttgtgggctaggatattgtagtttcttcctaaatggtcatttggcatttagtaggatttcagtaatatttgctaaatgaatttttttcaccaagcattgatcacttcatcactgatgctagaatgctcttaactaacgagcatttcatttcatgttatttctttgtttaaaccctttcagtgccttttcatggctttcagaattcaactacaatccttatgcatatagtaaaaagttcaggggttttttccaggactcacactacccccacctcccaattctaacctacttaggtgcacagaacctatacactagctacgttaactatgctgaactactaataggctttcatcttagtacaagtttcttatacctgggataccctacacataccccactaccatttcttttttcatttagctttcatgactcaattcagaacactaggatgccatccctgatgcctcttccctttcaatgggaattgggtgaaactcctaaaagtttctccttccccagtatccctctcccttagcatagtgtttgtcattatagcaagcactcaaatgtttgatgagggtcaatatctgttacctttctcaaagaggttttgatcagttgtattttttcctcattactgatagaataaatgttcttcgctggaaagcattctttgattgtgaaaggagtttttattctgaaattaaagctttgtaagaccattgtaggagaaacttttcttttttctttttaaatatttattttagagacaggtctcactatgttggccaggctggtcttaaactcctaaccttaagtgatcctcctccagcctcccaaagtgcggggattataggcatgaaccaccatgcccagcttttttctgtttcttaagtccaaggaggccatttcttcataagctgaaaaaactttgaagttatctgtccagccatccttcaggagagggtagaacatgtaaataaaccttattgtcctcaattttctacttaaagt

SEQ ID NO: 438365 - DNA, 6520 bp, Homo sapiens
tccgaggcttctagtgccacgaaggcctcctgcctgggttgtccttatggcgcctgtgagtttagttctagaaaagatatttgtattttaacttttccatctaacaaacagtagcacaggcatcttagtctggacaacaacgtacaagctgaattcctggctagttccctcattatcaaaccctgacacagtagtaggcgcgagtcaggcagtgtggggacagccccgagttgccgaaagtccccggcccgttttcctcctgtgaagacatagctgcgggtggctgtgctggtggcgttcaagatgtcgaccaagaatttccgagtcagtgacggggactggatttgccctgacaaaaaatgtggaaatgtaaactttgctagaagaaccagctgtaatcgatgtggtcgggagaaaacaactgaggccaagatgatgaaagctgggggcactgaaataggaaagacacttgcagaaaagagccgaggcctatttagtgctaatgactggcaatgtaaaacttgcagcaatgtgaattgggccagaagatcagagtgtaatatgtgtaatactccaaagtatgctaaattagaagaaagaacaggatatggtggtggttttaatgaaagagaaaatgttgaatatatagaaagagaagaatctgatggtgaatatgatgagtttggacgtaaaaagaaaaaatacagagggaaagcagttggtcctgcatctatattaaaggaagttgaagataaagaatcagagggagaagaagaggatgaggatgaagatctttctaaatataagttagatgaggatgaggatgaagatgacgctgatctctcaaaatataatcttgatgccagtgaagaagaagatagtaataaaaagaaatctaatagacgaagtcgctcaaagtctcgatcttcacattcacgatcttcatcacgctcatcctccccctcaagttcaaggtctaggtccaggtcccgttcaagaagttcttccagttcgcagtcaagatctcgttccagttccagagaacgttcgagatctcgtgggtcgaaatcaaggtgaatgaggtagcatctctctgtaaagcagagagaaaaatatttaaaggctgcagaaggtgttgctgctttttttccccttattttgcttctacttgtcgattttattttagcattagaaaactaatgcacttgcctcagcttaattttctcaccatgaaatgtttccattgccagcagtgtgccaagacattcccatgattgaaatcaggtggctattttgcaatatgcagcgtttattattttggcactaagatgttatgaagtaggaagatgaagccaagtcttatcgccacatctctagtatattaagattatatatggccaggcacagtgattcatgcctataatcccagcactttgggaagctgaggtgggaggatcacttgaggccaggagttcaaggttgtagtgaaccttgatcacagcactgtaatccagcctgggtgacagaggagtgtctcaaaaaaaaaaaaaaaaattaatagtagttcaaataaaattacatatgtaaataaaaagaaaaattttcttcattattaaaaggaagaaaaataaccctgcctcaaaacaggtcctgttttgcacggcagttgtttcaatattttcagaaacaaatttgccatttatatcagataaagttactagagtactgtatatacattttcctttctaattttacacacgctattatttatagagcacaaaacactcaaaactaaatcaggaagtatagtcggttagttgagataggatgtggtcttaagtagtaaacagtgttctaaagtttcaggttgcatgtagtcacatctgtagagggaaacataatttgaaagatgctcttgcaggaaatttttctttgtttagtcaaaatatgctctctttgtttttaagttaatttattatgacctaaaggcatctaaaaaataaataagaaaatgaaattccatatttgtggaaattcatattgaagtctaactgtggctgttttggtaaaagtatttgctgctttgaatcaaatttagcattaaagggctgccacagtataatcatgttaaggagaaaagaatgttgtgcacacttgcattataagccaataagaaatagataacaaggccaggctcagtggctcacgcctgtaatcccaataccttgggaggccaaggtgggcgggctgcttgagcccaggagttcaagaccagcctgggcaatatagtgagacctcgtctactaaaaataaaaattaaaacaaccagccaggcatggtggtgtgttcttataggctgaggtggaaggatcactggagccctggagattaagggtgcagtgagccatgcttatgctactgcaccacagcctggggaacagagcaagatcctgtctcaaaaaaaaaaaaaaaaaatagaagtagagagcaaattattttttattgttaccattatttagtaacaatatttaagcgctttataggtaaaaatccttaagttctggtattccctttgggaaccattataattaaggtttacagaacacccatcatattcttcccaaacattttttcattgcttgtaactttccaaagaattctccttttgggctttctggttttattttaagcccaaaggtgaattttttgggaagtttgagctaaattccttcaaccaaaatatacaagtgaagaaaaaaaatttgtatttaaacatttgcacatttacttctacctgaagcatgtgaatgtcaacacttcatatttcataagtagtgggttttcataaaaatagtattgtaaatataaatcatcttaaagttagtttttatttcttcttgaatatttagcagttaagtacagttactagtcttttgttgctgtgccatatacctggtttttccataacagtttaatgagttgaataattccacatggaattatgtttattttcctcaggaagtggtatataagatacatattttaatcctcaaatggaaggatgtagttcctaaacgtaaagtcctgttaatgcagttatctgctgattttataatactataatatttgtgtatactttgaaaagccttaaaaaaagtttaaattctattttgatatagtaagcagggttttaattacacatgatagaattttaaagagacaaaattaaaatgtttaagtagaatgttttcatggttgatccagaagtcttctgttgaataagcagtaagtattcttccttataaaattttcatagttgttataaatcctgtttatttttggagctatctgataactaaataatcttccttatttcttcttttaatgaaatgtttgatttgtttctcaatcaatgaagatccagctccaggtcccacaggggctcttcttccccacgaaaaagatcttattcaagttcatcatcttctcctgagaggaacagaaagagaagtcgttctagatcttcttcatctggtgatcgcaaaaaaagacgaacaagatcacggtcacccgaaagttgggtttctgtagaaataagaatgggtgttcttaagtgtgtttaatagataaagtaaactttcctagtcaagggttagatttttattatctcttgtgttccgactttctacttttcaactttgaacttcaaaaaaacattactttgcttatcctttgtactttgatcaggttgtttagaattgtagatcaaaccattctttgatcattttattgtttaaatttttagttccatttataatttttatagccaactctcggttatttctgtcttttgagattgcaattcagaagctgtatgtcgaagtaatttatgagttgacttttatacttaggcttctttaaatactaatagtcaagaattctagagcatctaataaaaaattaactttcagatcattgggaatctgtcctcatttaaatatgtgtaaatgcatttccacagcaaattgcttcatgccctttgtctataaggaaattattccttgtagctaatacatttttcattttgcagtccaaatcttttttgagaaaggcctatattaggttactttatctgtactgacacttttaatattggaagaatgcaactgtcatctgtcagccttttctgcaacaggctaattactcagtttcattaattttctctttgttcccaattatatagtcattttaatggctttatttgtagtctttgcaaatttttcatattttattagcttgtgaaaataaagattatgtaaagtctattaattgctgggttcagtggtaggattatctcatgattcctacttgtacagaatgattagttttgcttcttcacattttggagtttagatgttaagatttcacacagtcttgtttctctgcatttgtttctttgtaaaaaaaattactctgtttttgagtggaattcattctgttgctttcttaccacttctgcaaatttttatcttagccacatataatccccctagtttgttgtcatctaaacttaatgaacatgttctctattccataagccaggtgattggtgaaaacactaaacaaccctgagcccagggccaacccctacggaacaccactactttacccagacgccacaggtcatcatctggatcatcccattctggttcccgttcaagttcaaaaaagaaataatgtattaaaatttacatcttaaaaaaatccagtacagtgcatgaagcatatttttaaagaagttggtgtcttacttggtcagaagtgctaaatctgctagtagaggtgcatgcctttcattgcttttcaaaacaatacagctgtgtttatttgtgaagttaaaagtaaatagcattttaagccataatgtcccaaaatagatgttctgtcattcattatttacaaccatttgcttcatttaaaaccatttcagctataacaaagtactttgcttcctaatttaaacccatttttgtcatttccaaatacatcctgtccattggctaagacaggattacctaggcttgcctgaactttgggcatggaagaaagactggaaactagttggaaacaacatacttatggaaaagaaagtcagcctttttatgctgttaacagatgtcagagtgattctcaccaaaaaaagttaaactatgttgtaagcagccaactgtaaatgtctattttgaaattccctatgctaagggtgccttagaatcattgtgtctcttttatccagctttacttttttgctccacatttaatgcaaaagaatcttgtgatgtctacaaggagagaagtgggatatattttcctttctgacacataatttggggcaaaaaagaaagtcttaagagtttatcttttctctgctgatacggttgcttgataaagacatctcaaaatgtttaccaatgttttaagaagctttgtgtgatattcttccaaatgtagttaccaaatataatatggtagaaaaggctaaatcatacttaatgagcaaattgaagtaagcttttaaagtatatttctcttttggtgaaaggccaatggagacattgtgaatttaagtgaacatttgcctcaagatgttaactataaacacactgcatacaattttcttctgaataacaaatgaatgcttattgctgcatgatgtaagcaaaagtcattatttttcctattcatttgaaataagttatggcttaaaatgcttttggagtttatttctcaaaattaaaatctggtcacatgagctttagtttgttttctggtttaaaaaataaaaaggtttctcttaacagtatttccagtgacaatgcaaggtaagtatatcaaaggaaatcaacagttgtgcttgggggctttttgttatgggatattgatttcttgttttttttccgtaacattgtctgctgcaatttaaataaaaattacgacattttaagatatttcatagacaaaccaaacaaaaatatatgtttttactttaaagtgaatgtttttctcttcagctgatctaaaaatgaaagcaagatatcttatgtagaaatattttgataatatttttacagtgagctttcccatgtttttatgtcttaagtttctttgctgcgtttatgtaggttgcacaagaacttttactcacttgtaattgtgcctcagactttttgaaagtctaccttctaaattgccccgacgatctagattctacatgttaccattggtttattcttgtgctttctgtatttaaaactttggctgtactaagcaaatgcaaggttataatttagctaatagtagtttacagacaattctgatgattatgatttcatttggtttaactaagctgtactagttcatttcataaggaaatgatactgtagacaaatgtaaataaagcctgtgagtcaagcatcaagtggtgtttgttagaaataaactagagatttttaaactctga

SEQ ID NO: 438366 - DNA, 4557 bp, Homo sapiens
tccgaggcttctagtgccacgaaggcctcctgcctgggttgtccttatggcgcctgtgagtttagttctagaaaagatatttgtattttaacttttccatctaacaaacagtagcacaggcatcttagtctggacaacaacgtacaagctgaattcctggctagttccctcattatcaaaccctgacacagtagtaggcgcgagtcaggcagtgtggggacagccccgagttgccgaaagtccccggcccgttttcctcctgtgaagacatagctgcgggtggctgtgctggtggcgttcaagatgtcgaccaagaatttccgagtcagtgacggggactggatttgccctgacaaaaaatgtggaaatgtaaactttgctagaagaaccagctgtaatcgatgtggtcgggagaaaacaactgaggccaagatgatgaaagctgggggcactgaaataggaaagacacttgcagaaaagagccgaggcctatttagtgctaatgactggcaatgtaaaacttgcagcaatgtgaattgggccagaagatcagagtgtaatatgtgtaatactccaaagtatgctaaattagaagaaagaacaggatatggtggtggttttaatgaaagagaaaatgttgaatatatagaaagagaagaatctgatggtgaatatgatgagtttggacgtaaaaagaaaaaatacagagggaaagcagttggtcctgcatctatattaaaggaagttgaagataaagaatcagagggagaagaagaggatgaggatgaagatctttctaaatataagttagatgaggatgaggatgaagatgacgctgatctctcaaaatataatcttgatgccagtgaagaagaagatagtaataaaaagaaatctaatagacgaagtcgctcaaagtctcgatcttcacattcacgatcttcatcacgctcatcctccccctcaagttcaaggtctaggtccaggtcccgttcaagaagttcttccagttcgcagtcaagatctcgttccagttccagagaacgttcgagatctcgtgggtcgaaatcaaggtgaatgaggtagcatctctctgtaaagcagagagaaaaatatttaaaggctgcagaaggtgttgctgctttttttccccttattttgcttctacttgtcgattttattttagcattagaaaactaatgcacttgcctcagcttaattttctcaccatgaaatgtttccattgccagcagtgtgccaagacattcccatgattgaaatcaggtggctattttgcaatatgcagcgtttattattttggcactaagatgttatgaagtaggaagatgaagccaagtcttatcgccacatctctagtatattaagattatatatggccaggcacagtgattcatgcctataatcccagcactttgggaagctgaggtgggaggatcacttgaggccaggagttcaaggttgtagtgaaccttgatcacagcactgtaatccagcctgggtgacagaggagtgtctcaaaaaaaaaaaaaaaaattaatagtagttcaaataaaattacatatgtaaataaaaagaaaaattttcttcattattaaaaggaagaaaaataaccctgcctcaaaacaggtcctgttttgcacggcagttgtttcaatattttcagaaacaaatttgccatttatatcagataaagttactagagtactgtatatacattttcctttctaattttacacacgctattatttatagagcacaaaacactcaaaactaaatcaggaagtatagtcggttagttgagataggatgtggtcttaagtagtaaacagtgttctaaagtttcaggttgcatgtagtcacatctgtagagggaaacataatttgaaagatgctcttgcaggaaatttttctttgtttagtcaaaatatgctctctttgtttttaagttaatttattatgacctaaaggcatctaaaaaataaataagaaaatgaaattccatatttgtggaaattcatattgaagtctaactgtggctgttttggtaaaagtatttgctgctttgaatcaaatttagcattaaagggctgccacagtataatcatgttaaggagaaaagaatgttgtgcacacttgcattataagccaataagaaatagataacaaggccaggctcagtggctcacgcctgtaatcccaataccttgggaggccaaggtgggcgggctgcttgagcccaggagttcaagaccagcctgggcaatatagtgagacctcgtctactaaaaataaaaattaaaacaaccagccaggcatggtggtgtgttcttataggctgaggtggaaggatcactggagccctggagattaagggtgcagtgagccatgcttatgctactgcaccacagcctggggaacagagcaagatcctgtctcaaaaaaaaaaaaaaaaaatagaagtagagagcaaattattttttattgttaccattatttagtaacaatatttaagcgctttataggtaaaaatccttaagttctggtattccctttgggaaccattataattaaggtttacagaacacccatcatattcttcccaaacattttttcattgcttgtaactttccaaagaattctccttttgggctttctggttttattttaagcccaaaggtgaattttttgggaagtttgagctaaattccttcaaccaaaatatacaagtgaagaaaaaaaatttgtatttaaacatttgcacatttacttctacctgaagcatgtgaatgtcaacacttcatatttcataagtagtgggttttcataaaaatagtattgtaaatataaatcatcttaaagttagtttttatttcttcttgaatatttagcagttaagtacagttactagtcttttgttgctgtgccatatacctggtttttccataacagtttaatgagttgaataattccacatggaattatgtttattttcctcaggaagtggtatataagatacatattttaatcctcaaatggaaggatgtagttcctaaacgtaaagtcctgttaatgcagttatctgctgattttataatactataatatttgtgtatactttgaaaagccttaaaaaaagtttaaattctattttgatatagtaagcagggttttaattacacatgatagaattttaaagagacaaaattaaaatgtttaagtagaatgttttcatggttgatccagaagtcttctgttgaataagcagtaagtattcttccttataaaattttcatagttgttataaatcctgtttatttttggagctatctgataactaaataatcttccttatttcttcttttaatgaaatgtttgatttgtttctcaatcaatgaagatccagctccaggtcccacaggggctcttcttccccacgaaaaagatcttattcaagttcatcatcttctcctgagaggaacagaaagagaagtcgttctagatcttcttcatctggtgatcgcaaaaaaagacgaacaagatcacggtcacccgaaagacgccacaggtcatcatctggatcatcccattctggttcccgttcaagttcaaaaaagaaataatgtattaaaatttacatcttaaaaaaatccagtacagtgcatgaagcatatttttaaagaagttggtgtcttacttggtcagaagtgctaaatctgctagtagaggtgcatgcctttcattgcttttcaaaacaatacagctgtgtttatttgtgaagttaaaatgcttttggagtttatttctcaaaattaaaatctggtcacatgagctttagtttgttttctggtttaaaaaataaaaaggtttctcttaacagtatttccagtgacaatgcaaggtaagtatatcaaaggaaatcaacagttgtgcttgggggctttttgttatgggatattgatttcttgttttttttccgtaacattgtctgctgcaatttaaataaaaattacgacattttaagatatttcatagacaaaccaaacaaaaatatatgtttttactttaaagtgaatgtttttctcttcagctgatctaaaaatgaaagcaagatatcttatgtagaaatattttgataatatttttacagtgagctttcccatgtttttatgtcttaagtttctttgctgcgtttatgtaggttgcacaagaacttttactcacttgtaattgtgcctcagactttttgaaagtctaccttctaaattgccccgacgatctagattctacatgttaccattggtttattcttgtgctttctgtatttaaaactttggctgtactaagcaaatgcaaggttataatttagctaatagtagtttacagacaattctgatgattatgatttcatttggtttaactaagctgtactagttcatttcataaggaaatgatactgtagacaaatgtaaataaagcctgtgagtcaagcatcaagtggtgtttgttagaaataaactagagatttttaaactctga

SEQ ID NO: 438367 - DNA, 4758 bp, Homo sapiens
tccgaggcttctagtgccacgaaggcctcctgcctgggttgtccttatggcgcctgtgagtttagttctagaaaagatatttgtattttaacttttccatctaacaaacagtagcacaggcatcttagtctggacaacaacgtacaagctgaattcctggctagttccctcattatcaaaccctgacacagtagtaggcgcgagtcaggcagtgtggggacagccccgagttgccgaaagtccccggcccgttttcctcctgtgaagacatagctgcgggtggctgtgctggtggcgttcaagatgtcgaccaagaatttccgagtcagtgacggggactggatttgccctgacaaaaaatgtggaaatgtaaactttgctagaagaaccagctgtaatcgatgtggtcgggagaaaacaactgaggccaagatgatgaaagctgggggcactgaaataggaaagacacttgcagaaaagagccgaggcctatttagtgctaatgactggcaatgtaaaacttgcagcaatgtgaattgggccagaagatcagagtgtaatatgtgtaatactccaaagtatgctaaattagaagaaagaacaggatatggtggtggttttaatgaaagagaaaatgttgaatatatagaaagagaagaatctgatggtgaatatgatgagtttggacgtaaaaagaaaaaatacagagggaaagcagttggtcctgcatctatattaaaggaagttgaagataaagaatcagagggagaagaagaggatgaggatgaagatctttctaaatataagttagatgaggatgaggatgaagatgacgctgatctctcaaaatataatcttgatgccagtgaagaagaagatagtaataaaaagaaatctaatagacgaagtcgctcaaagtctcgatcttcacattcacgatcttcatcacgctcatcctccccctcaagttcaaggtctaggtccaggtcccgttcaagaagttcttccagttcgcagtcaagatctcgttccagttccagagaacgttcgagatctcgtgggtcgaaatcaaggtgaatgaggtagcatctctctgtaaagcagagagaaaaatatttaaaggctgcagaaggtgttgctgctttttttccccttattttgcttctacttgtcgattttattttagcattagaaaactaatgcacttgcctcagcttaattttctcaccatgaaatgtttccattgccagcagtgtgccaagacattcccatgattgaaatcaggtggctattttgcaatatgcagcgtttattattttggcactaagatgttatgaagtaggaagatgaagccaagtcttatcgccacatctctagtatattaagattatatatggccaggcacagtgattcatgcctataatcccagcactttgggaagctgaggtgggaggatcacttgaggccaggagttcaaggttgtagtgaaccttgatcacagcactgtaatccagcctgggtgacagaggagtgtctcaaaaaaaaaaaaaaaaattaatagtagttcaaataaaattacatatgtaaataaaaagaaaaattttcttcattattaaaaggaagaaaaataaccctgcctcaaaacaggtcctgttttgcacggcagttgtttcaatattttcagaaacaaatttgccatttatatcagataaagttactagagtactgtatatacattttcctttctaattttacacacgctattatttatagagcacaaaacactcaaaactaaatcaggaagtatagtcggttagttgagataggatgtggtcttaagtagtaaacagtgttctaaagtttcaggttgcatgtagtcacatctgtagagggaaacataatttgaaagatgctcttgcaggaaatttttctttgtttagtcaaaatatgctctctttgtttttaagttaatttattatgacctaaaggcatctaaaaaataaataagaaaatgaaattccatatttgtggaaattcatattgaagtctaactgtggctgttttggtaaaagtatttgctgctttgaatcaaatttagcattaaagggctgccacagtataatcatgttaaggagaaaagaatgttgtgcacacttgcattataagccaataagaaatagataacaaggccaggctcagtggctcacgcctgtaatcccaataccttgggaggccaaggtgggcgggctgcttgagcccaggagttcaagaccagcctgggcaatatagtgagacctcgtctactaaaaataaaaattaaaacaaccagccaggcatggtggtgtgttcttataggctgaggtggaaggatcactggagccctggagattaagggtgcagtgagccatgcttatgctactgcaccacagcctggggaacagagcaagatcctgtctcaaaaaaaaaaaaaaaaaatagaagtagagagcaaattattttttattgttaccattatttagtaacaatatttaagcgctttataggtaaaaatccttaagttctggtattccctttgggaaccattataattaaggtttacagaacacccatcatattcttcccaaacattttttcattgcttgtaactttccaaagaattctccttttgggctttctggttttattttaagcccaaaggtgaattttttgggaagtttgagctaaattccttcaaccaaaatatacaagtgaagaaaaaaaatttgtatttaaacatttgcacatttacttctacctgaagcatgtgaatgtcaacacttcatatttcataagtagtgggttttcataaaaatagtattgtaaatataaatcatcttaaagttagtttttatttcttcttgaatatttagcagttaagtacagttactagtcttttgttgctgtgccatatacctggtttttccataacagtttaatgagttgaataattccacatggaattatgtttattttcctcaggaagtggtatataagatacatattttaatcctcaaatggaaggatgtagttcctaaacgtaaagtcctgttaatgcagttatctgctgattttataatactataatatttgtgtatactttgaaaagccttaaaaaaagtttaaattctattttgatatagtaagcagggttttaattacacatgatagaattttaaagagacaaaattaaaatgtttaagtagaatgttttcatggttgatccagaagtcttctgttgaataagcagtaagtattcttccttataaaattttcatagttgttataaatcctgtttatttttggagctatctgataactaaataatcttccttatttcttcttttaatgaaatgtttgatttgtttctcaatcaatgaagatccagctccaggtcccacaggggctcttcttccccacgaaaaagatcttattcaagttcatcatcttctcctgagaggaacagaaagagaagtcgttctagatcttcttcatctggtgatcgcaaaaaaagacgaacaagatcacggtcacccgaaagttgggtttctgtagaaataagaatgggtgttcttaagtgtgtttaatagataaagtaaactttcctagtcaagggttagatttttattatctcttgtgttccgactttctacttttcaactttgaacttcaaaaaaacattactttgcttatcctttgtactttgatcaggttgtttagaattgtagatcaaaccattctttgatcattttattgtttaaatttttagttccatttataatttttatagccaactctcggttatttctgtcttttgagattgcaattcagaagctgtatgtcgaagtaatttatgagttgacttttatacttaggcttctttaaatactaatagtcaagaattctagagcatctaataaaaaattaactttcagatcattgggaatctgtcctcatttaaatatgtgtaaatgcatttccacagcaaattgcttcatgccctttgtctataaggaaattattccttgtagctaatacatttttcattttgcagtccaaatcttttttgagaaaggcctatattaggttactttatctgtactgacacttttaatattggaagaatgcaactgtcatctgtcagccttttctgcaacaggctaattactcagtttcattaattttctctttgttcccaattatatagtcattttaatggctttatttgtagtctttgcaaatttttcatattttattagcttgtgaaaataaagattatgtaaagtctattaattgctgggttcagtggtaggattatctcatgattcctacttgtacagaatgattagttttgcttcttcacattttggagtttagatgttaagatttcacacagtcttgtttctctgcatttgtttctttgtaaaaaaaattactctgtttttgagtggaattcattctgttgctttcttaccacttctgcaaatttttatcttagccacatataatccccctagtttgttgtcatctaaacttaatgaacatgttctctattccataagccaggtgattggtgaaaacactaaacaaccctgagcccagggccaacccctacggaacaccactactttacccagacgccacaggtcatcatctggatcatcccattctggttcccgttcaagttcaaaaaagaaataatgtattaaaatttacatctta

SEQ ID NO: 438368 - DNA, 3718 bp, Homo sapiens
tccgaggcttctagtgccacgaaggcctcctgcctgggttgtccttatggcgcctgtgagtttagttctagaaaagatatttgtattttaacttttccatctaacaaacagtagcacaggcatcttagtctggacaacaacgtacaagctgaattcctggctagttccctcattatcaaaccctgacacagtagtaggcgcgagtcaggcagtgtggggacagccccgagttgccgaaagtccccggcccgttttcctcctgtgaagacatagctgcgggtggctgtgctggtggcgttcaagatgtcgaccaagaatttccgagtcagtgacggggactggatttgccctgacaaaaaatgtggaaatgtaaactttgctagaagaaccagctgtaatcgatgtggtcgggagaaaacaactgaggccaagatgatgaaagctgggggcactgaaataggaaagacacttgcagaaaagagccgaggcctatttagtgctaatgactggcaatgtaaaacttgcagcaatgtgaattgggccagaagatcagagtgtaatatgtgtaatactccaaagtatgctaaattagaagaaagaacaggatatggtggtggttttaatgaaagagaaaatgttgaatatatagaaagagaagaatctgatggtgaatatgatgagtttggacgtaaaaagaaaaaatacagagggaaagcagttggtcctgcatctatattaaaggaagttgaagataaagaatcagagggagaagaagaggatgaggatgaagatctttctaaatataagttagatgaggatgaggatgaagatgacgctgatctctcaaaatataatcttgatgccagtgaagaagaagatagtaataaaaagaaatctaatagacgaagtcgctcaaagtctcgatcttcacattcacgatcttcatcacgctcatcctccccctcaagttcaaggtctaggtccaggtcccgttcaagaagttcttccagttcgcagtcaagatctcgttccagttccagagaacgttcgagatctcgtgggtcgaaatcaaggtgaatgaggtagcatctctctgtaaagcagagagaaaaatatttaaaggctgcagaaggtgttgctgctttttttccccttattttgcttctacttgtcgattttattttagcattagaaaactaatgcacttgcctcagcttaattttctcaccatgaaatgtttccattgccagcagtgtgccaagacattcccatgattgaaatcaggtggctattttgcaatatgcagcgtttattattttggcactaagatgttatgaagtaggaagatgaagccaagtcttatcgccacatctctagtatattaagattatatatggccaggcacagtgattcatgcctataatcccagcactttgggaagctgaggtgggaggatcacttgaggccaggagttcaaggttgtagtgaaccttgatcacagcactgtaatccagcctgggtgacagaggagtgtctcaaaaaaaaaaaaaaaaattaatagtagttcaaataaaattacatatgtaaataaaaagaaaaattttcttcattattaaaaggaagaaaaataaccctgcctcaaaacaggtcctgttttgcacggcagttgtttcaatattttcagaaacaaatttgccatttatatcagataaagttactagagtactgtatatacattttcctttctaattttacacacgctattatttatagagcacaaaacactcaaaactaaatcaggaagtatagtcggttagttgagataggatgtggtcttaagtagtaaacagtgttctaaagtttcaggttgcatgtagtcacatctgtagagggaaacataatttgaaagatgctcttgcaggaaatttttctttgtttagtcaaaatatgctctctttgtttttaagttaatttattatgacctaaaggcatctaaaaaataaataagaaaatgaaattccatatttgtggaaattcatattgaagtctaactgtggctgttttggtaaaagtatttgctgctttgaatcaaatttagcattaaagggctgccacagtataatcatgttaaggagaaaagaatgttgtgcacacttgcattataagccaataagaaatagataacaaggccaggctcagtggctcacgcctgtaatcccaataccttgggaggccaaggtgggcgggctgcttgagcccaggagttcaagaccagcctgggcaatatagtgagacctcgtctactaaaaataaaaattaaaacaaccagccaggcatggtggtgtgttcttataggctgaggtggaaggatcactggagccctggagattaagggtgcagtgagccatgcttatgctactgcaccacagcctggggaacagagcaagatcctgtctcaaaaaaaaaaaaaaaaaatagaagtagagagcaaattattttttattgttaccattatttagtaacaatatttaagcgctttataggtaaaaatccttaagttctggtattccctttgggaaccattataattaaggtttacagaacacccatcatattcttcccaaacattttttcattgcttgtaactttccaaagaattctccttttgggctttctggttttattttaagcccaaaggtgaattttttgggaagtttgagctaaattccttcaaccaaaatatacaagtgaagaaaaaaaatttgtatttaaacatttgcacatttacttctacctgaagcatgtgaatgtcaacacttcatatttcataagtagtgggttttcataaaaatagtattgtaaatataaatcatcttaaagttagtttttatttcttcttgaatatttagcagttaagtacagttactagtcttttgttgctgtgccatatacctggtttttccataacagtttaatgagttgaataattccacatggaattatgtttattttcctcaggaagtggtatataagatacatattttaatcctcaaatggaaggatgtagttcctaaacgtaaagtcctgttaatgcagttatctgctgattttataatactataatatttgtgtatactttgaaaagccttaaaaaaagtttaaattctattttgatatagtaagcagggttttaattacacatgatagaattttaaagagacaaaattaaaatgtttaagtagaatgttttcatggttgatccagaagtcttctgttgaataagcagtaagtattcttccttataaaattttcatagttgttataaatcctgtttatttttggagctatctgataactaaataatcttccttatttcttcttttaatgaaatgtttgatttgtttctcaatcaatgaagatccagctccaggtcccacaggggctcttcttccccacgaaaaagatcttattcaagttcatcatcttctcctgagaggaacagaaagagaagtcgttctagatcttcttcatctggtgatcgcaaaaaaagacgaacaagatcacggtcacccgaaagcgttaatattcatctgctgagagcagttatgggacccatgtcaggaatacatgcttcaaataagatgggacttgagaattgctgagagacttcaggaacattctttaacttcatggggcctcagttaccccacctttaagg

SEQ ID NO: 438369 - DNA, 2149 bp, Homo sapiens
tccgaggcttctagtgccacgaaggcctcctgcctgggttgtccttatggcgcctgtgagtttagttctagaaaagatatttgtattttaacttttccatctaacaaacagtagcacaggcatcttagtctggacaacaacgtacaagctgaattcctggctagttccctcattatcaaaccctgacacagtagtaggcgcgagtcaggcagtgtggggacagccccgagttgccgaaagtccccggcccgttttcctcctgtgaagacatagctgcgggtggctgtgctggtggcgttcaagatgtcgaccaagaatttccgagtcagtgacggggactggatttgccctgacaaaaaatgtggaaatgtaaactttgctagaagaaccagctgtaatcgatgtggtcgggagaaaacaactgaggccaagatgatgaaagctgggggcactgaaataggaaagacacttgcagaaaagagccgaggcctatttagtgctaatgactggcaatgtaaaacttgcagcaatgtgaattgggccagaagatcagagtgtaatatgtgtaatactccaaagtatgctaaattagaagaaagaacaggatatggtggtggttttaatgaaagagaaaatgttgaatatatagaaagagaagaatctgatggtgaatatgatgagtttggacgtaaaaagaaaaaatacagagggaaagcagttggtcctgcatctatattaaaggaagttgaagataaagaatcagagggagaagaagaggatgaggatgaagatctttctaaatataagttagatgaggatgaggatgaagatgacgctgatctctcaaaatataatcttgatgccagtgaagaagaagatagtaataaaaagaaatctaatagacgaagtcgctcaaagtctcgatcttcacattcacgatcttcatcacgctcatcctccccctcaagttcaaggtctaggtccaggtcccgttcaagaagttcttccagttcgcagtcaagatctcgttccagttccagagaacgttcgagatctcgtgggtcgaaatcaaggtgaatgaggtagcatctctctgtaaagcagagagaaaaatatttaaaggctgcagaaggtgttgctgctttttttccccttattttgcttctacttgtcgattttattttagcattagaaaactaatgcacttgcctcagcttaattttctcaccatgaaatgtttccattgccagcagtgtgccaagacattcccatgattgaaatcaggtggctattttgcaatatgcagcgtttattattttggcactaagatgttatgaagtaggaagatgaagccaagtcttatcgccacatctctagtatattaagattatatatggccaggcacagtgattcatgcctataatcccagcactttgggaagctgaggtgggaggatcacttgaggccaggagttcaaggttgtagtgaaccttgatcacagcactgtaatccagcctgggtgacagaggagtgtctcaaaaaaaaaaaaaaaaattaatagtagttcaaataaaattacatatgtaaataaaaagaaaaattttcttcattattaaaaggaagaaaaataaccctgcctcaaaacaggtcctgttttgcacggcagttgtttcaatattttcagaaacaaatttgccatttatatcagataaagttactagagtactgtatatacattttcctttctaattttacacacgctattatttatagagcacaaaacactcaaaactaaatcaggaagtatagtcggttagttgagataggatgtggtcttaagtagtaaacagtgttctaaagtttcaggttgcatgtagtcacatctgtagagggaaacataatttgaaagatgctcttgcaggaaatttttctttgtttagtcaaaatatgctctctttgtttttaagttaatttattatgacctaaaggcatctaaaaaataaataagaaaatgaaattccatatttgtggaaattcatattgaagtctaactgtggctgttttggtaaaagtatttgctgctttgaatcaaattaacatggctggccagtttatatggtggggatgggggccactgcttatagccatg

SEQ ID NO: 438370 - DNA, 698 bp, Homo sapiens
tccgaggcttctagtgccacgaaggcctcctgcctgggttgtccttatggcgcctgtgagtttagttctagaaaagatatttgtattttaacttttccatctaacaaacagtagcacaggcatcttagtctggacaacaacgtacaagctgaattcctggctagttccctcattatcaaaccctgacacagtagtaggcgcgagtcaggcagtgtggggacagccccgagttgccgaaagtccccggcccgttttcctcctgtgaagacatagctgcgggtggctgtgctggtggcgttcaagatgtcgaccaagaatttccgagtcagtgacggggactggatttgccctgacaaaaaatgtggaaatgtaaactttgctagaagaaccagctgtaatcgatgtggtcgggagaaaacaactgaggccaagatgatgaaagctgggggcactgaaataggaaagacacttgcagaaaagagccgaggcctatttagtgctaatgactggcaatgtaaaacttgcagcaatgtgaattgggccagaagatcagagtgtaatatgtgtaatactccaaagtatgctaaattagaagaaagaacaggtggtggtgtgtaatgaaagagaaaatgtcgaaaatatcaagatataagagctactgagggttgcatatatgaagacacttctcctgaattcag

SEQ ID NO: 438371 - DNA, 1085 bp, Homo sapiens
  misc_feature (1021)..(1021): n is a, c, g, or t
  misc_feature (1046)..(1046): n is a, c, g, or t
gagttttcagtcatgttgtttctttaagttggtttagccttcctgtatacatgtgataatgatactgttttaaagaacaggtgtgaaagtctaagagtttaatccagactctgcacaagaagttaatctgccaaaccctaggattctccttctgaaagctcagaatatttcttccccttccctatacacacagggctcgaagggttagagaagaaaggcagacaacagcttctgagctttggactaatcacagcctctgttctcagcaggagccccaacactgagaccagaaaagatggtgctatgctttcctcttcttttactgctgctggttctatggggaccagtgtgtccacttcatgcttggcctaagcgtctcaccaaggctcactggtttgaaattcagcatatacagccaagtcctctccaatgcaacagggcaatgagtggcatcaacaattatacccagcactgtaagcatcaaaatacctttctgcatgactctttccagaatgtggctgctgtctgtgatttgctcagcattgtctgcaaaaatcgtcggcacaactgccaccagagctcaaagcctgtcaacatgactgactgcagactcacttcaggaaagtatccccagtgccgctatagtgctgctgcccagtacaaattcttcattgttgcctgtgacccccctcagaagagcgatcccccctacaagttggttcctgtacacttagatagtattctctaaggcatccactgcatttcctttcatttgacatagcttctgttacaattgcatccacgttttcttttcttttgttgattttcttgttcccgtagaagaaagaagaaaggtgtttggagaattcgagtgcctaggatgccagaccagagttgagacaaaaagaaataagattattttctgctttgtagttctgtacttttcgagagaagggaatagggaagacagcaaagaaagattcagatttctaaccctgcaacttttgccaagctttattgntcaaacaagctcgtttggaggctanggctaatagtgaaaaagcacagcttgtccctgctgctgg

SEQ ID NO: 438372 - DNA, 1010 bp, Homo sapiens
gagttttcagtcatgttgtttctttaagttggtttagccttcctgtatacatgtgataatgatactgttttaaagaacaggtgtgaaagtctaagagtttaatccagactctgcacaagaagttaatctgccaaaccctaggattctccttctgaaagctcagaatatttcttccccttccctatacacacagggctcgaagggttagagaagaaaggcagacaacagcttctgagctttggactaatcacagcctctgttctcagcaggagccccaacactgagaccagaaaagatggtgctatgctttcctcttcttttactgctgctggttctatggggaccagtgtgtccacttcatgcttggcctaagcgtctcaccaaggctcactggtttgaaattcagcatatacagccaagtcctctccaatgcaacagggcaatgagtggcatcaacaattatacccagcactgtaagcatcaaaatacctttctgcatgactctttccagaatgtggctgctgtctgtgatttgctcagcattgtctgcatgcagactcacttcaggaaagtatccccagtgccgctatagtgctgctgcccagtacaaattcttcattgttgcctgtgacccccctcagaagagcgatcccccctacaagttggttcctgtacacttagatagtattctctaaggcatccactgcatttcctttcatttgacatagcttctgttacaattgcatccacgttttcttttcttttgttgattttcttgttcccgtagaagaaagaagaaaggtgtttggagaattcgagtgcctaggatgccagaccagagttgagacaaaaagaaataagattattttctgctttgtagttctgtacttttcgagagaagggaatagggaagacagcaaagaaagattcagatttctaaccctgcaacttttgccaagctttattgccctgtgttcacagcaataaaaccacttcctgctgcattctaa

SEQ ID NO: 438373 - DNA, 872 bp, Homo sapiens
agatgaggcaggaagcactcattccatatcaggaagtgatcagttcctcaaaactggctcgaagggttagagaagaaaggcagacaacagcttctgagctttggactaatcacagcctctgttctcagcaggagccccaacactgagaccagaaaagatggtgctatgctttcctcttcttttactgctgctggttctatggggaccagtgtgtccacttcatgcttggcctaagcgtctcaccaaggctcactggtttgaaattcagcatatacagccaagtcctctccaatgcaacagggcaatgagtggcatcaacaattatacccagcactgtaagcatcaaaatacctttctgcatgactctttccagaatgtggctgctgtctgtgatttgctcagcattgtctgcatgcagactcacttcaggaaagtatccccagtgccgctatagtgctgctgcccagtacaaattcttcattgttgcctgtgacccccctcagaagagcgatcccccctacaagttggttcctgtacacttagatagtattctctaaggcatccactgcatttcctttcatttgacatagcttctgttacaattgcatccacgttttcttttcttttgttgattttcttgttcccgtagaagaaagaagaaaggtgtttggagaattcgagtgcctaggatgccagaccagagttgagacaaaaagaaataagattattttctgctttgtagttctgtacttttcgagagaagggaatagggaagacagcaaagaaagattcagatttctaaccctgcaacttttgccaagctttattgccctgtgttcacagcaataaaaccacttcctgctgcattctaa

SEQ ID NO: 438374 - DNA, 1025 bp, Homo sapiens
gagttttcagtcatgttgtttctttaagttggtttagccttcctgtatacatgtgataatgatactgttttaaagaacaggtgtgaaagtctaagagtttaatccagactctgcacaagaagttaatctgccaaaccctaggattctccttctgaaagctcagaatatttcttccccttccctatacacacagggctcgaagggttagagaagaaaggcagacaacagcttctgagctttggactaatcacagcctctgttctcagcaggagccccaacactgagaccagaaaagatggtgctatgctttcctcttcttttactgctgctggttctatggggaccagtgtgtccacttcatgcttggcctaagcgtctcaccaaggctcactggtttgaaattcagcatatacagccaagtcctctccaatgcaacagggcaatgagtggcatcaacaattatacccagcactgtaagcatcaaaatacctttctgcatgactctttccagaatgtggctgctgtctgtgatttgctcagcattgtctgcaaaaatcgtcggcacaactgccaccagagctcaaagcctgtcaacatgactgactgcagactcacttcaggaaagtatccccagtgccgctatagtgctgctgcccagtacaaattcttcattgttagcgcgtgctgtcccacacttcgatcgcggagaaggcaaaggagttaaagatgatatctggagcagcacaactcacaatcgcaaagatgtggaaccaacctaactgcccatcaagcaatgagtggataaagaaaatgtggtatatatacaccatggaatactactcagccacaaaaaggaacgtaaataataccctttgcagcaacttggacggagctggaggcctattatcctaagtaaagtaattcaggaatggataccaaatatcatatgttctcacttatgagtagatgctaagtctatgatgatgcaatagacataagtatgatatagctttccgtctccctct

SEQ ID NO: 438375 - DNA, 1063 bp, Homo sapiens
gagttttcagtcatgttgtttctttaagttggtttagccttcctgtatacatgtgataatgatactgttttaaagaacaggtgtgaaagtctaagagtttaatccagactctgcacaagaagttaatctgccaaaccctaggattctccttctgaaagctcagaatatttcttccccttccctatacacacagggctcgaagggttagagaagaaaggcagacaacagcttctgagctttggactaatcacagcctctgttctcagcaggagccccaacactgagaccagaaaagatggtgctatgctttcctcttcttttactgctgctggttctatggggaccagtgtgtccacttcatgcttggcctaagcgtctcaccaaggctcactggtttgaaattcagcatatacagccaagtcctctccaatgcaacagggcaatgagtggcatcaacaattatacccagcactgtaagcatcaaaatacctttctgcatgactctttccagaatgtggctgctgtctgtgatttgctcagcattgtctgcaaaaatcgtcggcacaactgccaccagagctcaaagcctgtcaacatgactgactgcagactcacttcaggaaagtatccccagtgccgctatagtgctgctgcccagtacaaattcttcattgttgcctgtgacccccctcagaagagcgatcccccctacaagttggttcctgtacacttagatagtattctctaaggcatccactgcatttcctttcatttgacatagcttctgttacaattgcatccacgttttcttttcttttgttgattttcttgttcccgtagaagaaagaagaaaggtgtttggagaattcgagtgcctaggatgccagaccagagttgagacaaaaagaaataagattattttctgctttgtagttctgtacttttcgagagaagggaatagggaagacagcaaagaaagattcagatttctaaccctgcaacttttgccaagctttattgccctgtgttcacagcaataaaaccacttcctgctgcattctaa

SEQ ID NO: 438376 - DNA, 4126 bp, Homo sapiens
gctgggtcaatagtacttgccgcagtactcttaaaactagcgatggaggcttcgacatgggctttagggagtcataagtggagtccggaaagaggtatctgtactataaaagctattgtgtaagctagtcatattaagttgttggctcaggagtttgaagtccttgagagaggattatgatgcgacgtgagtgcgttcgtaatttgagtctgcttggcagatagtaatgaggatgtaagcccgtgggcgattatgagaatgactgcgccggtgaagcttcagggggtttggatgagaatggctgttactacgagggctatgtggctgattgaagagtatgcaatgagcgattttaggtctgtttgtcgtaggcagatggagcttgttataattatgcctcatagggatagtacaaggaaggggtaggctatgtgttttgtcagggagttgagaaactgtggcacaaggcgagagctggtttcctctgccctgttagagctgggggactcttcagagtcaaaggccagagagcatggagctgagtggagccaccatggcccgggggctcgctgtcctgctagtcttgttcctgcatatcaagaacctgcctgcccaggctgcggacacatgtccagaggtgaaggtggtgggcctggagggctctgacaagctcaccattctccgaggctgcccggggctgcccggggccccagggccaaagggagaggcaggtgtcattggagagagaggagaacgcggtctccctggagcccctggaaaggcaggaccagtggggcccaaaggagaccgaggagagaaggggatgcgtggagagaaaggagacgctgggcagtctcagtcgtgtgcgacaggcccacgcaactgcaaggacctgctagaccgggggtatttcctgagcggctggcacaccatctacctgcccgactgccggcccctgactgtgctctgtgacatggacacggacggagggggctggaccgttttccagcggaggatggatggctctgtggacttctatcgggactgggccgcatacaagcagggcttcggcagtcagctgggggagttctggctggggaacgacaacatccacgccctgactgcccagggaagcagcgagctccgtgtagacctggtggactttgagggcaaccaccagtttgctaagtacaaatcattcaaggtggctgacgaggcagagaagtacaagctggtactgggagcctttgtcgggggcagtgcgggtaattctctaacgggccacaacaacaacttcttctccaccaaagaccaagacaatgatgtgagttcttcgaattgtgctgagaagttccagggagcctggtggtacgccgactgtcatgcttcaaacctcaatggtctctacctcatgggaccccatgagagctatgccaatggtatcaactggagtgcggcgaaggggtacaaatatagctacaaggtgtcagagatgaaggtgcggcccgcctagacgggccaggacccctccacatgcacctgctagtggggaggccacacccacaagcgctgcgtcgtggaagtcaccccatttccccagccagacacactcccatgacgcccacagctgcccctttgcccccagctcagtcaagccgccacatgcccacaacctcaccagagggagaattatgtttctaaatatgtttactttgggacagaaaagttttaccagtttcagtgtgtgtttcttgaacaccagtggttttgatcactttcctgtgtctgttgcacggcaggtctttccctggaatttggtaagtcgggaagagtcaggaccctcatttagcagatggcactaccgatgttcagggaggttgagtgacttttgcgaggattttccacctccagtaattgacacagggcgatcctcacctccacccccaagcctcccccatccccccatgcctcactcacaacacttcacacttcttgaaaaaggtcactttggggtccagaaaacacttactaaaaagggggaaagtttagtaggaacttttctgcttcccaccacggcagagttcatgctttgggctggctggctgctgggaagagataaacacttagcactcactaagtgagcgcctggtcagccacctgcacagagaagattccgaagaggccttcctcccacacacagacctcagctagaggggaccgcggacctcagtgggaaaagctgcacaaggcttctaggagatgatggagaaggggcttctccagctcccaggccaggggagatttctcaaccacgacctaagaagcatcaaagggaatgtggcaagtgtgactccattcaaatcaagagctcccacttaccgaaggacactaagggaaccaaaggaaggccagaggggcagaatcaccgtgcggcacacaaatctttagttttctactattgccgcaaccagtcaccacaaatggagtggcttgaaacaacaagaactcgccacctcctggctcagtagatctggagtccctgggccttactgggccagcaggcaggactcagcagtggtggctccttccagggttctaggggagaacctgcttccttgccttttccagccccaggggtcactggcattcattggcccggactccttcccccaaccccaaagccagcagcaccacatctctctgacccttcatccgttgtcccctctccccccaagccccatgggacagggtctccactcctgagactcatgggattagactaggcctacctggatgatctgggatcctctcccatgtccaggtctctatccctaaccacatcagcaaagtctcttttgccatggaaggtatttgcaggctctgactttgtgtgtattagggcaggacatttttggcggggcagtggtgggggcagggaattattctgcctaccatgccttatacaaaaataaataaatcacaggcttatacctgaaagaattcctgcaaataataaaagaattagagcagctcagttaaataaaaaaaggtatgagatgtgaacagacacttcacagaagatgacatgcaggggagcaaggtatttatcaaaaagtgctccacttttcacttaccagagaaatgcaaatcagcacccaaaggagtcactgcggcaccctcatctgagcctcagaagttagaaagatggatagcaccagtgtcaaaggtgactgtgggagggagatttgcatacactgctagtaacaatgcgaattgatggaaccaacctggaaaatggcttggcatcaactgttggagaagaagacacacagtcctctaacctgccagtcccacatcagggcctggatatggccgtcatgtgtaccagggagcatggccaggaatctttacagccaaatactcaccatagcaccaaactggaatcagccgacatacccatcaggaagagaatggatgttaaaaaatgcaaggatagccattgggtagaacgccatacagccatgacaattacacagtgacacctacacacaaggagcatgagtctcacaaacatggcagcaaaaggagcctgttcaagagggtatgtgctatggattccattgtagataaagtttttcaaaagcaaaagtagccaatggtattttggatgcatatttaggtggtaaatgtatacaggaaaaataagaaagtgattgtatttgagggtgggaccacatggtgactgggaagggacagggacaagcctctgggattctggcaatgctctgtttcttgacccaggtggtgattgtaaggatgtttgttaactagtgatgaaaataattaagctgtacttttgctttatacacttttgagtacatgttatgttccacaatttaaaaactacttataaagaaatgcactccagcctgggcgacagagcgagattctgtctcaaaataaaagaagcaaagcaagcttatgaagagatgaagagtcttttcccatcaccaattcctccccaactcacatcagcagaactgagagagcttttgtgatttgagggataaagctgaatgggtgaaaagaaatcaagccctcctcctcttgggccagtgctcttctt

SEQ ID NO: 438377 - DNA, 3233 bp, Homo sapiens
tgcggagtacgcatgcagactgctaacagggataccctagcggtggaacattactgccgactgcgcctgatgtctctgtgacatgacacggacgtagggggctgaccgttttccagcggaggatggatggctctgtggacttctatcgggactgggccgcatacaagcagggcttcggcagtcagctgggggagttctggctggggaacgacaacatccacgccctgactgcccagggaagcagcgagctccgtgtagacctggtggactttgagggcaaccaccagtttgctaagtacaaatcattcaaggtggctgacgaggcagagaagtacaagctggtactgggagcctttgtcgggggcagtgcgggtaattctctaacgggccacaacaacaacttcttctccaccaaagaccaagacaatgatgtgagttcttcgaattgtgctgagaagttccagggagcctggtggtacgccgactgtcatgcttcaaacctcaatggtctctacctcatgggaccccatgagagctatgccaatggtatcaactggagtgcggcgaaggggtacaaatatagctacaaggtgtcagagatgaaggtgcggcccgcctagacgggccaggacccctccacatgcacctgctagtggggaggccacacccacaagcgctgcgtcgtggaagtcaccccatttccccagccagacacactcccatgacgcccacagctgcccctttgcccccagctcagtcaagccgccacatgcccacaacctcaccagagggagaattatgtttctaaatatgtttactttgggacagaaaagttttaccagtttcagtgtgtgtttcttgaacaccagtggttttgatcactttcctgtgtctgttgcacggcaggtctttccctggaatttggtaagtcgggaagagtcaggaccctcatttagcagatggcactaccgatgttcagggaggttgagtgacttttgcgaggattttccacctccagtaattgacacagggcgatcctcacctccacccccaagcctcccccatccccccatgcctcactcacaacacttcacacttcttgaaaaaggtcactttggggtccagaaaacacttactaaaaagggggaaagtttagtaggaacttttctgcttcccaccacggcagagttcatgctttgggctggctggctgctgggaagagataaacacttagcactcactaagtgagcgcctggtcagccacctgcacagagaagattccgaagaggccttcctcccacacacagacctcagctagaggggaccgcggacctcagtgggaaaagctgcacaaggcttctaggagatgatggagaaggggcttctccagctcccaggccaggggagatttctcaaccacgacctaagaagcatcaaagggaatgtggcaagtgtgactccattcaaatcaagagctcccacttaccgaaggacactaagggaaccaaaggaaggccagaggggcagaatcaccgtgcggcacacaaatctttagttttctactattgccgcaaccagtcaccacaaatggagtggcttgaaacaacaagaactcgccacctcctggctcagtagatctggagtccctgggccttactgggccagcaggcaggactcagcagtggtggctccttccagggttctaggggagaacctgcttccttgccttttccagccccaggggtcactggcattcattggcccggactccttcccccaaccccaaagccagcagcaccacatctctctgacccttcatccgttgtcccctctccccccaagccccatgggacagggtctccactcctgagactcatgggattagactaggcctacctggatgatctgggatcctctcccatgtccaggtctctatccctaaccacatcagcaaagtctcttttgccatggaaggtatttgcaggctctgactttgtgtgtattagggcaggacatttttggcggggcagtggtgggggcagggaattattctgcctaccatgccttatacaaaaataaataaatcacaggcttatacctgaaagaattcctgcaaataataaaagaattagagcagctcagttaaataaaaaaaggtatgagatgtgaacagacacttcacagaagatgacatgcaggggagcaaggtatttatcaaaaagtgctccacttttcacttaccagagaaatgcaaatcagcacccaaaggagtcactgcggcaccctcatctgagcctcagaagttagaaagatggatagcaccagtgtcaaaggtgactgtgggagggagatttgcatacactgctagtaacaatgcgaattgatggaaccaacctggaaaatggcttggcatcaactgttggagaagaagacacacagtcctctaacctgccagtcccacatcagggcctggatatggccgtcatgtgtaccagggagcatggccaggaatctttacagccaaatactcaccatagcaccaaactggaatcagccgacatacccatcaggaagagaatggatgttaaaaaatgcaaggatagccattgggtagaacgccatacagccatgacaattacacagtgacacctacacacaaggagcatgagtctcacaaacatggcagcaaaaggagcctgttcaagagggtatgtgctatggattccattgtagataaagtttttcaaaagcaaaagtagccaatggtattttggatgcatatttaggtggtaaatgtatacaggaaaaataagaaagtgattgtatttgagggtgggaccacatggtgactgggaagggacagggacaagcctctgggattctggcaatgctctgtttcttgacccaggtggtgattgtaaggatgtttgttaactagtgatgaaaataattaagctgtacttttgctttatacacttttgagtacatgttatgttccacaatttaaaaactacttataaagaaatgcactccagcctgggcgacagagcgagattctgtctcaaaataaaagaagcaaagcaagcttatgaagagatgaagagtcttttcccatcaccaattcctccccaactcacatcagcagaactgagagagcttttgtgatttgagggataaagctgaatgggtgaaaagaaatcaagccctcctcctcttgggccagtgctcttctt

SEQ ID NO: 438378 - DNA, 2999 bp, Homo sapiens
aacatatttagaaacatattctccctctggtggactttgagggcaaccaccagtttgctaagtacaaatcattcaaggtggctgacgaggcagagaagtacaagctggtactgggagcctttgtcgggggcagtgcgggtaattctctaacgggccacaacaacaacttcttctccaccaaagaccaagacaatgatgtgagttcttcgaattgtgctgagaagttccagggagcctggtggtacgccgactgtcatgcttcaaacctcaatggtctctacctcatgggaccccatgagagctatgccaatggtatcaactggagtgcggcgaaggggtacaaatatagctacaaggtgtcagagatgaaggtgcggcccgcctagacgggccaggacccctccacatgcacctgctagtggggaggccacacccacaagcgctgcgtcgtggaagtcaccccatttccccagccagacacactcccatgacgcccacagctgcccctttgcccccagctcagtcaagccgccacatgcccacaacctcaccagagggagaattatgtttctaaatatgtttactttgggacagaaaagttttaccagtttcagtgtgtgtttcttgaacaccagtggttttgatcactttcctgtgtctgttgcacggcaggtctttccctggaatttggtaagtcgggaagagtcaggaccctcatttagcagatggcactaccgatgttcagggaggttgagtgacttttgcgaggattttccacctccagtaattgacacagggcgatcctcacctccacccccaagcctcccccatccccccatgcctcactcacaacacttcacacttcttgaaaaaggtcactttggggtccagaaaacacttactaaaaagggggaaagtttagtaggaacttttctgcttcccaccacggcagagttcatgctttgggctggctggctgctgggaagagataaacacttagcactcactaagtgagcgcctggtcagccacctgcacagagaagattccgaagaggccttcctcccacacacagacctcagctagaggggaccgcggacctcagtgggaaaagctgcacaaggcttctaggagatgatggagaaggggcttctccagctcccaggccaggggagatttctcaaccacgacctaagaagcatcaaagggaatgtggcaagtgtgactccattcaaatcaagagctcccacttaccgaaggacactaagggaaccaaaggaaggccagaggggcagaatcaccgtgcggcacacaaatctttagttttctactattgccgcaaccagtcaccacaaatggagtggcttgaaacaacaagaactcgccacctcctggctcagtagatctggagtccctgggccttactgggccagcaggcaggactcagcagtggtggctccttccagggttctaggggagaacctgcttccttgccttttccagccccaggggtcactggcattcattggcccggactccttcccccaaccccaaagccagcagcaccacatctctctgacccttcatccgttgtcccctctccccccaagccccatgggacagggtctccactcctgagactcatgggattagactaggcctacctggatgatctgggatcctctcccatgtccaggtctctatccctaaccacatcagcaaagtctcttttgccatggaaggtatttgcaggctctgactttgtgtgtattagggcaggacatttttggcggggcagtggtgggggcagggaattattctgcctaccatgccttatacaaaaataaataaatcacaggcttatacctgaaagaattcctgcaaataataaaagaattagagcagctcagttaaataaaaaaaggtatgagatgtgaacagacacttcacagaagatgacatgcaggggagcaaggtatttatcaaaaagtgctccacttttcacttaccagagaaatgcaaatcagcacccaaaggagtcactgcggcaccctcatctgagcctcagaagttagaaagatggatagcaccagtgtcaaaggtgactgtgggagggagatttgcatacactgctagtaacaatgcgaattgatggaaccaacctggaaaatggcttggcatcaactgttggagaagaagacacacagtcctctaacctgccagtcccacatcagggcctggatatggccgtcatgtgtaccagggagcatggccaggaatctttacagccaaatactcaccatagcaccaaactggaatcagccgacatacccatcaggaagagaatggatgttaaaaaatgcaaggatagccattgggtagaacgccatacagccatgacaattacacagtgacacctacacacaaggagcatgagtctcacaaacatggcagcaaaaggagcctgttcaagagggtatgtgctatggattccattgtagataaagtttttcaaaagcaaaagtagccaatggtattttggatgcatatttaggtggtaaatgtatacaggaaaaataagaaagtgattgtatttgagggtgggaccacatggtgactgggaagggacagggacaagcctctgggattctggcaatgctctgtttcttgacccaggtggtgattgtaaggatgtttgttaactagtgatgaaaataattaagctgtacttttgctttatacacttttgagtacatgttatgttccacaatttaaaaactacttataaagaaatgcactccagcctgggcgacagagcgagattctgtctcaaaataaaagaagcaaagcaagcttatgaagagatgaagagtcttttcccatcaccaattcctccccaactcacatcagcagaactgagagagcttttgtgatttgagggataaagctgaatgggtgaaaagaaatcaagccctcctcctcttgggccagtgctcttctt

SEQ ID NO: 438379 - DNA, 3376 bp, Homo sapiens
ccaaggaaggcagcagggcagggaaggtcacccccattttgcaggtggtaaaaccgaggctcagggggtgacatttctcagctataggagccagggatgagcttccggctcagggcttgagatagaggagaagcccccaggtgagggctgtcctgaacctaccaagggccaccaggggacgtggggagagaccggaaggagcggtgcaggctggaggagggaggtcattccaggagagagcacgaggcctgacactttgcgggagccctggaggaaacaggtggttgctggagcaggggcctcaggttgtggagagagatttccagaccaggttgccagaggttgcctcctgcttccccttcctccaaggcctgggtgggtcatttgtgcacctgtagctcggctcatgcgtcgctaaagtgaggttggctctgctcagaggcaggatgtggtgagggtctcacagtggcagggctttttccagcatctgcaaaccccacattttctgtgagcaggtaattctctaacgggccacaacaacaacttcttctccaccaaagaccaagacaatgatgtgagttcttcgaattgtgctgagaagttccagggagcctggtggtacgccgactgtcatgcttcaaacctcaatggtctctacctcatgggaccccatgagagctatgccaatggtatcaactggagtgcggcgaaggggtacaaatatagctacaaggtgtcagagatgaaggtgcggcccgcctagacgggccaggacccctccacatgcacctgctagtggggaggccacacccacaagcgctgcgtcgtggaagtcaccccatttccccagccagacacactcccatgacgcccacagctgcccctttgcccccagctcagtcaagccgccacatgcccacaacctcaccagagggagaattatgtttctaaatatgtttactttgggacagaaaagttttaccagtttcagtgtgtgtttcttgaacaccagtggttttgatcactttcctgtgtctgttgcacggcaggtctttccctggaatttggtaagtcgggaagagtcaggaccctcatttagcagatggcactaccgatgttcagggaggttgagtgacttttgcgaggattttccacctccagtaattgacacagggcgatcctcacctccacccccaagcctcccccatccccccatgcctcactcacaacacttcacacttcttgaaaaaggtcactttggggtccagaaaacacttactaaaaagggggaaagtttagtaggaacttttctgcttcccaccacggcagagttcatgctttgggctggctggctgctgggaagagataaacacttagcactcactaagtgagcgcctggtcagccacctgcacagagaagattccgaagaggccttcctcccacacacagacctcagctagaggggaccgcggacctcagtgggaaaagctgcacaaggcttctaggagatgatggagaaggggcttctccagctcccaggccaggggagatttctcaaccacgacctaagaagcatcaaagggaatgtggcaagtgtgactccattcaaatcaagagctcccacttaccgaaggacactaagggaaccaaaggaaggccagaggggcagaatcaccgtgcggcacacaaatctttagttttctactattgccgcaaccagtcaccacaaatggagtggcttgaaacaacaagaactcgccacctcctggctcagtagatctggagtccctgggccttactgggccagcaggcaggactcagcagtggtggctccttccagggttctaggggagaacctgcttccttgccttttccagccccaggggtcactggcattcattggcccggactccttcccccaaccccaaagccagcagcaccacatctctctgacccttcatccgttgtcccctctccccccaagccccatgggacagggtctccactcctgagactcatgggattagactaggcctacctggatgatctgggatcctctcccatgtccaggtctctatccctaaccacatcagcaaagtctcttttgccatggaaggtatttgcaggctctgactttgtgtgtattagggcaggacatttttggcggggcagtggtgggggcagggaattattctgcctaccatgccttatacaaaaataaataaatcacaggcttatacctgaaagaattcctgcaaataataaaagaattagagcagctcagttaaataaaaaaaggtatgagatgtgaacagacacttcacagaagatgacatgcaggggagcaaggtatttatcaaaaagtgctccacttttcacttaccagagaaatgcaaatcagcacccaaaggagtcactgcggcaccctcatctgagcctcagaagttagaaagatggatagcaccagtgtcaaaggtgactgtgggagggagatttgcatacactgctagtaacaatgcgaattgatggaaccaacctggaaaatggcttggcatcaactgttggagaagaagacacacagtcctctaacctgccagtcccacatcagggcctggatatggccgtcatgtgtaccagggagcatggccaggaatctttacagccaaatactcaccatagcaccaaactggaatcagccgacatacccatcaggaagagaatggatgttaaaaaatgcaaggatagccattgggtagaacgccatacagccatgacaattacacagtgacacctacacacaaggagcatgagtctcacaaacatggcagcaaaaggagcctgttcaagagggtatgtgctatggattccattgtagataaagtttttcaaaagcaaaagtagccaatggtattttggatgcatatttaggtggtaaatgtatacaggaaaaataagaaagtgattgtatttgagggtgggaccacatggtgactgggaagggacagggacaagcctctgggattctggcaatgctctgtttcttgacccaggtggtgattgtaaggatgtttgttaactagtgatgaaaataattaagctgtacttttgctttatacacttttgagtacatgttatgttccacaatttaaaaactacttataaagaaatgcactccagcctgggcgacagagcgagattctgtctcaaaataaaagaagcaaagcaagcttatgaagagatgaagagtcttttcccatcaccaattcctccccaactcacatcagcagaactgagagagcttttgtgatttgagggataaagctgaatgggtgaaaagaaatcaagccctcctcctcttgggccagtgctcttctt

SEQ ID NO: 438380 - DNA, 1750 bp, Homo sapiens
gctgggtcaatagtacttgccgcagtactcttaaaactagcgatggaggcttcgacatgggctttagggagtcataagtggagtccggaaagaggtatctgtactataaaagctattgtgtaagctagtcatattaagttgttggctcaggagtttgaagtccttgagagaggattatgatgcgacgtgagtgcgttcgtaatttgagtctgcttggcagatagtaatgaggatgtaagcccgtgggcgattatgagaatgactgcgccggtgaagcttcagggggtttggatgagaatggctgttactacgagggctatgtggctgattgaagagtatgcaatgagcgattttaggtctgtttgtcgtaggcagatggagcttgttataattatgcctcatagggatagtacaaggaaggggtaggctatgtgttttgtcagggagttgagaaactgtggcacaaggcgagagctggtttcctctgccctgttagagctgggggactcttcagagtcaaaggccagagagcatggagctgagtggagccaccatggcccgggggctcgctgtcctgctagtcttgttcctgcatatcaagaacctgcctgcccaggctgcggacacatgtccagaggtgaaggtggtgggcctggagggctctgacaagctcaccattctccgaggctgcccggggctgcccggggccccagggccaaagggagaggcaggtgtcattggagagagaggagaacgcggtctccctggagcccctggaaaggcaggaccagtggggcccaaaggagaccgaggagagaaggggatgcgtggagagaaaggagacgctgggcagtctcagtcgtgtgcgacaggcccacgcaactgcaaggacctgctagaccgggggtatttcctgagcggctggcacaccatctacctgcccgactgccggcccctgactgtgctctgtgacatggacacggacggagggggctggaccgttttccagcggaggatggatggctctgtggacttctatcgggactgggccgcatacaagcagggcttcggcagtcagctgggggagttctggctggggaacgacaacatccacgccctgactgcccagggtagggccactgccgtggctcaggggttggggggccctgaggtgctcctgccccttaggcctgggccatctgcaacataagcacctcttggcccacaggggattgggccctgagcacactcaggtggcactgggacctctaagggctgcgtcccctgccgcaggctctggcaacatcgggaagggaaacggttagagccctgggctgaaggcctcttcaggtcttggtcctactggcatcttagatcctgagagtgggaagcaggagagagaccactggggcttggggtagccttcccccatctccagctgttgatctgcctctgaagctggcatcttagtcccatggagagcccacgctcgcctcctccagcccacgcctcagcaggccccccacagccgcactcacctgagtgagagggcctccccccaaccctctggggcaggggatgagtttcacagctggtcctgaggcagtctgtataattgctggtccattatccctgcccactgccctgtggcatgattgaaggaatccactcaggtgcctcaaattcctgcaaaagaaactacaattagagccaagccccatgcggcttggctatgtgttttgtcaggcgg

SEQ ID NO: 438381 - DNA, 3277 bp, Homo sapiens
cattccccgggttcccttcccaggcccacgcaactgcaaggacctgctagaccgggggtatttcctgagcggctggcacaccatctacctgcccgactgccggcccctgactgtgctctgtgacatggacacggacggagggggctggaccgttttccagcggaggatggatggctctgtggacttctatcgggactgggccgcatacaagcagggcttcggcagtcagctgggggagttctggctggggaacgacaacatccacgccctgactgcccagggaagcagcgagctccgtgtagacctggtggactttgagggcaaccaccagtttgctaagtacaaatcattcaaggtggctgacgaggcagagaagtacaagctggtactgggagcctttgtcgggggcagtgcgggtaattctctaacgggccacaacaacaacttcttctccaccaaagaccaagacaatgatgtgagttcttcgaattgtgctgagaagttccagggagcctggtggtacgccgactgtcatgcttcaaacctcaatggtctctacctcatgggaccccatgagagctatgccaatggtatcaactggagtgcggcgaaggggtacaaatatagctacaaggtgtcagagatgaaggtgcggcccgcctagacgggccaggacccctccacatgcacctgctagtggggaggccacacccacaagcgctgcgtcgtggaagtcaccccatttccccagccagacacactcccatgacgcccacagctgcccctttgcccccagctcagtcaagccgccacatgcccacaacctcaccagagggagaattatgtttctaaatatgtttactttgggacagaaaagttttaccagtttcagtgtgtgtttcttgaacaccagtggttttgatcactttcctgtgtctgttgcacggcaggtctttccctggaatttggtaagtcgggaagagtcaggaccctcatttagcagatggcactaccgatgttcagggaggttgagtgacttttgcgaggattttccacctccagtaattgacacagggcgatcctcacctccacccccaagcctcccccatccccccatgcctcactcacaacacttcacacttcttgaaaaaggtcactttggggtccagaaaacacttactaaaaagggggaaagtttagtaggaacttttctgcttcccaccacggcagagttcatgctttgggctggctggctgctgggaagagataaacacttagcactcactaagtgagcgcctggtcagccacctgcacagagaagattccgaagaggccttcctcccacacacagacctcagctagaggggaccgcggacctcagtgggaaaagctgcacaaggcttctaggagatgatggagaaggggcttctccagctcccaggccaggggagatttctcaaccacgacctaagaagcatcaaagggaatgtggcaagtgtgactccattcaaatcaagagctcccacttaccgaaggacactaagggaaccaaaggaaggccagaggggcagaatcaccgtgcggcacacaaatctttagttttctactattgccgcaaccagtcaccacaaatggagtggcttgaaacaacaagaactcgccacctcctggctcagtagatctggagtccctgggccttactgggccagcaggcaggactcagcagtggtggctccttccagggttctaggggagaacctgcttccttgccttttccagccccaggggtcactggcattcattggcccggactccttcccccaaccccaaagccagcagcaccacatctctctgacccttcatccgttgtcccctctccccccaagccccatgggacagggtctccactcctgagactcatgggattagactaggcctacctggatgatctgggatcctctcccatgtccaggtctctatccctaaccacatcagcaaagtctcttttgccatggaaggtatttgcaggctctgactttgtgtgtattagggcaggacatttttggcggggcagtggtgggggcagggaattattctgcctaccatgccttatacaaaaataaataaatcacaggcttatacctgaaagaattcctgcaaataataaaagaattagagcagctcagttaaataaaaaaaggtatgagatgtgaacagacacttcacagaagatgacatgcaggggagcaaggtatttatcaaaaagtgctccacttttcacttaccagagaaatgcaaatcagcacccaaaggagtcactgcggcaccctcatctgagcctcagaagttagaaagatggatagcaccagtgtcaaaggtgactgtgggagggagatttgcatacactgctagtaacaatgcgaattgatggaaccaacctggaaaatggcttggcatcaactgttggagaagaagacacacagtcctctaacctgccagtcccacatcagggcctggatatggccgtcatgtgtaccagggagcatggccaggaatctttacagccaaatactcaccatagcaccaaactggaatcagccgacatacccatcaggaagagaatggatgttaaaaaatgcaaggatagccattgggtagaacgccatacagccatgacaattacacagtgacacctacacacaaggagcatgagtctcacaaacatggcagcaaaaggagcctgttcaagagggtatgtgctatggattccattgtagataaagtttttcaaaagcaaaagtagccaatggtattttggatgcatatttaggtggtaaatgtatacaggaaaaataagaaagtgattgtatttgagggtgggaccacatggtgactgggaagggacagggacaagcctctgggattctggcaatgctctgtttcttgacccaggtggtgattgtaaggatgtttgttaactagtgatgaaaataattaagctgtacttttgctttatacacttttgagtacatgttatgttccacaatttaaaaactacttataaagaaatgcactccagcctgggcgacagagcgagattctgtctcaaaataaaagaagcaaagcaagcttatgaagagatgaagagtcttttcccatcaccaattcctccccaactcacatcagcagaactgagagagcttttgtgatttgagggataaagctgaatgggtgaaaagaaatcaagccctcctcctcttgggccagtgctcttctt

SEQ ID NO: 438382 - DNA, 2915 bp, Homo sapiens
ggccgatctctgaggatccccaacccgggaccgcttttgtcgggggcagtgcgggtaattctctaacgggccacaacaacaacttcttctccaccaaagaccaagacaatgatgtgagttcttcgaattgtgctgagaagttccagggagcctggtggtacgccgactgtcatgcttcaaacctcaatggtctctacctcatgggaccccatgagagctatgccaatggtatcaactggagtgcggcgaaggggtacaaatatagctacaaggtgtcagagatgaaggtgcggcccgcctagacgggccaggacccctccacatgcacctgctagtggggaggccacacccacaagcgctgcgtcgtggaagtcaccccatttccccagccagacacactcccatgacgcccacagctgcccctttgcccccagctcagtcaagccgccacatgcccacaacctcaccagagggagaattatgtttctaaatatgtttactttgggacagaaaagttttaccagtttcagtgtgtgtttcttgaacaccagtggttttgatcactttcctgtgtctgttgcacggcaggtctttccctggaatttggtaagtcgggaagagtcaggaccctcatttagcagatggcactaccgatgttcagggaggttgagtgacttttgcgaggattttccacctccagtaattgacacagggcgatcctcacctccacccccaagcctcccccatccccccatgcctcactcacaacacttcacacttcttgaaaaaggtcactttggggtccagaaaacacttactaaaaagggggaaagtttagtaggaacttttctgcttcccaccacggcagagttcatgctttgggctggctggctgctgggaagagataaacacttagcactcactaagtgagcgcctggtcagccacctgcacagagaagattccgaagaggccttcctcccacacacagacctcagctagaggggaccgcggacctcagtgggaaaagctgcacaaggcttctaggagatgatggagaaggggcttctccagctcccaggccaggggagatttctcaaccacgacctaagaagcatcaaagggaatgtggcaagtgtgactccattcaaatcaagagctcccacttaccgaaggacactaagggaaccaaaggaaggccagaggggcagaatcaccgtgcggcacacaaatctttagttttctactattgccgcaaccagtcaccacaaatggagtggcttgaaacaacaagaactcgccacctcctggctcagtagatctggagtccctgggccttactgggccagcaggcaggactcagcagtggtggctccttccagggttctaggggagaacctgcttccttgccttttccagccccaggggtcactggcattcattggcccggactccttcccccaaccccaaagccagcagcaccacatctctctgacccttcatccgttgtcccctctccccccaagccccatgggacagggtctccactcctgagactcatgggattagactaggcctacctggatgatctgggatcctctcccatgtccaggtctctatccctaaccacatcagcaaagtctcttttgccatggaaggtatttgcaggctctgactttgtgtgtattagggcaggacatttttggcggggcagtggtgggggcagggaattattctgcctaccatgccttatacaaaaataaataaatcacaggcttatacctgaaagaattcctgcaaataataaaagaattagagcagctcagttaaataaaaaaaggtatgagatgtgaacagacacttcacagaagatgacatgcaggggagcaaggtatttatcaaaaagtgctccacttttcacttaccagagaaatgcaaatcagcacccaaaggagtcactgcggcaccctcatctgagcctcagaagttagaaagatggatagcaccagtgtcaaaggtgactgtgggagggagatttgcatacactgctagtaacaatgcgaattgatggaaccaacctggaaaatggcttggcatcaactgttggagaagaagacacacagtcctctaacctgccagtcccacatcagggcctggatatggccgtcatgtgtaccagggagcatggccaggaatctttacagccaaatactcaccatagcaccaaactggaatcagccgacatacccatcaggaagagaatggatgttaaaaaatgcaaggatagccattgggtagaacgccatacagccatgacaattacacagtgacacctacacacaaggagcatgagtctcacaaacatggcagcaaaaggagcctgttcaagagggtatgtgctatggattccattgtagataaagtttttcaaaagcaaaagtagccaatggtattttggatgcatatttaggtggtaaatgtatacaggaaaaataagaaagtgattgtatttgagggtgggaccacatggtgactgggaagggacagggacaagcctctgggattctggcaatgctctgtttcttgacccaggtggtgattgtaaggatgtttgttaactagtgatgaaaataattaagctgtacttttgctttatacacttttgagtacatgttatgttccacaatttaaaaactacttataaagaaatgcactccagcctgggcgacagagcgagattctgtctcaaaataaaagaagcaaagcaagcttatgaagagatgaagagtcttttcccatcaccaattcctccccaactcacatcagcagaactgagagagcttttgtgatttgagggataaagctgaatgggtgaaaagaaatcaagccctcctcctcttgggccagtgctcttctt

SEQ ID NO: 438383 - DNA, 2947 bp, Homo sapiens
  misc_feature (62)..(62): n is a, c, g, or t
acgaggcagagaagtacaagctggtactgggagcgactttttgggtttcccccggggggggnggggaaggggggggggcagtgcgggtaattctctaacgggccacaacaacaacttcttctccaccaaagaccaagacaatgatgtgagttcttcgaattgtgctgagaagttccagggagcctggtggtacgccgactgtcatgcttcaaacctcaatggtctctacctcatgggaccccatgagagctatgccaatggtatcaactggagtgcggcgaaggggtacaaatatagctacaaggtgtcagagatgaaggtgcggcccgcctagacgggccaggacccctccacatgcacctgctagtggggaggccacacccacaagcgctgcgtcgtggaagtcaccccatttccccagccagacacactcccatgacgcccacagctgcccctttgcccccagctcagtcaagccgccacatgcccacaacctcaccagagggagaattatgtttctaaatatgtttactttgggacagaaaagttttaccagtttcagtgtgtgtttcttgaacaccagtggttttgatcactttcctgtgtctgttgcacggcaggtctttccctggaatttggtaagtcgggaagagtcaggaccctcatttagcagatggcactaccgatgttcagggaggttgagtgacttttgcgaggattttccacctccagtaattgacacagggcgatcctcacctccacccccaagcctcccccatccccccatgcctcactcacaacacttcacacttcttgaaaaaggtcactttggggtccagaaaacacttactaaaaagggggaaagtttagtaggaacttttctgcttcccaccacggcagagttcatgctttgggctggctggctgctgggaagagataaacacttagcactcactaagtgagcgcctggtcagccacctgcacagagaagattccgaagaggccttcctcccacacacagacctcagctagaggggaccgcggacctcagtgggaaaagctgcacaaggcttctaggagatgatggagaaggggcttctccagctcccaggccaggggagatttctcaaccacgacctaagaagcatcaaagggaatgtggcaagtgtgactccattcaaatcaagagctcccacttaccgaaggacactaagggaaccaaaggaaggccagaggggcagaatcaccgtgcggcacacaaatctttagttttctactattgccgcaaccagtcaccacaaatggagtggcttgaaacaacaagaactcgccacctcctggctcagtagatctggagtccctgggccttactgggccagcaggcaggactcagcagtggtggctccttccagggttctaggggagaacctgcttccttgccttttccagccccaggggtcactggcattcattggcccggactccttcccccaaccccaaagccagcagcaccacatctctctgacccttcatccgttgtcccctctccccccaagccccatgggacagggtctccactcctgagactcatgggattagactaggcctacctggatgatctgggatcctctcccatgtccaggtctctatccctaaccacatcagcaaagtctcttttgccatggaaggtatttgcaggctctgactttgtgtgtattagggcaggacatttttggcggggcagtggtgggggcagggaattattctgcctaccatgccttatacaaaaataaataaatcacaggcttatacctgaaagaattcctgcaaataataaaagaattagagcagctcagttaaataaaaaaaggtatgagatgtgaacagacacttcacagaagatgacatgcaggggagcaaggtatttatcaaaaagtgctccacttttcacttaccagagaaatgcaaatcagcacccaaaggagtcactgcggcaccctcatctgagcctcagaagttagaaagatggatagcaccagtgtcaaaggtgactgtgggagggagatttgcatacactgctagtaacaatgcgaattgatggaaccaacctggaaaatggcttggcatcaactgttggagaagaagacacacagtcctctaacctgccagtcccacatcagggcctggatatggccgtcatgtgtaccagggagcatggccaggaatctttacagccaaatactcaccatagcaccaaactggaatcagccgacatacccatcaggaagagaatggatgttaaaaaatgcaaggatagccattgggtagaacgccatacagccatgacaattacacagtgacacctacacacaaggagcatgagtctcacaaacatggcagcaaaaggagcctgttcaagagggtatgtgctatggattccattgtagataaagtttttcaaaagcaaaagtagccaatggtattttggatgcatatttaggtggtaaatgtatacaggaaaaataagaaagtgattgtatttgagggtgggaccacatggtgactgggaagggacagggacaagcctctgggattctggcaatgctctgtttcttgacccaggtggtgattgtaaggatgtttgttaactagtgatgaaaataattaagctgtacttttgctttatacacttttgagtacatgttatgttccacaatttaaaaactacttataaagaaatgcactccagcctgggcgacagagcgagattctgtctcaaaataaaagaagcaaagcaagcttatgaagagatgaagagtcttttcccatcaccaattcctccccaactcacatcagcagaactgagagagcttttgtgatttgagggataaagctgaatgggtgaaaagaaatcaagccctcctcctcttgggccagtgctcttctt

SEQ ID NO: 438384 - DNA, 1745 bp, Homo sapiens
  misc_feature (1369)..(1369): n is a, c, g, or t
gctgggtcaatagtacttgccgcagtactcttaaaactagcgatggaggcttcgacatgggctttagggagtcataagtggagtccggaaagaggtatctgtactataaaagctattgtgtaagctagtcatattaagttgttggctcaggagtttgaagtccttgagagaggattatgatgcgacgtgagtgcgttcgtaatttgagtctgcttggcagatagtaatgaggatgtaagcccgtgggcgattatgagaatgactgcgccggtgaagcttcagggggtttggatgagaatggctgttactacgagggctatgtggctgattgaagagtatgcaatgagcgattttaggtctgtttgtcgtaggcagatggagcttgttataattatgcctcatagggatagtacaaggaaggggtaggctatgtgttttgtcagggagttgagaaactgtggcacaaggcgagagctggtttcctctgccctgttagagctgggggactcttcagagtcaaaggccagagagcatggagctgagtggagccaccatggcccgggggctcgctgtcctgctagtcttgttcctgcatatcaagaacctgcctgcccaggctgcggacacatgtccagaggtgaaggtggtgggcctggagggctctgacaagctcaccattctccgaggctgcccggggctgcccggggccccagggccaaagggagaggcaggtgtcattggagagagaggagaacgcggtctccctggagcccctggaaaggcaggaccagtggggcccaaaggagaccgaggagagaaggggatgcgtggagagaaaggagacgctgggcagtctcagtcgtgtgcgacaggcccacgcaactgcaaggacctgctagaccgggggtatttcctgagcggctggcacaccatctacctgcccgactgccggcccctgactgtgctctgtgacatggacacggacggagggggctggaccgttttccagcggaggatggatggctctgtggacttctatcgggactgggccgcatacaagcagggcttcggcagtcagctgggggagttctggctggggaacgacaacatccacgccctgactgcccaggaagcagcgagctccgtgtagaactggtggttgccctcaggagtccacgacgtcttgtcataagtcaaaaggtccatgcagaggcatggagcatgaggtgggagaccaacgctatggagcctgggtgagctgtggcatgctcccttgcttagtcatatgatgtcgctgcgattagtccaatgatacgcgtggctgaccacaagagactgcgtgtcatacattttacacgagaaggactcnaaggactgagatggaagtcgctgtgagtagcggcctccatgatcgaataggcgttcgagccaagttttctctcccgggaggacctcgcccccgtggggtacctggcccgcgaggtgattccccactgggcggtgccaagaaacagcggtgcagcaggggctccagtcgtagcccattccagggagcggaagccacgcacggtagacgaaaccgctgatgtgcgctcacagcttggggtaagtcccacacccttgggagagctggggccgaggggaaaacaaagggttgttaagcggcgccctaaataagcgggcaatgaccccaggagggggagcaaggaaacacgtgggaactcgggcgtcgacagggaagcccg

SEQ ID NO: 438385 - DNA, 3400 bp, Homo sapiens
gggggtggtgaggtgggggcagttaggaccctgtatgttatgtaaaatagatttacaaaaaggacaagcatgataaaagggaatgaatggagacgatgtattattcagtttgaaagagatagttcacatttttataagaaaaatttaataaaacatatattttagttatcatttaacaaagatatattaaagctattcaggcaatgccacaggattctcatgaagggaaatcactgaacccttgtcatgagaaaatggtcatttcaacacatttcaatacattgtataaatttggagcttaaggtgagtgagtatgttttcacttagtcataaatgtttggtcaaaattaaagttatcatatggtttcacatcaatacaaatattgtcacagtgttacagaaacaactatcaaatggtaagatagtttacatttgtgttttctagaaacctttgtatttatgcttcatttggttaatgttaagtgctgataaaggcataccagattgtttgtcaaagtaaagaagcaatccatcacacctaggacatctaaggatggattatacgtcagagtggtctcatatacaaatgaccattttccttcagtaaaatcttgttggttgaaatgtaagtcttttcctaaagttttaatcagaggtagccatcactaagacttaagccacctgtggttctcttaagtttcactgaagccagaagaaggaaattaccacaacttgtattatactaattatcttcattattaacgatcatattagagccactgacatgtcccaaattatattaaaataaaaacctgcattgctctgacatgaagctcaattcaatgtaataaacaaattaggtattaaacgttataatttaaaaaacttctacgatatcaccagaaatcctggtgaaatttaattttttcccttttttaggtcagtggccggtgggatagatttttctaaactttttcctgctatgattttgaaggcaaatacatagagcacagttcagtaaaagagtttccaagccttttcactggagcatttacattttgattctgttgtcatttgaaatagaacatctgcagggagataatgagcttaagttacaattgactttggaaaaaataacagacttttgtgtttcctcaatcatgtagtcaatagggaattctccagttatgtgaacaatcacagtcttttaagacaatacttagatctaaatgcaaaatctagcatgcagaggctttttaaggattttagactgtctccaaagaacttggctcgagatggattacacagatttacaaatgcagttttcaactgtgacatcaaactgatcttatctcatttcatgttactcaactgtgcccgtaggaccccaagaggtggaatattttgtctacattattttaaacatctatagatatgtgtggatgtgtgaataatgcctaaatttctcatcttttaactagtttgtttttatcatacagacacagcctgttcataagaccagctttagacaacttagaactcaatgctctgaagattcagggaggccaacatagaaaaagatcttccaaaatatggggtggtccaacccatctcatccctctctagctggaaaactatagagaaagggctgtgactgccttgaccactgcctggcacaatgtaggcactcggtatttgttggatgaataagtggctgaatcagtgaatagacaaaaaacatggattttgccttctgaaaatctcacaaattttaccagcttatattatactgattgtcactatgatttctaagtttcatggttagaaccatattttgagtctatataaaaactttttagatgtatgaatttgaaatttcattaattactttaaaggcttcaaagatttgaggacatttgaacagtggataaggaacaatgtttggggatacagagtttttatgctgagttgaactcaacctttctagttctttatacaagcttcctgaattatctggcaggaatgattcaaacataaaaccccatttttaaattttataaaagatattttcatttttatataaaaagatcatcaggcatattatcccctttgatatttattaacaaccattctctaagaaattcataataattggagacaccatccctaaatctcttcctattttcaaaagatcatttatcctttcatatttgattcctggaatacactaagctgaagtttaatcacatacttactcagatgtttccatgtgtttattcatttaacaaatacttattgtgtacctagtgcatgctaggttctggaaatgcaacagcaaacaagacagacacaatccctcttggaggttactgtgagaaactctccaacatttactctagcaataactagagagtttactgtccattgggtcctcttcacacctgatagaaaaaataaaattcctcaccccatggaagtcatgaaatactccctgcacagatttgtgtgagcttgcttttctaaaaccactgctcaaaaatgctgcttagtttatctataaaccacggttataccccagtgaggtaggtaagtaatttattcataactaacatttatgcagctctattttctaggccactgtgctgagtgcttttatgggactatctcaccaaatcccttcaacaactctattcagtaggttccattttatagatacaaaaactgaagcacagatatattatgtgacttgtccaaggtcacacagctagcaggtggaactgggatttgaacccatgcaatctgacacaagagttcatgtgtctaatcattatctgtggtttgggggacaccattacattaaaatgaatgagtcactaagtgagtcactgtatataaaatacttggaaattgtaaagtaatatacaaaagatattaacaaagtattattcatggtaaacaaatcacatcagtagcaaacacagggtgggaactcaatcttatgttatagcttactcttaagaagaatatgtgaagccaggaacatggttaaaggtacagaccagaaaatttctgacatgtgataaatatttcagtgacttttcagatttatttcttgttagccgctgtgtctatttggtgctacaaaaactgaaagaaacaaaatccctgatgtaagggcttataataaatacacagtttggagatgaactaaggatattttacatttacgggaaaggattggacaatagtatcattttctcaccatttgcatgtacatcatgtctttccaattgttttcattatttttctgaaagagctgcaaaattgtgcagtggttcaacctgaccaaagtggtattatgctgctgggaagtaaaagtattagacaccaaaaagaagta

SEQ ID NO: 438386 - DNA, 443 bp, Homo sapiens
cattttgattcagctttaaaatgctatgatcatttgtatctgggtctataacctctaaaatagtaaagataagataattcttgtcttttcaatcagtgattaggaagggaaatccagaatactgtattgaacccttcctagaaacatcctaaaattattctgcttaatgagttgatgttagatgttccacttaccaacctgttggcctgattataatatgatctttatcaaaaaccagtagatatatagtatgtaaatggaaacatcacagtatcctagatcagaccgcagtagttgctttcaaaaatggctgtctctttgaaaaagttcatgccatcctcttaaacgtttttttatcccagactaattttctgctcaactgggtatttgggcagcatgcattcatttactctgtgtttatgtgatttgtgtgtacatggaaa

SEQ ID NO: 438387 - DNA, 1587 bp, Homo sapiens
gtgtggaaagaagagggctgtgggaagcaggctggtgtttcaggcttcagtctgaccagggccttggagctatggaggagaggtataaggaaatcaaagcaggggcctttgtgattatggggacagggtggctcctgagagaaataggacaatggagttacttaggaaaggtgtcatctctctgccgtcctcctgcccagcctcctcaccagatgcagccacttaaaaaaatttttataatagctttattgagatggtactgacatattataaagtttatccttttaaagtgtgtaattcagtggtttctcgtatagtcacagaattgtgcaacaatcaccagtatctaattctagaacattttcatcaccctaaaaagaaatcctgtacccattagtagtcactccctgtttcccctactccctcccaaccactagtgtactttctgtctctatgaatttgcctagtctggacatttcataaaaatggaatcataatatggcacagccttttttgtctggcttttttcacttagcataatgtttgccttctcaagagttacccatattgtagcattgtgtcaatatttcttttaatgtaatgtaattacaatgtaaatgtaataagtgtaattacaatgtaattacattgttaaaaaatgactgaggcagccatttttaacttcctgttttcagttttttagagttgtctctgtatttctaaatgggagattttttaaattggttttttcctaattcattaaagttatatttactctgttaactccctgctatgaaagatgaagaaaaagagttcattaccttatttttaggtcttttatttttaagttaagataatgaatcaagcagatgtgagatacttggatataaaacaagatttaaaaatgatgtctctactttgtgcctccccctcaaattaaaaaatattattgaaaccgcccacagtttcaaatctggtgggtgaagtgcatcataagtatgctgttcccacttggcagtgttgctatccctggtccaggtgagatgggaagcagaagggcctgaaccatatgatgcaaggtgattgttgcctggcatcagaacttgggcaactatgaggtttgctgctcttacaatgtacagtcattattaaatcctaagacagaataatcagtagtgaagctagactagcctgaaagatggcccctgaatcagactctgaggagtagaagttagctgtaataaaacactgcgaagaagccctgttaaccaccatgctacactctgctgttaatttatgctaggctttctgagaattatctaagttaatgctgagaaaataaaacagaattaaaaataacaacaccctccaatgtctgaagagttgtgatttctgataacatgctcctggctggcccccctccccacactctggattttttcctgtgggaaactcggatttgactgctgtgtgtttttaactaagtgagatcttcaggaatgcaaaagaaccctgtgtccctttattgttccctccaagttaagtatttattgaaataaagcatttatctggtgaaaacatcaaatg

SEQ ID NO: 438388 - DNA, 7866 bp, Homo sapiens
tgactgcatcacctggtctgtgaattttccattagaagcttggtgtgctgttaggtgaaagacttgctcagctatgcgtcattgggttttatcaacatataggcgaaaaaaatcctggtctctgagtgtacagctgagatgaaaatttcttttattggaggaagtattgagtgtgtgctctcaaatgcggcctcagttgagtagtgcattcctgagttttggaagcaaatttgcaaacaattgagagtcgtacagtgggtgttctaactggattcaggttttttctaatgtaattttttcacacgtaaattaaaaagtttagaaatgtcacacataacttcataacactttatggagaaatggttgtacttttaatttttttctttttatttatactccaactgactgagcagaggttgtacttctaaataactttgtggaagtttttagtaccataatttttataattttcattccagtcctttgatatttatgacagtacttctgaagcgcttactgagtgccggacactgttgtaagtgctttacggaacttgacttttttttttttttgagacggactctcgctctgtcgcccaggctggagtgcagtggtgcagtggctcgatctcggctcactgccacctctccctcatggtttcaaacacttctcctgcctcagcctcccaggtagccaggattatagccgcccgccaccactcccgactaattttattttgtatgttcttttttagtagagacggaggagtttcaccatgttggccaggctggtatcgacctcctgacctcaagtgatgtgtccatctcggcctcccaaggtgctggaattacaggtgtgagccactgtgctcggcctaccttttttttttgttttttgtttttttgaaaaggagtttcgctcttgtccaggctggagtataatggtgcgatctcagctcaccgcaatctccgcctcccagattcaagcgattctcctgcctcagcctcctcaggagctgggattacaggcgcccaccgccatgcccggctaatttttgtatttttagtagagacggggtttcactatattggccaggctggtctcgaactgctgacctcaagtaatccgcctgcctcagcctcccaaagtgctgggattacagacgtgatccaccaggatcacaccaggccgcgcctggcctgctttcattttaaaagtcaaatttgtcatccgcctcagtgcttgtaatcttttctgagtgagatactgaaatttgcagtttcgttttgcttgcacttgttcactggaccagtagtcactgttaaatgtaaaagtatctacttcctctgaaagttttttattcctttatttcctgcctgggcttgtcctccaccctacatgtatgcgtagtagatttagtgtttgttatcctaacctttaggtttagggattgactgggtttctgactttttatttggccaatgaggacgatacagaaaatgaagcattggtcattatcacattttaacgctgaaaaagtaagaaggacaaccccggaataaaatgatatcagtatcaagataaaagtttggaatgggagaaaaattctcaaagcctgaaagaaaatctgtagttacttttggtgacgctgtccagttcccacaatgtatcattccttatctgaaactagacatcctctgcagccagaagaacaagaagtaggcattgaccccttgtccagttactctaacaagtctggaggagattcaaataaaaatggaagaagaacaagttctactttagactctgaagggacttttaattcctataggaaagaatgggaagaactatttgtaaacaacaattacttggcaacaataaggcagaaggggattaatgggcagctgagaagcagcaggttccgcagcatttgctggaagctatttctttgtgttcttcctcaagacaaaagtcaatggataagtagaattgaagaattaagagcatggtatagcaacattaaagaaatacatattaccaacccgaggaaggttgttggccaacaagatttgatgatcaataatcctctttcacaggatgaagggagtctttggaacaaattcttccaagataaagaacttcgatcaatgattgaacaagatgtcaaaagaacgtttcctgaaatgcagtttttccagcaagaaaatgtgagaaaaattcttacagatgttcttttctgttatgccagagaaaacgagcagttgctttataaacagggcatgcacgaactgttagcacctatagtctttgtccttcactgtgaccaccaagcttttctacatgccagtgagtctgcacagcccagtgaggaaatgaaaactgtcttgaaccctgagtatctggaacatgatgcctatgcagtgttctcacaacttatggaaactgctgaaccttggttttcaacttttgagcatgatggtcagaaggggaaagaaacactgatgactcccattccctttgctagaccacaagatttagggccaacaattgctattgttactaaagtcaaccagatccaggatcatctactgaagaagcatgatattgagctttacatgcacttgaacagactagaaattgcaccacagatatatgggttaaggtgggtgcggctgctatttggacgagagttccccctgcaggaccttctggtggtctgggatgccttgtttgcagacggcctcagcctgggtttagtagattatatcttcgtagccatgttactttacatccgagatgctttgatctctagtaactaccagacctgtctcggccttctgatgcattacccattcatcggggatgtacactcactgattcttaaggctctgttccttagagatccaaagagaaatccaagaccagtgacttatcaattccatccaaatttagattattacaaagcacgaggagcagacctcatgaataaaagccggaccaatgccaaaggtgctcccctgaatataaataaggtctctaatagcctgattaattttggaagaaagttgatttccccagcaatggctccaggcagtgcaggtggccctgtacctggaggcaacagcagtagctcctcctctgttgtaattcctaccaggacctcagcagaggccccaagccatcacttgcaacagcaacagcagcagcagaggctgatgaaatcagaaagcatgcctgtgcaattgaacaaagggctaagttctaaaaacatcagttcatctccaagcgttgagagtttgcctggaggaagagaattcactggctctccaccttcatctgctactaaaaaagattccttttttagcaacatctcacgttctcgctcacacagcaaaactatgggcagaaaagaatctgaagaagaattagaagcccaaatttccttccttcaagggcagttgaatgacctggatgccatgtgcaaatactgtgcaaaggtgatggacactcatcttgtaaatattcaagatgtgatattacaagaaaatttggaaaaagaagatcaaattctggtttccctggcaggattaaaacagatcaaagacattctaaaaggttccctgcgttttaaccagagccagctagaggccgaagagaacgaacagatcaccattgcggacaaccactactgctccagcggccagggccagggccgaggccaaggccagagcgttcaaatgtcaggggccattaaacaggcctcttcagaaacgccagggtgcactgatagagggaattccgatgacttcatcctgatttccaaagatgatgatgggagcagtgccaggggctccttctccggccaggcccagcctcttcgcaccctcagaagcacctctgggaaaagccaggccccagtctgctccccactggtgttctcagatccactgatgggcccagcctcagcttcctccagcaaccccagctccagtcctgatgacgacagcagcaaggactctggcttcaccattgtgagtcccctggacatctgaccacagtgcccagtcctgccccacagggatctagccacccttcagtggccccaaggccagactgaggctcatccagtggagaaccttcttaaaccactgcttccttcccggcatgcatttggcattggtccagccctttgaaaccccttagagagaagcatatatggccacaaagcacagaggcttaggtttgccacatgcagacagggctttctgggcccttacctaatccccacccgactcttgctctgagttagagctgagttacgtacccagtatcacactcacagttagaaaagaccgaatcacaatttagaatcacttttcctctgtccccttctccccagctaagaatgtgtggcacctccatcagttatacttagaaggagcagaaatagttattttcgtatcttctatccctcaaagcatcagacatgggaaaattggtttataccaagaaagcttcctctgtggaaatctgtctcagcctactttattcctgcattgggaagccatatcgcagagctaaatgcaatagaatgaaccagaactagtggattccagggctgggggaaaaaaaaaaaagaaaaaacctcattactgacctctcaaagttataaggatctctgcaaacaggatctaagcttaggaataatatttaggtgtgatatagtgttagatttttttgatgtattaaagaatgcatctccaatccttaggccatatcaactttggccatcaatatctctccttaaacaattatatttcaccttttagaatctttcatagccagaaaacaagattactgtaagccagttttagctgcactgatttcaaaagatataagaatattactatccttcaaatggaaaatgcgaccttgactttatgggataaacatctttcagacagtcagttttctagtcaggtttctctggtttcagagctgtatatacctgtcaactgaggaataaagggaaaaacccaagttcattcccacccaaagtcagaatccctcattggccttaaggtagcagtcataagacagagaattggacctagagtcccttctgtggggaataaggatacctagagaacattccacatgccaagaggatgcaggatttctacacaaccccttcccttcttggaagtcaagtgtaggtactgcagggcctgtgctcagctgtgaaccccgtatcctgggccccactgccgggaccgggtctgacatgccagtgccttcctgggctgagcacagattagagactctcccccttgtcagtcagcaccttaggaaaccatgatgggcacagagcatcacatgagctgtttctctccttaaagaagatccctggaaaggatgcttttcctctcctttgcctgcgcaggaattctaacaggagtgggtgaggatggcagagggacacagtgcctgtctcgcctccatcagggagagcagccatgccagggatgactagctctttgagcctgtcctcagaggatggcgaggcagccgggcagtggaggccttcatggtaacaaatgaaagctcagtatagaggaacagacactgtttacgtccctcccactgctaaccttatatatctctatagacaaatgtgataatgacatgatttcccacctgccctccaagaaaatggtgactcactctcaagtcagctactgtagagagggttctaattggttctgcaatttgctcttaaactctagcagggaactctcctcttaccacatcagcatgtaaggtgaataataactctggttttgccagacagcaggttgtctgaccttcaaccactgggcaattgcctggcagatgcacacagtagctccctggcttctggctctgagtgttcctctcagcacctctgagtaagctgctgccaagcacatatccctatgacaacactttgtaaaagccgcggggcccccatacagcgagtgaccttgcaactgtgcagggttgccattggtcactttctcaccttgggaaggtgtcagtgttttcagttctaaggtaagaggtgtagagctgttcccaccagggctctgggacagactggaaaggaccacagacctggccatccctgggcagcagggccagtgtcacctgctgacctctagtatttcctttgccctagagctagagtcatgatagctgagggtcactcgccctgcaagagtcactaggcacccaccatgccaataaggctctccgctggctccctgcagttggctgggtgtttaatagtcactgaaaactcccagccctgctgcacactagaggcaggtcctctcggtcctctccatcctgtgcttctgtggcccccagcaagctcaccgcctccttggaggagagagacatacaaggacagtgggtcatgggtagtaccagcctcaaattcccacaggctcatactcagacaattgtattactgccttatgttttttaagtgtttttttaaattcttcatagttgagtattatttgcaattttattagttacagtgctattaaagaatatgtgctcctttttattatattatcagatacttatgtttaattgtacattttttaaatcctgaatatattgtgttttgttaacaaatgtaatcagtggaacccttcttacgttttgattattagcagttaaatacattttgtatacatgaagcttagattaattcccatcatcatcatctcctgtttttatatgtgtccctatgtgtttcatgcattcctctttgatcagattggaatttgagttaaaatttagctttgtacattacgtgtgagagttacagactagcaagtctaattactttgccttaccttgagtgtatgccacagggtcagataacacattaaacatttagttacactggattactcttccaaagctgacctcctgctaatgttcagaggtaactgcaatccggaaagaaataatatcactgcagaaagaatgtgactctaaaaataaaccaggacctccctgtgatttgccttgcctgcagatgaccagttgactcttgtgctgtcagccctggggttgctaaggaagctgcttcagggagttgggggttagttgcccgctctcaacaggaatgcctcctctactttgtcagagatgctgaacaaatatcaaactctgtggcagtcatgctggcctcctaagaataacctgtgagtcagagttgatgcacattatttttgtttttattttatttttttaaggaactgctccaagggttcattatagaacaggagtgtgtacggaggacttaggtccccacatagagtggccgttctgtggcggctccaaccaattccatccctcctttcctgcggacacacacctggcccctggcccctgccctgtgtgtctggaggaggggcactggggaggctgtggagcagagagaagaggccggatacattgaggatggcacctggcaagccaggcttccttctcaaaggccagactgctttctcagtgttacttactaaagctctctttttatactgttaaaaagatatataaagttcgtataaacaggcttgagaccactttgatgtaaaagctgtcatagtagtttttctcacagtggcacaattcatttgattgatggaatattcagtgacgccatgtatgccctatcgcttttttctcatccatctttatgctataactcatactgatttaagaaatgatttctccttttggcaaagcgaccccattcaatatggttataataaaagactaatgtcaaaaactgaacaaaagctt

SEQ ID NO: 438389 - DNA, 6466 bp, Homo sapiens
agcggattgagtcaccataagtggacaaggaaggagcttctaacagtgatatcagtatcaagataaaagtttggaatgggagaaaaattctcaaagcctgaaagaaaatctgagatgcttggagtgtaaagatcccatggtcacataaatccggaaagcactgaatactttgtttcccataagagaatcccattatatgttgatgtattaaaagacctgagaacctggtgtagttacttttggtgacgctgtccagttcccacaatgtatcattccttatctgaaactagacatcctctgcagccagaagaacaagaagtaggcattgaccccttgtccagttactctaacaagtctggaggagattcaaataaaaatggaagaagaacaagttctactttagactctgaagggacttttaattcctataggaaagaatgggaagaactatttgtaaacaacaattacttggcaacaataaggcagaaggggattaatgggcagctgagaagcagcaggttccgcagcatttgctggaagctatttctttgtgttcttcctcaagacaaaagtcaatggataagtagaattgaagaattaagagcatggtatagcaacattaaagaaatacatattaccaacccgaggaaggttgttggccaacaagatttgatgatcaataatcctctttcacaggatgaagggagtctttggaacaaattcttccaagataaagaacttcgatcaatgattgaacaagatgtcaaaagaacgtttcctgaaatgcagtttttccagcaagaaaatgtgagaaaaattcttacagatgttcttttctgttatgccagagaaaacgagcagttgctttataaacagggcatgcacgaactgttagcacctatagtctttgtccttcactgtgaccaccaagcttttctacatgccagtgagtctgcacagcccagtgaggaaatgaaaactgtcttgaaccctgagtatctggaacatgatgcctatgcagtgttctcacaacttatggaaactgctgaaccttggttttcaacttttgagcatgatggtcagaaggggaaagaaacactgatgactcccattccctttgctagaccacaagatttagggccaacaattgctattgttactaaagtcaaccagatccaggatcatctactgaagaagcatgatattgagctttacatgcacttgaacagactagaaattgcaccacagatatatgggttaaggtgggtgcggctgctatttggacgagagttccccctgcaggaccttctggtggtctgggatgccttgtttgcagacggcctcagcctgggtttagtagattatatcttcgtagccatgttactttacatccgagatgctttgatctctagtaactaccagacctgtctcggccttctgatgcattacccattcatcggggatgtacactcactgattcttaaggctctgttccttagagatccaaagagaaatccaagaccagtgacttatcaattccatccaaatttagattattacaaagcacgaggagcagacctcatgaataaaagccggaccaatgccaaaggtgctcccctgaatataaataaggtctctaatagcctgattaattttggaagaaagttgatttccccagcaatggctccaggcagtgcaggtggccctgtacctggaggcaacagcagtagctcctcctctgttgtaattcctaccaggacctcagcagaggccccaagccatcacttgcaacagcaacagcagcagcagaggctgatgaaatcagaaagcatgcctgtgcaattgaacaaagggctaagttctaaaaacatcagttcatctccaagcgttgagagtttgcctggaggaagagaattcactggctctccaccttcatctgctactaaaaaagattccttttttagcaacatctcacgttctcgctcacacagcaaaactatgggcagaaaagaatctgaagaagaattagaagcccaaatttccttccttcaagggcagttgaatgacctggatgccatgtgcaaatactgtgcaaaggtgatggacactcatcttgtaaatattcaagatgtgatattacaagaaaatttggaaaaagaagatcaaattctggtttccctggcaggattaaaacagatcaaagacattctaaaaggttccctgcgttttaaccagagccagctagaggccgaagagaacgaacagatcaccattgcggacaaccactactgctccagcggccagggccagggccgaggccaaggccagagcgttcaaatgtcaggggccattaaacaggcctcttcagaaacgccagggtgcactgatagagggaattccgatgacttcatcctgatttccaaagatgatgatgggagcagtgccaggggctccttctccggccaggcccagcctcttcgcaccctcagaagcacctctgggaaaagccaggccccagtctgctccccactggtgttctcagatccactgatgggcccagcctcagcttcctccagcaaccccagctccagtcctgatgacgacagcagcaaggactctggcttcaccattgtgagtcccctggacatctgaccacagtgcccagtcctgccccacagggatctagccacccttcagtggccccaaggccagactgaggctcatccagtggagaaccttcttaaaccactgcttccttcccggcatgcatttggcattggtccagccctttgaaaccccttagagagaagcatatatggccacaaagcacagaggcttaggtttgccacatgcagacagggctttctgggcccttacctaatccccacccgactcttgctctgagttagagctgagttacgtacccagtatcacactcacagttagaaaagaccgaatcacaatttagaatcacttttcctctgtccccttctccccagctaagaatgtgtggcacctccatcagttatacttagaaggagcagaaatagttattttcgtatcttctatccctcaaagcatcagacatgggaaaattggtttataccaagaaagcttcctctgtggaaatctgtctcagcctactttattcctgcattgggaagccatatcgcagagctaaatgcaatagaatgaaccagaactagtggattccagggctgggggaaaaaaaaaaaagaaaaaacctcattactgacctctcaaagttataaggatctctgcaaacaggatctaagcttaggaataatatttaggtgtgatatagtgttagatttttttgatgtattaaagaatgcatctccaatccttaggccatatcaactttggccatcaatatctctccttaaacaattatatttcaccttttagaatctttcatagccagaaaacaagattactgtaagccagttttagctgcactgatttcaaaagatataagaatattactatccttcaaatggaaaatgcgaccttgactttatgggataaacatctttcagacagtcagttttctagtcaggtttctctggtttcagagctgtatatacctgtcaactgaggaataaagggaaaaacccaagttcattcccacccaaagtcagaatccctcattggccttaaggtagcagtcataagacagagaattggacctagagtcccttctgtggggaataaggatacctagagaacattccacatgccaagaggatgcaggatttctacacaaccccttcccttcttggaagtcaagtgtaggtactgcagggcctgtgctcagctgtgaaccccgtatcctgggccccactgccgggaccgggtctgacatgccagtgccttcctgggctgagcacagattagagactctcccccttgtcagtcagcaccttaggaaaccatgatgggcacagagcatcacatgagctgtttctctccttaaagaagatccctggaaaggatgcttttcctctcctttgcctgcgcaggaattctaacaggagtgggtgaggatggcagagggacacagtgcctgtctcgcctccatcagggagagcagccatgccagggatgactagctctttgagcctgtcctcagaggatggcgaggcagccgggcagtggaggccttcatggtaacaaatgaaagctcagtatagaggaacagacactgtttacgtccctcccactgctaaccttatatatctctatagacaaatgtgataatgacatgatttcccacctgccctccaagaaaatggtgactcactctcaagtcagctactgtagagagggttctaattggttctgcaatttgctcttaaactctagcagggaactctcctcttaccacatcagcatgtaaggtgaataataactctggttttgccagacagcaggttgtctgaccttcaaccactgggcaattgcctggcagatgcacacagtagctccctggcttctggctctgagtgttcctctcagcacctctgagtaagctgctgccaagcacatatccctatgacaacactttgtaaaagccgcggggcccccatacagcgagtgaccttgcaactgtgcagggttgccattggtcactttctcaccttgggaaggtgtcagtgttttcagttctaaggtaagaggtgtagagctgttcccaccagggctctgggacagactggaaaggaccacagacctggccatccctgggcagcagggccagtgtcacctgctgacctctagtatttcctttgccctagagctagagtcatgatagctgagggtcactcgccctgcaagagtcactaggcacccaccatgccaataaggctctccgctggctccctgcagttggctgggtgtttaatagtcactgaaaactcccagccctgctgcacactagaggcaggtcctctcggtcctctccatcctgtgcttctgtggcccccagcaagctcaccgcctccttggaggagagagacatacaaggacagtgggtcatgggtagtaccagcctcaaattcccacaggctcatactcagacaattgtattactgccttatgttttttaagtgtttttttaaattcttcatagttgagtattatttgcaattttattagttacagtgctattaaagaatatgtgctcctttttattatattatcagatacttatgtttaattgtacattttttaaatcctgaatatattgtgttttgttaacaaatgtaatcagtggaacccttcttacgttttgattattagcagttaaatacattttgtatacatgaagcttagattaattcccatcatcatcatctcctgtttttatatgtgtccctatgtgtttcatgcattcctctttgatcagattggaatttgagttaaaatttagctttgtacattacgtgtgagagttacagactagcaagtctaattactttgccttaccttgagtgtatgccacagggtcagataacacattaaacatttagttacactggattactcttccaaagctgacctcctgctaatgttcagaggtaactgcaatccggaaagaaataatatcactgcagaaagaatgtgactctaaaaataaaccaggacctccctgtgatttgccttgcctgcagatgaccagttgactcttgtgctgtcagccctggggttgctaaggaagctgcttcagggagttgggggttagttgcccgctctcaacaggaatgcctcctctactttgtcagagatgctgaacaaatatcaaactctgtggcagtcatgctggcctcctaagaataacctgtgagtcagagttgatgcacattatttttgtttttattttatttttttaaggaactgctccaagggttcattatagaacaggagtgtgtacggaggacttaggtccccacatagagtggccgttctgtggcggctccaaccaattccatccctcctttcctgcggacacacacctggcccctggcccctgccctgtgtgtctggaggaggggcactggggaggctgtggagcagagagaagaggccggatacattgaggatggcacctggcaagccaggcttccttctcaaaggccagactgctttctcagtgttacttactaaagctctctttttatactgttaaaaagatatataaagttcgtataaacaggcttgagaccactttgatgtaaaagctgtcatagtagtttttctcacagtggcacaattcatttgattgatggaatattcagtgacgccatgtatgccctatcgcttttttctcatccatctttatgctataactcatactgatttaagaaatgatttctccttttggcaaagcgaccccattcaatatggttataataaaagactaatgtcaaaaactgaacaaaagctt

SEQ ID NO: 438390 - DNA, 6607 bp, Homo sapiens
gctggtcaccgccgccaccccctcccgccctgttctctttcaggtcgggccgggcccggccgcttccgcgagcgccctgcagactgagggagagagagagaaagaggaggggaggaggaggaggattcagggaataggagctggggagcccttctgcgccacagttttggagtccagaacatgtaaagttttttcacccattataaacaatttggacaaaatgctgcatgttctacttaaaattgggagctaagcagtggtagagatggggcttcaccatgttggccaggctggtatcgacctcctgacctcaagtgatctcccaggcttggccttccaaggatttgtgcacatataaacttctgtccatgtagttacttttggtgacgctgtccagttcccacaatgtatcattccttatctgaaactagacatcctctgcagccagaagaacaagaagtaggcattgaccccttgtccagttactctaacaagtctggaggagattcaaataaaaatggaagaagaacaagttctactttagactctgaagggacttttaattcctataggaaagaatgggaagaactatttgtaaacaacaattacttggcaacaataaggcagaaggggattaatgggcagctgagaagcagcaggttccgcagcatttgctggaagctatttctttgtgttcttcctcaagacaaaagtcaatggataagtagaattgaagaattaagagcatggtatagcaacattaaagaaatacatattaccaacccgaggaaggttgttggccaacaagatttgatgatcaataatcctctttcacaggatgaagggagtctttggaacaaattcttccaagataaagaacttcgatcaatgattgaacaagatgtcaaaagaacgtttcctgaaatgcagtttttccagcaagaaaatgtgagaaaaattcttacagatgttcttttctgttatgccagagaaaacgagcagttgctttataaacagggcatgcacgaactgttagcacctatagtctttgtccttcactgtgaccaccaagcttttctacatgccagtgagtctgcacagcccagtgaggaaatgaaaactgtcttgaaccctgagtatctggaacatgatgcctatgcagtgttctcacaacttatggaaactgctgaaccttggttttcaacttttgagcatgatggtcagaaggggaaagaaacactgatgactcccattccctttgctagaccacaagatttagggccaacaattgctattgttactaaagtcaaccagatccaggatcatctactgaagaagcatgatattgagctttacatgcacttgaacagactagaaattgcaccacagatatatgggttaaggtgggtgcggctgctatttggacgagagttccccctgcaggaccttctggtggtctgggatgccttgtttgcagacggcctcagcctgggtttagtagattatatcttcgtagccatgttactttacatccgagatgctttgatctctagtaactaccagacctgtctcggccttctgatgcattacccattcatcggggatgtacactcactgattcttaaggctctgttccttagagatccaaagagaaatccaagaccagtgacttatcaattccatccaaatttagattattacaaagcacgaggagcagacctcatgaataaaagccggaccaatgccaaaggtgctcccctgaatataaataaggtctctaatagcctgattaattttggaagaaagttgatttccccagcaatggctccaggcagtgcaggtggccctgtacctggaggcaacagcagtagctcctcctctgttgtaattcctaccaggacctcagcagaggccccaagccatcacttgcaacagcaacagcagcagcagaggctgatgaaatcagaaagcatgcctgtgcaattgaacaaagggctaagttctaaaaacatcagttcatctccaagcgttgagagtttgcctggaggaagagaattcactggctctccaccttcatctgctactaaaaaagattccttttttagcaacatctcacgttctcgctcacacagcaaaactatgggcagaaaagaatctgaagaagaattagaagcccaaatttccttccttcaagggcagttgaatgacctggatgccatgtgcaaatactgtgcaaaggtgatggacactcatcttgtaaatattcaagatgtgatattacaagaaaatttggaaaaagaagatcaaattctggtttccctggcaggattaaaacagatcaaagacattctaaaaggttccctgcgttttaaccagagccagctagaggccgaagagaacgaacagatcaccattgcggacaaccactactgctccagcggccagggccagggccgaggccaaggccagagcgttcaaatgtcaggggccattaaacaggcctcttcagaaacgccagggtgcactgatagagggaattccgatgacttcatcctgatttccaaagatgatgatgggagcagtgccaggggctccttctccggccaggcccagcctcttcgcaccctcagaagcacctctgggaaaagccaggccccagtctgctccccactggtgttctcagatccactgatgggcccagcctcagcttcctccagcaaccccagctccagtcctgatgacgacagcagcaaggactctggcttcaccattgtgagtcccctggacatctgaccacagtgcccagtcctgccccacagggatctagccacccttcagtggccccaaggccagactgaggctcatccagtggagaaccttcttaaaccactgcttccttcccggcatgcatttggcattggtccagccctttgaaaccccttagagagaagcatatatggccacaaagcacagaggcttaggtttgccacatgcagacagggctttctgggcccttacctaatccccacccgactcttgctctgagttagagctgagttacgtacccagtatcacactcacagttagaaaagaccgaatcacaatttagaatcacttttcctctgtccccttctccccagctaagaatgtgtggcacctccatcagttatacttagaaggagcagaaatagttattttcgtatcttctatccctcaaagcatcagacatgggaaaattggtttataccaagaaagcttcctctgtggaaatctgtctcagcctactttattcctgcattgggaagccatatcgcagagctaaatgcaatagaatgaaccagaactagtggattccagggctgggggaaaaaaaaaaaagaaaaaacctcattactgacctctcaaagttataaggatctctgcaaacaggatctaagcttaggaataatatttaggtgtgatatagtgttagatttttttgatgtattaaagaatgcatctccaatccttaggccatatcaactttggccatcaatatctctccttaaacaattatatttcaccttttagaatctttcatagccagaaaacaagattactgtaagccagttttagctgcactgatttcaaaagatataagaatattactatccttcaaatggaaaatgcgaccttgactttatgggataaacatctttcagacagtcagttttctagtcaggtttctctggtttcagagctgtatatacctgtcaactgaggaataaagggaaaaacccaagttcattcccacccaaagtcagaatccctcattggccttaaggtagcagtcataagacagagaattggacctagagtcccttctgtggggaataaggatacctagagaacattccacatgccaagaggatgcaggatttctacacaaccccttcccttcttggaagtcaagtgtaggtactgcagggcctgtgctcagctgtgaaccccgtatcctgggccccactgccgggaccgggtctgacatgccagtgccttcctgggctgagcacagattagagactctcccccttgtcagtcagcaccttaggaaaccatgatgggcacagagcatcacatgagctgtttctctccttaaagaagatccctggaaaggatgcttttcctctcctttgcctgcgcaggaattctaacaggagtgggtgaggatggcagagggacacagtgcctgtctcgcctccatcagggagagcagccatgccagggatgactagctctttgagcctgtcctcagaggatggcgaggcagccgggcagtggaggccttcatggtaacaaatgaaagctcagtatagaggaacagacactgtttacgtccctcccactgctaaccttatatatctctatagacaaatgtgataatgacatgatttcccacctgccctccaagaaaatggtgactcactctcaagtcagctactgtagagagggttctaattggttctgcaatttgctcttaaactctagcagggaactctcctcttaccacatcagcatgtaaggtgaataataactctggttttgccagacagcaggttgtctgaccttcaaccactgggcaattgcctggcagatgcacacagtagctccctggcttctggctctgagtgttcctctcagcacctctgagtaagctgctgccaagcacatatccctatgacaacactttgtaaaagccgcggggcccccatacagcgagtgaccttgcaactgtgcagggttgccattggtcactttctcaccttgggaaggtgtcagtgttttcagttctaaggtaagaggtgtagagctgttcccaccagggctctgggacagactggaaaggaccacagacctggccatccctgggcagcagggccagtgtcacctgctgacctctagtatttcctttgccctagagctagagtcatgatagctgagggtcactcgccctgcaagagtcactaggcacccaccatgccaataaggctctccgctggctccctgcagttggctgggtgtttaatagtcactgaaaactcccagccctgctgcacactagaggcaggtcctctcggtcctctccatcctgtgcttctgtggcccccagcaagctcaccgcctccttggaggagagagacatacaaggacagtgggtcatgggtagtaccagcctcaaattcccacaggctcatactcagacaattgtattactgccttatgttttttaagtgtttttttaaattcttcatagttgagtattatttgcaattttattagttacagtgctattaaagaatatgtgctcctttttattatattatcagatacttatgtttaattgtacattttttaaatcctgaatatattgtgttttgttaacaaatgtaatcagtggaacccttcttacgttttgattattagcagttaaatacattttgtatacatgaagcttagattaattcccatcatcatcatctcctgtttttatatgtgtccctatgtgtttcatgcattcctctttgatcagattggaatttgagttaaaatttagctttgtacattacgtgtgagagttacagactagcaagtctaattactttgccttaccttgagtgtatgccacagggtcagataacacattaaacatttagttacactggattactcttccaaagctgacctcctgctaatgttcagaggtaactgcaatccggaaagaaataatatcactgcagaaagaatgtgactctaaaaataaaccaggacctccctgtgatttgccttgcctgcagatgaccagttgactcttgtgctgtcagccctggggttgctaaggaagctgcttcagggagttgggggttagttgcccgctctcaacaggaatgcctcctctactttgtcagagatgctgaacaaatatcaaactctgtggcagtcatgctggcctcctaagaataacctgtgagtcagagttgatgcacattatttttgtttttattttatttttttaaggaactgctccaagggttcattatagaacaggagtgtgtacggaggacttaggtccccacatagagtggccgttctgtggcggctccaaccaattccatccctcctttcctgcggacacacacctggcccctggcccctgccctgtgtgtctggaggaggggcactggggaggctgtggagcagagagaagaggccggatacattgaggatggcacctggcaagccaggcttccttctcaaaggccagactgctttctcagtgttacttactaaagctctctttttatactgttaaaaagatatataaagttcgtataaacaggcttgagaccactttgatgtaaaagctgtcatagtagtttttctcacagtggcacaattcatttgattgatggaatattcagtgacgccatgtatgccctatcgcttttttctcatccatctttatgctataactcatactgatttaagaaatgatttctccttttggcaaagcgaccccattcaatatggttataataaaagactaatgtcaaaaactgaacaaaagctt

SEQ ID NO: 438391 - DNA, 6331 bp, Homo sapiens
gctggtcaccgccgccaccccctcccgccctgttctctttcaggtcgggccgggcccggccgcttccgcgagcgccctgcagactgagggagagagagagaaagaggaggggaggaggaggaggattcagggaataggagctggggagcccttctgcgccacaggtagttacttttggtgacgctgtccagttcccacaatgtatcattccttatctgaaactagacatcctctgcagccagaagaacaagaagtaggcattgaccccttgtccagttactctaacaagtctggaggaaagaatgggaagaactatttgtaaacaacaattacttggcaacaataaggcagaaggggattaatgggcagctgagaagcagcaggttccgcagcatttgctggaagctatttctttgtgttcttcctcaagacaaaagtcaatggataagtagaattgaagaattaagagcatggtatagcaacattaaagaaatacatattaccaacccgaggaaggttgttggccaacaagatttgatgatcaataatcctctttcacaggatgaagggagtctttggaacaaattcttccaagataaagaacttcgatcaatgattgaacaagatgtcaaaagaacgtttcctgaaatgcagtttttccagcaagaaaatgtgagaaaaattcttacagatgttcttttctgttatgccagagaaaacgagcagttgctttataaacagggcatgcacgaactgttagcacctatagtctttgtccttcactgtgaccaccaagcttttctacatgccagtgagtctgcacagcccagtgaggaaatgaaaactgtcttgaaccctgagtatctggaacatgatgcctatgcagtgttctcacaacttatggaaactgctgaaccttggttttcaacttttgagcatgatggtcagaaggggaaagaaacactgatgactcccattccctttgctagaccacaagatttagggccaacaattgctattgttactaaagtcaaccagatccaggatcatctactgaagaagcatgatattgagctttacatgcacttgaacagactagaaattgcaccacagatatatgggttaaggtgggtgcggctgctatttggacgagagttccccctgcaggaccttctggtggtctgggatgccttgtttgcagacggcctcagcctgggtttagtagattatatcttcgtagccatgttactttacatccgagatgctttgatctctagtaactaccagacctgtctcggccttctgatgcattacccattcatcggggatgtacactcactgattcttaaggctctgttccttagagatccaaagagaaatccaagaccagtgacttatcaattccatccaaatttagattattacaaagcacgaggagcagacctcatgaataaaagccggaccaatgccaaaggtgctcccctgaatataaataaggtctctaatagcctgattaattttggaagaaagttgatttccccagcaatggctccaggcagtgcaggtggccctgtacctggaggcaacagcagtagctcctcctctgttgtaattcctaccaggacctcagcagaggccccaagccatcacttgcaacagcaacagcagcagcagaggctgatgaaatcagaaagcatgcctgtgcaattgaacaaagggctaagttctaaaaacatcagttcatctccaagcgttgagagtttgcctggaggaagagaattcactggctctccaccttcatctgctactaaaaaagattccttttttagcaacatctcacgttctcgctcacacagcaaaactatgggcagaaaagaatctgaagaagaattagaagcccaaatttccttccttcaagggcagttgaatgacctggatgccatgtgcaaatactgtgcaaaggtgatggacactcatcttgtaaatattcaagatgtgatattacaagaaaatttggaaaaagaagatcaaattctggtttccctggcaggattaaaacagatcaaagacattctaaaaggttccctgcgttttaaccagagccagctagaggccgaagagaacgaacagatcaccattgcggacaaccactactgctccagcggccagggccagggccgaggccaaggccagagcgttcaaatgtcaggggccattaaacaggcctcttcagaaacgccagggtgcactgatagagggaattccgatgacttcatcctgatttccaaagatgatgatgggagcagtgccaggggctccttctccggccaggcccagcctcttcgcaccctcagaagcacctctgggaaaagccaggccccagtctgctccccactggtgttctcagatccactgatgggcccagcctcagcttcctccagcaaccccagctccagtcctgatgacgacagcagcaaggactctggcttcaccattgtgagtcccctggacatctgaccacagtgcccagtcctgccccacagggatctagccacccttcagtggccccaaggccagactgaggctcatccagtggagaaccttcttaaaccactgcttccttcccggcatgcatttggcattggtccagccctttgaaaccccttagagagaagcatatatggccacaaagcacagaggcttaggtttgccacatgcagacagggctttctgggcccttacctaatccccacccgactcttgctctgagttagagctgagttacgtacccagtatcacactcacagttagaaaagaccgaatcacaatttagaatcacttttcctctgtccccttctccccagctaagaatgtgtggcacctccatcagttatacttagaaggagcagaaatagttattttcgtatcttctatccctcaaagcatcagacatgggaaaattggtttataccaagaaagcttcctctgtggaaatctgtctcagcctactttattcctgcattgggaagccatatcgcagagctaaatgcaatagaatgaaccagaactagtggattccagggctgggggaaaaaaaaaaaagaaaaaacctcattactgacctctcaaagttataaggatctctgcaaacaggatctaagcttaggaataatatttaggtgtgatatagtgttagatttttttgatgtattaaagaatgcatctccaatccttaggccatatcaactttggccatcaatatctctccttaaacaattatatttcaccttttagaatctttcatagccagaaaacaagattactgtaagccagttttagctgcactgatttcaaaagatataagaatattactatccttcaaatggaaaatgcgaccttgactttatgggataaacatctttcagacagtcagttttctagtcaggtttctctggtttcagagctgtatatacctgtcaactgaggaataaagggaaaaacccaagttcattcccacccaaagtcagaatccctcattggccttaaggtagcagtcataagacagagaattggacctagagtcccttctgtggggaataaggatacctagagaacattccacatgccaagaggatgcaggatttctacacaaccccttcccttcttggaagtcaagtgtaggtactgcagggcctgtgctcagctgtgaaccccgtatcctgggccccactgccgggaccgggtctgacatgccagtgccttcctgggctgagcacagattagagactctcccccttgtcagtcagcaccttaggaaaccatgatgggcacagagcatcacatgagctgtttctctccttaaagaagatccctggaaaggatgcttttcctctcctttgcctgcgcaggaattctaacaggagtgggtgaggatggcagagggacacagtgcctgtctcgcctccatcagggagagcagccatgccagggatgactagctctttgagcctgtcctcagaggatggcgaggcagccgggcagtggaggccttcatggtaacaaatgaaagctcagtatagaggaacagacactgtttacgtccctcccactgctaaccttatatatctctatagacaaatgtgataatgacatgatttcccacctgccctccaagaaaatggtgactcactctcaagtcagctactgtagagagggttctaattggttctgcaatttgctcttaaactctagcagggaactctcctcttaccacatcagcatgtaaggtgaataataactctggttttgccagacagcaggttgtctgaccttcaaccactgggcaattgcctggcagatgcacacagtagctccctggcttctggctctgagtgttcctctcagcacctctgagtaagctgctgccaagcacatatccctatgacaacactttgtaaaagccgcggggcccccatacagcgagtgaccttgcaactgtgcagggttgccattggtcactttctcaccttgggaaggtgtcagtgttttcagttctaaggtaagaggtgtagagctgttcccaccagggctctgggacagactggaaaggaccacagacctggccatccctgggcagcagggccagtgtcacctgctgacctctagtatttcctttgccctagagctagagtcatgatagctgagggtcactcgccctgcaagagtcactaggcacccaccatgccaataaggctctccgctggctccctgcagttggctgggtgtttaatagtcactgaaaactcccagccctgctgcacactagaggcaggtcctctcggtcctctccatcctgtgcttctgtggcccccagcaagctcaccgcctccttggaggagagagacatacaaggacagtgggtcatgggtagtaccagcctcaaattcccacaggctcatactcagacaattgtattactgccttatgttttttaagtgtttttttaaattcttcatagttgagtattatttgcaattttattagttacagtgctattaaagaatatgtgctcctttttattatattatcagatacttatgtttaattgtacattttttaaatcctgaatatattgtgttttgttaacaaatgtaatcagtggaacccttcttacgttttgattattagcagttaaatacattttgtatacatgaagcttagattaattcccatcatcatcatctcctgtttttatatgtgtccctatgtgtttcatgcattcctctttgatcagattggaatttgagttaaaatttagctttgtacattacgtgtgagagttacagactagcaagtctaattactttgccttaccttgagtgtatgccacagggtcagataacacattaaacatttagttacactggattactcttccaaagctgacctcctgctaatgttcagaggtaactgcaatccggaaagaaataatatcactgcagaaagaatgtgactctaaaaataaaccaggacctccctgtgatttgccttgcctgcagatgaccagttgactcttgtgctgtcagccctggggttgctaaggaagctgcttcagggagttgggggttagttgcccgctctcaacaggaatgcctcctctactttgtcagagatgctgaacaaatatcaaactctgtggcagtcatgctggcctcctaagaataacctgtgagtcagagttgatgcacattatttttgtttttattttatttttttaaggaactgctccaagggttcattatagaacaggagtgtgtacggaggacttaggtccccacatagagtggccgttctgtggcggctccaaccaattccatccctcctttcctgcggacacacacctggcccctggcccctgccctgtgtgtctggaggaggggcactggggaggctgtggagcagagagaagaggccggatacattgaggatggcacctggcaagccaggcttccttctcaaaggccagactgctttctcagtgttacttactaaagctctctttttatactgttaaaaagatatataaagttcgtataaacaggcttgagaccactttgatgtaaaagctgtcatagtagtttttctcacagtggcacaattcatttgattgatggaatattcagtgacgccatgtatgccctatcgcttttttctcatccatctttatgctataactcatactgatttaagaaatgatttctccttttggcaaagcgaccccattcaatatggttataataaaagactaatgtcaaaaactgaacaaaagctt

SEQ ID NO: 438392 - DNA, 969 bp, Homo sapiens
gagctcggtacccaattagctgcgcacagggtcagataacacattaaacatttagttacactggattactcttccaaagctgacctcctgctaatgttcagaggtaactgcaatccggaaagaaataatatcactgcagaaagaatgtgactctaaaaataaaccaggacctccctgtgatttgccttgcctgcagatgaccagttgactcttgtgctgtcagccctggggttgctaaggaagctgcttcagggagttgggggttagttgcccgctctcaacaggaatgcctcctctactttgtcagagatgctgaacaaatatcaaactctgtggcagtcatgctggcctcctaagaataacctgtgagtcagagttgatgcacattatttttgtttttattttatttttttaaggaactgctccaagggttcattatagaacaggagtgtgtacggaggacttaggtccccacatagagtggccgttctgtggcggctccaaccaattccatccctcctttcctgcggacacacacctggcccctggcccctgccctgtgtgtctggaggaggggcactggggaggctgtggagcagagagaagaggccggatacattgaggatggcacctggcaagccaggcttccttctcaaaggccagactgctttctcagtgttacttactaaagctctctttttatactgttaaaaagatatataaagttcgtataaacaggcttgagaccactttgatgtaaaagctgtcatagtagtttttctcacagtggcacaattcatttgattgatggaatattcagtgacgccatgtatgccctatcgcttttttctcatccatctttatgctataactcatactgatttaagaaatgatttctccttttggcaaagcgaccccattcaatatggttataataaaagactaatgtcaaaaactgaacaaaagctt

SEQ ID NO: 438393 - DNA, 2355 bp, Homo sapiens
gctggtcaccgccgccaccccctcccgccctgttctctttcaggtcgggccgggcccggccgcttccgcgagcgccctgcagactgagggagagagagagaaagaggaggggaggaggaggaggattcagggaataggagctggggagcccttctgcgccacagtgatatcagtatcaagataaaagtttggaatgggagaaaaattctcaaagcctgaaagaaaatctgtagttacttttggtgacgctgtccagttcccacaatgtatcattccttatctgaaactagacatcctctgcagccagaagaacaagaagtaggcattgaccccttgtccagttactctaacaagtctggaggagattcaaataaaaatggaagaagaacaagttctactttagactctgaagggacttttaattcctataggaaagaatgggaagaactatttgtaaacaacaattacttggcaacaataaggcagaaggggattaatgggcagctgagaagcagcaggttccgcagcatttgctggaagctatttctttgtgttcttcctcaagacaaaagtcaatggataagtagaattgaagaattaagagcatggtatagcaacattaaagaaatacatattaccaacccgaggaaggttgttggccaacaagatttgatgatcaataatcctctttcacaggatgaagggagtctttggaacaaattcttccaagataaagaacttcgatcaatgattgaacaagatgtcaaaagaacgtttcctgaaatgcagtttttccagcaagaaaatgtgagaaaaattcttacagatgttcttttctgttatgccagagaaaacgagcagttgctttataaacagggcatgcacgaactgttagcacctatagtctttgtccttcactgtgaccaccaagcttttctacatgccagtgagtctgcacagcccagtgaggaaatgaaaactgtcttgaaccctgagtatctggaacatgatgcctatgcagtgttctcacaacttatggaaactgctgaaccttggttttcaacttttgagcatgatggtcagaaggggaaagaaacactgatgactcccattccctttgctagaccacaagatttagggccaacaattgctattgttactaaagtcaaccagatccaggatcatctactgaagaagcatgatattgagctttacatgcacttgaacagactagaaattgcaccacagatatatgggttaaggtgggtgcggctgctatttggacgagagttccccctgcaggaccttctggtggtctgggatgccttgtttgcagacggcctcagcctgggtttagtagattatatcttcgtagccatgttactttacatccgagatgctttgatctctagtaactaccagacctgtctcggccttctgatgcattacccattcatcggggatgtacactcactgattcttaaggctctgttccttagagatccaaagagaaatccaagaccagtgacttatcaattccatccaaatttagattattacaaagcacgaggagcagacctcatgaataaaagccggaccaatgccaaaggtgctcccctgaatataaataaggtctctaatagcctgattaattttggaagaaagttgatttccccagcaatggctccaggcagtgcaggtggccctgtacctggaggcaacagcagtagctcctcctctgttgtaattcctaccaggacctcagcagaggccccaagccatcacttgcaacagcaacagcagcagcagaggctgatgaaatcagaaagcatgcctgtgcaattgaacaaagggctaagttctaaaaacatcagttcatctccaagcgttgagagtttgcctggaggaagagaattcactggctctccaccttcatctgctactaaaaaagattccttttttagcaacatctcacgttctcgctcacacagcaaaactatgggcagaaaagaatctgtaagtatttaaggacagttttctcttcgttcttcattttcttctctagagtgctgcatttatgaaagctctgttagtgcccagttttataaagctcttaaaacttttatggactaaaaggaattattttatcaaaagtattttattattttactttagtaatattttaaggctgtagcctatattacactggaaaaaaaaaaaagtagcatcattttaaaataagttgaatctttcccaaatcccagtcctttttttctctacaaatgcctttttgtcaaagcctgtgttttcttataaaatttaacagataaatgatggaacttgaaacaaaccaag

SEQ ID NO: 438394 - DNA, 331 bp, Homo sapiens
tgttcccccagggaagccagcatttggcttcagaggggctcacaagatgctgctggcactgcaccactggtaaacgtgtgggcttcagggcagcaggccaaacactgcgtctttcaaggtcgaatgtagggtgaggtggcctagctttccaccacgagtcccccagttcacagggccttccactcagttctttgccagtttcttctttcatccacctgtacttctgactgtacttcacaggcctcttcagaaacgccagggtgcactgatagagggaattccgatgacttcatcctgatttccaaagatgatgatgggagcagtgccaggg

SEQ ID NO: 438395 - DNA, 3285 bp, Homo sapiens
gctggtcaccgccgccaccccctcccgccctgttctctttcaggtcgggccgggcccggccgcttccgcgagcgccctgcagactgagggagagagagagaaagaggaggggaggaggaggaggattcagggaataggagctggggagcccttctgcgccacagagatggggtctcactctgtcatccaggctggaatatagtggcacaatcatagcccattgtagcctccatctcaaggactcaggggatcctcccttctaggcctcccaagtagctgggattacaggtagttacttttggtgacgctgtccagttcccacaatgtatcattccttatctgaaactagacatcctctgcagccagaagaacaagaagtaggcattgaccccttgtccagttactctaacaagtctggaggagattcaaataaaaatggaagaagaacaagttctactttagactctgaagggacttttaattcctataggaaagaatgggaagaactatttgtaaacaacaattacttggcaacaataaggcagaaggggattaatgggcagctgagaagcagcaggttccgcagcatttgctggaagctatttctttgtgttcttcctcaagacaaaagtcaatggataagtagaattgaagaattaagagcatggtatagcaacattaaagaaatacatattaccaacccgaggaaggttgttggccaacaagatttgatgatcaataatcctctttcacaggatgaagggagtctttggaacaaattcttccaagataaagaacttcgatcaatgattgaacaagatgtcaaaagaacgtttcctgaaatgcagtttttccagcaagaaaatgtgagaaaaattcttacagatgttcttttctgttatgccagagaaaacgagcagttgctttataaacagggcatgcacgaactgttagcacctatagtctttgtccttcactgtgaccaccaagcttttctacatgccagtgagtctgcacagcccagtgaggaaatgaaaactgtcttgaaccctgagtatctggaacatgatgcctatgcagtgttctcacaacttatggaaactgctgaaccttggttttcaacttttgagcatgatggtcagaaggggaaagaaacactgatgactcccattccctttgctagaccacaagatttagggccaacaattgctattgttactaaagtcaaccagatccaggatcatctactgaagaagcatgatattgagctttacatgcacttgaacagactagaaattgcaccacagatatatgggttaaggtgggtgcggctgctatttggacgagagttccccctgcaggaccttctggtggtctgggatgccttgtttgcagacggcctcagcctgggtttagtagattatatcttcgtagccatgttactttacatccgagatgctttgatctctagtaactaccagacctgtctcggccttctgatgcattacccattcatcggggatgtacactcactgattcttaaggctctgttccttagagatccaaagagaaatccaagaccagtgacttatcaattccatccaaatttagattattacaaagcacgaggagcagacctcatgaataaaagccggaccaatgccaaaggtgctcccctgaatataaataaggtctctaatagcctgattaattttggaagaaagttgatttccccagcaatggctccaggcagtgcaggtggccctgtacctggaggcaacagcagtagctcctcctctgttgtaattcctaccaggacctcagcagaggccccaagccatcacttgcaacagcaacagcagcagcagaggctgatgaaatcagaaagcatgcctgtgcaattgaacaaagggctaagttctaaaaacatcagttcatctccaagcgttgagagtttgcctggaggaagagaattcactggctctccaccttcatctgctactaaaaaagattccttttttagcaacatctcacgttctcgctcacacagcaaaactatgggcagaaaagaatctgaagaagaattagaagcccaaatttccttccttcaagggcagttgaatgacctggatgccatgtgcaaatactgtgcaaaggtgatggacactcatcttgtaaatattcaagatgtgatattacaagaaaatttggaaaaagaagatcaaattctggtttccctggcaggattaaaacagatcaaagacattctaaaaggttccctgcgttttaaccagagccagctagaggccgaagagaacgaacagatcaccattgcggacaaccactactgctccagcggccagggccagggccgaggccaaggccagagcgttcaaatgtcaggggccattaaacaggcctcttcagaaacgccagggtgcactgatagagggaattccgatgacttcatcctgatttccaaagatgatgatgggagcagtgccaggggctccttctccggccaggcccagcctcttcgcaccctcagaagcacctctgggaaaagccaggccccagtctgctccccactggtgttctcagatccactgatgggcccagcctcagcttcctccagcaaccccagctccagtcctgatgacgacagcagcaaggactctggcttcaccattgtgagtcccctggacatctgaccacagtgcccagtcctgccccacagggatctagccacccttcagtggccccaaggccagactgaggctcatccagtggagaaccttcttaaaccactgcttccttcccggcatgcatttggcattggtccagccctttgaaaccccttagagagaagcatatatggccacaaagcacagaggcttaggtttgccacatgcagacagggctttctgggcccttacctaatccccacccgactcttgctctgagttagagctgagttacgtacccagtatcacactcacagttagaaaagaccgaatcacaatttagaatcacttttcctctgtccccttctccccagctaagaatgtgtggcacctccatcagttatacttagaaggagcagaaatagttattttcgtatcttctatccctcaaagcatcagacatgggaaaattggtttataccaagaaagcttcctctgtggaaatctgtctcagcctactttattcctgcattgggaagccatatcgcagagctaaatgcaatagaatgaaccagaactagtggattccagggctggggga

SEQ ID NO: 438396 - DNA, 6466 bp, Homo sapiens
gctggtcaccgccgccaccccctcccgccctgttctctttcaggtcgggccgggcccggccgcttccgcgagcgccctgcagactgagggagagagagagaaagaggaggggaggaggaggaggattcagggaataggagctggggagcccttctgcgccacagtgatatcagtatcaagataaaagtttggaatgggagaaaaattctcaaagcctgaaagaaaatctgtagttacttttggtgacgctgtccagttcccacaatgtatcattccttatctgaaactagacatcctctgcagccagaagaacaagaagtaggcattgaccccttgtccagttactctaacaagtctggaggagattcaaataaaaatggaagaagaacaagttctactttagactctgaagggacttttaattcctataggaaagaatgggaagaactatttgtaaacaacaattacttggcaacaataaggcagaaggggattaatgggcagctgagaagcagcaggttccgcagcatttgctggaagctatttctttgtgttcttcctcaagacaaaagtcaatggataagtagaattgaagaattaagagcatggtatagcaacattaaagaaatacatattaccaacccgaggaaggttgttggccaacaagatttgatgatcaataatcctctttcacaggatgaagggagtctttggaacaaattcttccaagataaagaacttcgatcaatgattgaacaagatgtcaaaagaacgtttcctgaaatgcagtttttccagcaagaaaatgtgagaaaaattcttacagatgttcttttctgttatgccagagaaaacgagcagttgctttataaacagggcatgcacgaactgttagcacctatagtctttgtccttcactgtgaccaccaagcttttctacatgccagtgagtctgcacagcccagtgaggaaatgaaaactgtcttgaaccctgagtatctggaacatgatgcctatgcagtgttctcacaacttatggaaactgctgaaccttggttttcaacttttgagcatgatggtcagaaggggaaagaaacactgatgactcccattccctttgctagaccacaagatttagggccaacaattgctattgttactaaagtcaaccagatccaggatcatctactgaagaagcatgatattgagctttacatgcacttgaacagactagaaattgcaccacagatatatgggttaaggtgggtgcggctgctatttggacgagagttccccctgcaggaccttctggtggtctgggatgccttgtttgcagacggcctcagcctgggtttagtagattatatcttcgtagccatgttactttacatccgagatgctttgatctctagtaactaccagacctgtctcggccttctgatgcattacccattcatcggggatgtacactcactgattcttaaggctctgttccttagagatccaaagagaaatccaagaccagtgacttatcaattccatccaaatttagattattacaaagcacgaggagcagacctcatgaataaaagccggaccaatgccaaaggtgctcccctgaatataaataaggtctctaatagcctgattaattttggaagaaagttgatttccccagcaatggctccaggcagtgcaggtggccctgtacctggaggcaacagcagtagctcctcctctgttgtaattcctaccaggacctcagcagaggccccaagccatcacttgcaacagcaacagcagcagcagaggctgatgaaatcagaaagcatgcctgtgcaattgaacaaagggctaagttctaaaaacatcagttcatctccaagcgttgagagtttgcctggaggaagagaattcactggctctccaccttcatctgctactaaaaaagattccttttttagcaacatctcacgttctcgctcacacagcaaaactatgggcagaaaagaatctgaagaagaattagaagcccaaatttccttccttcaagggcagttgaatgacctggatgccatgtgcaaatactgtgcaaaggtgatggacactcatcttgtaaatattcaagatgtgatattacaagaaaatttggaaaaagaagatcaaattctggtttccctggcaggattaaaacagatcaaagacattctaaaaggttccctgcgttttaaccagagccagctagaggccgaagagaacgaacagatcaccattgcggacaaccactactgctccagcggccagggccagggccgaggccaaggccagagcgttcaaatgtcaggggccattaaacaggcctcttcagaaacgccagggtgcactgatagagggaattccgatgacttcatcctgatttccaaagatgatgatgggagcagtgccaggggctccttctccggccaggcccagcctcttcgcaccctcagaagcacctctgggaaaagccaggccccagtctgctccccactggtgttctcagatccactgatgggcccagcctcagcttcctccagcaaccccagctccagtcctgatgacgacagcagcaaggactctggcttcaccattgtgagtcccctggacatctgaccacagtgcccagtcctgccccacagggatctagccacccttcagtggccccaaggccagactgaggctcatccagtggagaaccttcttaaaccactgcttccttcccggcatgcatttggcattggtccagccctttgaaaccccttagagagaagcatatatggccacaaagcacagaggcttaggtttgccacatgcagacagggctttctgggcccttacctaatccccacccgactcttgctctgagttagagctgagttacgtacccagtatcacactcacagttagaaaagaccgaatcacaatttagaatcacttttcctctgtccccttctccccagctaagaatgtgtggcacctccatcagttatacttagaaggagcagaaatagttattttcgtatcttctatccctcaaagcatcagacatgggaaaattggtttataccaagaaagcttcctctgtggaaatctgtctcagcctactttattcctgcattgggaagccatatcgcagagctaaatgcaatagaatgaaccagaactagtggattccagggctgggggaaaaaaaaaaaagaaaaaacctcattactgacctctcaaagttataaggatctctgcaaacaggatctaagcttaggaataatatttaggtgtgatatagtgttagatttttttgatgtattaaagaatgcatctccaatccttaggccatatcaactttggccatcaatatctctccttaaacaattatatttcaccttttagaatctttcatagccagaaaacaagattactgtaagccagttttagctgcactgatttcaaaagatataagaatattactatccttcaaatggaaaatgcgaccttgactttatgggataaacatctttcagacagtcagttttctagtcaggtttctctggtttcagagctgtatatacctgtcaactgaggaataaagggaaaaacccaagttcattcccacccaaagtcagaatccctcattggccttaaggtagcagtcataagacagagaattggacctagagtcccttctgtggggaataaggatacctagagaacattccacatgccaagaggatgcaggatttctacacaaccccttcccttcttggaagtcaagtgtaggtactgcagggcctgtgctcagctgtgaaccccgtatcctgggccccactgccgggaccgggtctgacatgccagtgccttcctgggctgagcacagattagagactctcccccttgtcagtcagcaccttaggaaaccatgatgggcacagagcatcacatgagctgtttctctccttaaagaagatccctggaaaggatgcttttcctctcctttgcctgcgcaggaattctaacaggagtgggtgaggatggcagagggacacagtgcctgtctcgcctccatcagggagagcagccatgccagggatgactagctctttgagcctgtcctcagaggatggcgaggcagccgggcagtggaggccttcatggtaacaaatgaaagctcagtatagaggaacagacactgtttacgtccctcccactgctaaccttatatatctctatagacaaatgtgataatgacatgatttcccacctgccctccaagaaaatggtgactcactctcaagtcagctactgtagagagggttctaattggttctgcaatttgctcttaaactctagcagggaactctcctcttaccacatcagcatgtaaggtgaataataactctggttttgccagacagcaggttgtctgaccttcaaccactgggcaattgcctggcagatgcacacagtagctccctggcttctggctctgagtgttcctctcagcacctctgagtaagctgctgccaagcacatatccctatgacaacactttgtaaaagccgcggggcccccatacagcgagtgaccttgcaactgtgcagggttgccattggtcactttctcaccttgggaaggtgtcagtgttttcagttctaaggtaagaggtgtagagctgttcccaccagggctctgggacagactggaaaggaccacagacctggccatccctgggcagcagggccagtgtcacctgctgacctctagtatttcctttgccctagagctagagtcatgatagctgagggtcactcgccctgcaagagtcactaggcacccaccatgccaataaggctctccgctggctccctgcagttggctgggtgtttaatagtcactgaaaactcccagccctgctgcacactagaggcaggtcctctcggtcctctccatcctgtgcttctgtggcccccagcaagctcaccgcctccttggaggagagagacatacaaggacagtgggtcatgggtagtaccagcctcaaattcccacaggctcatactcagacaattgtattactgccttatgttttttaagtgtttttttaaattcttcatagttgagtattatttgcaattttattagttacagtgctattaaagaatatgtgctcctttttattatattatcagatacttatgtttaattgtacattttttaaatcctgaatatattgtgttttgttaacaaatgtaatcagtggaacccttcttacgttttgattattagcagttaaatacattttgtatacatgaagcttagattaattcccatcatcatcatctcctgtttttatatgtgtccctatgtgtttcatgcattcctctttgatcagattggaatttgagttaaaatttagctttgtacattacgtgtgagagttacagactagcaagtctaattactttgccttaccttgagtgtatgccacagggtcagataacacattaaacatttagttacactggattactcttccaaagctgacctcctgctaatgttcagaggtaactgcaatccggaaagaaataatatcactgcagaaagaatgtgactctaaaaataaaccaggacctccctgtgatttgccttgcctgcagatgaccagttgactcttgtgctgtcagccctggggttgctaaggaagctgcttcagggagttgggggttagttgcccgctctcaacaggaatgcctcctctactttgtcagagatgctgaacaaatatcaaactctgtggcagtcatgctggcctcctaagaataacctgtgagtcagagttgatgcacattatttttgtttttattttatttttttaaggaactgctccaagggttcattatagaacaggagtgtgtacggaggacttaggtccccacatagagtggccgttctgtggcggctccaaccaattccatccctcctttcctgcggacacacacctggcccctggcccctgccctgtgtgtctggaggaggggcactggggaggctgtggagcagagagaagaggccggatacattgaggatggcacctggcaagccaggcttccttctcaaaggccagactgctttctcagtgttacttactaaagctctctttttatactgttaaaaagatatataaagttcgtataaacaggcttgagaccactttgatgtaaaagctgtcatagtagtttttctcacagtggcacaattcatttgattgatggaatattcagtgacgccatgtatgccctatcgcttttttctcatccatctttatgctataactcatactgatttaagaaatgatttctccttttggcaaagcgaccccattcaatatggttataataaaagactaatgtcaaaaactgaacaaaagctt

SEQ ID NO: 438397 - DNA, 6525 bp, Homo sapiens
gctggtcaccgccgccaccccctcccgccctgttctctttcaggtcgggccgggcccggccgcttccgcgagcgccctgcagactgagggagagagagagaaagaggaggggaggaggaggaggattcagggaataggagctggggagcccttctgcgccacagagatggggtctcactctgtcatccaggctggaatatagtggcacaatcatagcccattgtagcctccatctcaaggactcaggggatcctcccttctaggcctcccaagtagctgggattacaggtagttacttttggtgacgctgtccagttcccacaatgtatcattccttatctgaaactagacatcctctgcagccagaagaacaagaagtaggcattgaccccttgtccagttactctaacaagtctggaggagattcaaataaaaatggaagaagaacaagttctactttagactctgaagggacttttaattcctataggaaagaatgggaagaactatttgtaaacaacaattacttggcaacaataaggcagaaggggattaatgggcagctgagaagcagcaggttccgcagcatttgctggaagctatttctttgtgttcttcctcaagacaaaagtcaatggataagtagaattgaagaattaagagcatggtatagcaacattaaagaaatacatattaccaacccgaggaaggttgttggccaacaagatttgatgatcaataatcctctttcacaggatgaagggagtctttggaacaaattcttccaagataaagaacttcgatcaatgattgaacaagatgtcaaaagaacgtttcctgaaatgcagtttttccagcaagaaaatgtgagaaaaattcttacagatgttcttttctgttatgccagagaaaacgagcagttgctttataaacagggcatgcacgaactgttagcacctatagtctttgtccttcactgtgaccaccaagcttttctacatgccagtgagtctgcacagcccagtgaggaaatgaaaactgtcttgaaccctgagtatctggaacatgatgcctatgcagtgttctcacaacttatggaaactgctgaaccttggttttcaacttttgagcatgatggtcagaaggggaaagaaacactgatgactcccattccctttgctagaccacaagatttagggccaacaattgctattgttactaaagtcaaccagatccaggatcatctactgaagaagcatgatattgagctttacatgcacttgaacagactagaaattgcaccacagatatatgggttaaggtgggtgcggctgctatttggacgagagttccccctgcaggaccttctggtggtctgggatgccttgtttgcagacggcctcagcctgggtttagtagattatatcttcgtagccatgttactttacatccgagatgctttgatctctagtaactaccagacctgtctcggccttctgatgcattacccattcatcggggatgtacactcactgattcttaaggctctgttccttagagatccaaagagaaatccaagaccagtgacttatcaattccatccaaatttagattattacaaagcacgaggagcagacctcatgaataaaagccggaccaatgccaaaggtgctcccctgaatataaataaggtctctaatagcctgattaattttggaagaaagttgatttccccagcaatggctccaggcagtgcaggtggccctgtacctggaggcaacagcagtagctcctcctctgttgtaattcctaccaggacctcagcagaggccccaagccatcacttgcaacagcaacagcagcagcagaggctgatgaaatcagaaagcatgcctgtgcaattgaacaaagggctaagttctaaaaacatcagttcatctccaagcgttgagagtttgcctggaggaagagaattcactggctctccaccttcatctgctactaaaaaagattccttttttagcaacatctcacgttctcgctcacacagcaaaactatgggcagaaaagaatctgaagaagaattagaagcccaaatttccttccttcaagggcagttgaatgacctggatgccatgtgcaaatactgtgcaaaggtgatggacactcatcttgtaaatattcaagatgtgatattacaagaaaatttggaaaaagaagatcaaattctggtttccctggcaggattaaaacagatcaaagacattctaaaaggttccctgcgttttaaccagagccagctagaggccgaagagaacgaacagatcaccattgcggacaaccactactgctccagcggccagggccagggccgaggccaaggccagagcgttcaaatgtcaggggccattaaacaggcctcttcagaaacgccagggtgcactgatagagggaattccgatgacttcatcctgatttccaaagatgatgatgggagcagtgccaggggctccttctccggccaggcccagcctcttcgcaccctcagaagcacctctgggaaaagccaggccccagtctgctccccactggtgttctcagatccactgatgggcccagcctcagcttcctccagcaaccccagctccagtcctgatgacgacagcagcaaggactctggcttcaccattgtgagtcccctggacatctgaccacagtgcccagtcctgccccacagggatctagccacccttcagtggccccaaggccagactgaggctcatccagtggagaaccttcttaaaccactgcttccttcccggcatgcatttggcattggtccagccctttgaaaccccttagagagaagcatatatggccacaaagcacagaggcttaggtttgccacatgcagacagggctttctgggcccttacctaatccccacccgactcttgctctgagttagagctgagttacgtacccagtatcacactcacagttagaaaagaccgaatcacaatttagaatcacttttcctctgtccccttctccccagctaagaatgtgtggcacctccatcagttatacttagaaggagcagaaatagttattttcgtatcttctatccctcaaagcatcagacatgggaaaattggtttataccaagaaagcttcctctgtggaaatctgtctcagcctactttattcctgcattgggaagccatatcgcagagctaaatgcaatagaatgaaccagaactagtggattccagggctgggggaaaaaaaaaaaagaaaaaacctcattactgacctctcaaagttataaggatctctgcaaacaggatctaagcttaggaataatatttaggtgtgatatagtgttagatttttttgatgtattaaagaatgcatctccaatccttaggccatatcaactttggccatcaatatctctccttaaacaattatatttcaccttttagaatctttcatagccagaaaacaagattactgtaagccagttttagctgcactgatttcaaaagatataagaatattactatccttcaaatggaaaatgcgaccttgactttatgggataaacatctttcagacagtcagttttctagtcaggtttctctggtttcagagctgtatatacctgtcaactgaggaataaagggaaaaacccaagttcattcccacccaaagtcagaatccctcattggccttaaggtagcagtcataagacagagaattggacctagagtcccttctgtggggaataaggatacctagagaacattccacatgccaagaggatgcaggatttctacacaaccccttcccttcttggaagtcaagtgtaggtactgcagggcctgtgctcagctgtgaaccccgtatcctgggccccactgccgggaccgggtctgacatgccagtgccttcctgggctgagcacagattagagactctcccccttgtcagtcagcaccttaggaaaccatgatgggcacagagcatcacatgagctgtttctctccttaaagaagatccctggaaaggatgcttttcctctcctttgcctgcgcaggaattctaacaggagtgggtgaggatggcagagggacacagtgcctgtctcgcctccatcagggagagcagccatgccagggatgactagctctttgagcctgtcctcagaggatggcgaggcagccgggcagtggaggccttcatggtaacaaatgaaagctcagtatagaggaacagacactgtttacgtccctcccactgctaaccttatatatctctatagacaaatgtgataatgacatgatttcccacctgccctccaagaaaatggtgactcactctcaagtcagctactgtagagagggttctaattggttctgcaatttgctcttaaactctagcagggaactctcctcttaccacatcagcatgtaaggtgaataataactctggttttgccagacagcaggttgtctgaccttcaaccactgggcaattgcctggcagatgcacacagtagctccctggcttctggctctgagtgttcctctcagcacctctgagtaagctgctgccaagcacatatccctatgacaacactttgtaaaagccgcggggcccccatacagcgagtgaccttgcaactgtgcagggttgccattggtcactttctcaccttgggaaggtgtcagtgttttcagttctaaggtaagaggtgtagagctgttcccaccagggctctgggacagactggaaaggaccacagacctggccatccctgggcagcagggccagtgtcacctgctgacctctagtatttcctttgccctagagctagagtcatgatagctgagggtcactcgccctgcaagagtcactaggcacccaccatgccaataaggctctccgctggctccctgcagttggctgggtgtttaatagtcactgaaaactcccagccctgctgcacactagaggcaggtcctctcggtcctctccatcctgtgcttctgtggcccccagcaagctcaccgcctccttggaggagagagacatacaaggacagtgggtcatgggtagtaccagcctcaaattcccacaggctcatactcagacaattgtattactgccttatgttttttaagtgtttttttaaattcttcatagttgagtattatttgcaattttattagttacagtgctattaaagaatatgtgctcctttttattatattatcagatacttatgtttaattgtacattttttaaatcctgaatatattgtgttttgttaacaaatgtaatcagtggaacccttcttacgttttgattattagcagttaaatacattttgtatacatgaagcttagattaattcccatcatcatcatctcctgtttttatatgtgtccctatgtgtttcatgcattcctctttgatcagattggaatttgagttaaaatttagctttgtacattacgtgtgagagttacagactagcaagtctaattactttgccttaccttgagtgtatgccacagggtcagataacacattaaacatttagttacactggattactcttccaaagctgacctcctgctaatgttcagaggtaactgcaatccggaaagaaataatatcactgcagaaagaatgtgactctaaaaataaaccaggacctccctgtgatttgccttgcctgcagatgaccagttgactcttgtgctgtcagccctggggttgctaaggaagctgcttcagggagttgggggttagttgcccgctctcaacaggaatgcctcctctactttgtcagagatgctgaacaaatatcaaactctgtggcagtcatgctggcctcctaagaataacctgtgagtcagagttgatgcacattatttttgtttttattttatttttttaaggaactgctccaagggttcattatagaacaggagtgtgtacggaggacttaggtccccacatagagtggccgttctgtggcggctccaaccaattccatccctcctttcctgcggacacacacctggcccctggcccctgccctgtgtgtctggaggaggggcactggggaggctgtggagcagagagaagaggccggatacattgaggatggcacctggcaagccaggcttccttctcaaaggccagactgctttctcagtgttacttactaaagctctctttttatactgttaaaaagatatataaagttcgtataaacaggcttgagaccactttgatgtaaaagctgtcatagtagtttttctcacagtggcacaattcatttgattgatggaatattcagtgacgccatgtatgccctatcgcttttttctcatccatctttatgctataactcatactgatttaagaaatgatttctccttttggcaaagcgaccccattcaatatggttataataaaagactaatgtcaaaaactgaacaaaagctt

SEQ ID NO: 438398 - DNA, 2628 bp, Homo sapiens
gctggtcaccgccgccaccccctcccgccctgttctctttcaggtcgggccgggcccggccgcttccgcgagcgccctgcagactgagggagagagagagaaagaggaggggaggaggaggaggattcagggaataggagctggggagcccttctgcgccacagtgatatcagtatcaagataaaagtttggaatgggagaaaaattctcaaagcctgaaagaaaatctgtagttacttttggtgacgctgtccagttcccacaatgtatcattccttatctgaaactagacatcctctgcagccagaagaacaagaagtaggcattgaccccttgtccagttactctaacaagtctggaggagattcaaataaaaatggaagaagaacaagttctactttagactctgaagggacttttaattcctataggaaagaatgggaagaactatttgtaaacaacaattacttggcaacaataaggcagaaggggattaatgggcagctgagaagcagcaggttccgcagcatttgctggaagctatttctttgtgttcttcctcaagacaaaagtcaatggataagtagaattgaagaattaagagcatggtatagcaacattaaagaaatacatattaccaacccgaggaaggttgttggccaacaagatttgatgatcaataatcctctttcacaggatgaagggagtctttggaacaaattcttccaagataaagaacttcgatcaatgattgaacaagatgtcaaaagaacgtttcctgaaatgcagtttttccagcaagaaaatgtgagaaaaattcttacagatgttcttttctgttatgccagagaaaacgagcagttgctttataaacagggcatgcacgaactgttagcacctatagtctttgtccttcactgtgaccaccaagcttttctacatgccagtgagtctgcacagcccagtgaggaaatgaaaactgtcttgaaccctgagtatctggaacatgatgcctatgcagtgttctcacaacttatggaaactgctgaaccttggttttcaacttttgagcatgatggtcagaaggggaaagaaacactgatgactcccattccctttgctagaccacaagatttagggccaacaattgctattgttactaaagtcaaccagatccaggatcatctactgaagaagcatgatattgagctttacatgcacttgaacagactagaaattgcaccacagatatatgggttaaggtgggtgcggctgctatttggacgagagttccccctgcaggaccttctggtggtctgggatgccttgtttgcagacggcctcagcctgggtttagtagattatatcttcgtagccatgttactttacatccgagatgctttgatctctagtaactaccagacctgtctcggccttctgatgcattacccattcatcggggatgtacactcactgattcttaaggctctgttccttagagatccaaagagaaatccaagaccagtgacttatcaattccatccaaatttagattattacaaagcacgaggagcagacctcatgaataaaagccggaccaatgccaaaggtgctcccctgaatataaataaggtctctaatagcctgattaattttggaagaaagttgatttccccagcaatggctccaggcagtgcaggtggccctgtacctggaggcaacagcagtagctcctcctctgttgtaattcctaccaggacctcagcagaggccccaagccatcacttgcaacagcaacagcagcagcagaggctgatgaaatcagaaagcatgcctgtgcaattgaacaaagggctaagttctaaaaacatcagttcatctccaagcgttgagagtttgcctggaggaagagaattcactggctctccaccttcatctgctactaaaaaagattccttttttagcaacatctcacgttctcgctcacacagcaaaactatgggcagaaaagaatctgaagaagaattagaagcccaaatttccttccttcaagggcagttgaatgacctggatgccatgtgcaaatactgtgcaaaggtgatggacactcatcttgtaaatattcaagatgtgatattacaagaaaatttggaaaaagaagatcaaattctggtttccctggcaggattaaaacagatcaaggaccttctggtggtctgggatgccttgtttgcagacggcctcagcctgggtttagtagattatatcttcgtagccatgttactttacatccgagatgctttgatctctagtaactgccagactgctttctcagtgttacttactaaagctctctttttatactgttaaaaagatatataaagttcgtataaacaggcttgagaccactttgatgtaaaagctgtcatagtagtttttctcacagtggcacaattcatttgattgatggaatattcagtgacgccatgtatgccctatcgcttttttctcatccatctttatgctataactcatactgatttaagaaatgatttctccttttggcaaagcgaccccattcaatatggttataataaaagactaatgtcaaaaactgaacaaaagctt

SEQ ID NO: 438399 - DNA, 1680 bp, Homo sapiens
gctggtcaccgccgccaccccctcccgccctgttctctttcaggtcgggccgggcccggccgcttccgcgagcgccctgcagactgagggagagagagagaaagaggaggggaggaggaggaggattcagggaataggagctggggagcccttctgcgccacagtgatatcagtatcaagataaaagtttggaatgggagaaaaattctcaaagcctgaaagaaaatctgtagttacttttggtgacgctgtccagttcccacaatgtatcattccttatctgaaactagacatcctctgcagccagaagaacaagaagtaggcattgaccccttgtccagttactctaacaagtctggaggagattcaaataaaaatggaagaagaacaagttctactttagactctgaagggacttttaattcctataggaaagaatgggaagaactatttgtaaacaacaattacttggcaacaataaggcagaaggggattaatgggcagctgagaagcagcaggttccgcagcatttgctggaagctatttctttgtgttcttcctcaagacaaaagtcaatggataagtagaattgaagaattaagagcatggtatagcaacattaaagaaatacatattaccaacccgaggaaggttgttggccaacaagatttgatgatcaataatcctctttcacaggatgaagggagtctttggaacaaattcttccaagataaagaacttcgatcaatgattgaacaagatgtcaaaagaacgtttcctgaaatgcagtttttccagcaagaaaatgtgagaaaaattcttacagatgttcttttctgttatgccagagaaaacgagcagttgctttataaacagggcatgcacgaactgttagcacctatagtctttgtccttcactgtgaccaccaagcttttctacatgccagtgagtctgcacagcccagtgaggaaatgaaaactgtcttgaaccctgagtatctggaacatgatgcctatgcagtgttctcacaacttatggaaactgctgaaccttggttttcaacttttgagcatgatggtcagaaggggaaagaaacactgatgactcccattccctttgctagaccacaagatttagggccaacaattgctattgttactaaagtcaaccagatccaggatcatctactgaagaagcatgatattgagctttacatgcacttgaacagactagaaattgcaccacagatatatgggttctgcccttggaagaatttggaaactccaagggacaacactttagtgaaatgagaatttatttgtgcttggcacagtgttctaatgaagagggtttcttgggctgctttgttttgtgaggaggtggccagtgaggaaagagaagattgatgatagccagcaccttggaggatgcttttgattacaagcttcagaatatcttgcctcaaactagctgaagtctggaggtactgtgacacaagaggctcaattaaggatccaagattttcgccatatttccgctgtgttaacttcatcatcagtttcttaagacatactctcttgtaatcacaaagtgattgacaatgattttggagctataggctttcttgttctagccaaactggtgagacagaataaaaccgttcaccaagtacaacgtaa

SEQ ID NO: 438400 - DNA, 1511 bp, Homo sapiens
  misc_feature (1)..(1): n is a, c, g, or t
ncacagcagctgtggctggggagcccagatgaagtgtggctctatcttgtatgtgagcacacccacattttcactgccattatctgggacagcagaaccaggtttggctcaacagatttctctttccacccatctattgcaggtgtagtggtcttgctgcttctccagggaggatctgcctacaaactggtttgctactttaccaactggtcccaggaccggcaggaaccaggaaaattcacccctgagaatattgaccccttcctatgctctcatctcatctattcattcgccagcatcgaaaacaacaaggttatcatcaaggacaagagtgaagtgatgctctaccagaccatcaacagtctcaaaaccaagaatcccaaactgaaaattctcttgtccattggagggtacctgtttggttccaaagggttccaccctatggtggattcttctacatcacgcttggaattcattaactccataatcctgtttctgaggaaccataactttgatggactggatgtaagctggatctacccagatcagaaagaaaacactcatttcactgtgctgattcatgagttagcagaagcctttcagaaggacttcacaaaatccaccaaggaaaggcttctcttgactgcgggcgtatctgcagggaggcaaatgattgataacagctatcaagttgagaaactggcaaaagatctggatttcatcaacctcctgtcctttgacttccatgggtcttgggaaaagccccttatcactggccacaacagccctctgagcaaggggtggcaggacagagggccaagctcctactacaatgtggaatatgctgtggggtactggatacataagggaatgccatcagagaaggtggtcatgggcatccccacatatgggcactccttcacactggcctctgcagaaaccaccgtgggggcccctgcctctggccctggagctgctggacccatcacagagtcttcaggcttcctggcctattatgagatctgccagttcctgaaaggagccaagatcacgcggctccaggatcagcaggttccctacgcagtcaaggggaaccagtgggtgggctatgatgatgtgaagagtatggagaccaaggttcagttcttaaagaatttaaacctgggaggagccatgatctggtctattgacatggatgacttcactggcaaatcctgcaaccagggcccttaccctcttgtccaagcagtcaagagaagccttggctccctgtgaaggattaacttacagagaagcaggcaagatgaccttgctgcctggggcctgctctctcccaggaattctcatgtgggattccccttgccaggccggcctttggatctctcttccaagcctttcctgacttcctcttagatcatagattggacctggttttgttttcctgcagctgttgacttgttgccctgaagtacaataaaaaaaattcattttgctccagtaaaaaaaaaaaa

SEQ ID NO: 438401 - DNA, 2180 bp, Homo sapiens
cctctggctgaaagtagccggaaaggcctggctacttatgggctaagggttttgaatctgggctgcagattgtgcagagagttaatttacaaccttagaacagtggacaatgcttgatagtgtcagactgtgggcactggaaaccggctggtctcaggatagggatcctatacctccaacacttggattgctgacctttcacttctcaacttggtcaacggaagtcaaaaaccccagcaaggccacctgctgaattctagaacttccaggacttcccgacctagagcacatggccaaacactttctgcagccaggatgtcactgccctcccctgattaagataaatagacttggcctaataattatccaaatagattaattcttccaacaaaagaaagagttctggaagtcaatacccaatagccttctttcctgatggtgcagtagagagcaaaatccatctctaagcccagagttcgtgatattttggaaatagctacaatggtgaatttcaccccctggagagttctgtcactggcacttgttccagggttccagcagagtccctcttctcaaataggaagcactggctcagaagactgtccccagcataagatggagtctcactctgtcacccaggctggaccatgagtgcttttttaaacctcattttaaatctgaaagaagaatgaatacattggacaggctgtcgaaacctcagtggataaaagacctagagaatgtgtatcccagaagaagctggccaaggatatgggagcaaccaccatggaccagaagtctctctgggcaggtgtagtggtcttgctgcttctccagggaggatctgcctacaaactggtttgctactttaccaactggtcccaggaccggcaggaaccaggaaaattcacccctgagaatattgaccccttcctatgctctcatctcatctattcattcgccagcatcgaaaacaacaaggttatcatcaaggacaagagtgaagtgatgctctaccagaccatcaacagtctcaaaaccaagaatcccaaactgaaaattctcttgtccattggagggtacctgtttggttccaaagggttccaccctatggtggattcttctacatcacgcttggaattcattaactccataatcctgtttctgaggaaccataactttgatggactggatgtaagctggatctacccagatcagaaagaaaacactcatttcactgtgctgattcatgagttagcagaagcctttcagaaggacttcacaaaatccaccaaggaaaggcttctcttgactgcgggcgtatctgcagggaggcaaatgattgataacagctatcaagttgagaaactggcaaaagatctggatttcatcaacctcctgtcctttgacttccatgggtcttgggaaaagccccttatcactggccacaacagccctctgagcaaggggtggcaggacagagggccaagctcctactacaatgtggaatatgctgtggggtactggatacataagggaatgccatcagagaaggtggtcatgggcatccccacatatgggcactccttcacactggcctctgcagaaaccaccgtgggggcccctgcctctggccctggagctgctggacccatcacagagtcttcaggcttcctggcctattatgagatctgccagttcctgaaaggagccaagatcacgcggctccaggatcagcaggttccctacgcagtcaaggggaaccagtgggtgggctatgatgatgtgaagagtatggagaccaaggttcagttcttaaagaatttaaacctgggaggagccatgatctggtctattgacatggatgacttcactggcaaatcctgcaaccagggcccttaccctcttgtccaagcagtcaagagaagccttggctccctgtgaaggattaacttacagagaagcaggcaagatgaccttgctgcctggggcctgctctctcccaggaattctcatgtgggattccccttgccaggccggcctttggatctctcttccaagcctttcctgacttcctcttagatcatagattggacctggttttgttttcctgcagctgttgacttgttgccctgaagtacaataaaaaaaattcattttgctccagtaaaaaaaaaaaa

SEQ ID NO: 438402 - DNA, 1440 bp, Homo sapiens
  misc_feature (1)..(1): n is a, c, g, or t
ncacagcagctgtggctggggagcccagatgaagtgtggctctatcttgtatgtgagcacacccacattttcactgccattatctgggacagcagaaccaggatctgcctacaaactggtttgctactttaccaactggtcccaggaccggcaggaaccaggaaaattcacccctgagaatattgaccccttcctatgctctcatctcatctattcattcgccagcatcgaaaacaacaaggttatcatcaaggacaagagtgaagtgatgctctaccagaccatcaacagtctcaaaaccaagaatcccaaactgaaaattctcttgtccattggagggtacctgtttggttccaaagggttccaccctatggtggattcttctacatcacgcttggaattcattaactccataatcctgtttctgaggaaccataactttgatggactggatgtaagctggatctacccagatcagaaagaaaacactcatttcactgtgctgattcatgagttagcagaagcctttcagaaggacttcacaaaatccaccaaggaaaggcttctcttgactgcgggcgtatctgcagggaggcaaatgattgataacagctatcaagttgagaaactggcaaaagatctggatttcatcaacctcctgtcctttgacttccatgggtcttgggaaaagccccttatcactggccacaacagccctctgagcaaggggtggcaggacagagggccaagctcctactacaatgtggaatatgctgtggggtactggatacataagggaatgccatcagagaaggtggtcatgggcatccccacatatgggcactccttcacactggcctctgcagaaaccaccgtgggggcccctgcctctggccctggagctgctggacccatcacagagtcttcaggcttcctggcctattatgagatctgccagttcctgaaaggagccaagatcacgcggctccaggatcagcaggttccctacgcagtcaaggggaaccagtgggtgggctatgatgatgtgaagagtatggagaccaaggttcagttcttaaagaatttaaacctgggaggagccatgatctggtctattgacatggatgacttcactggcaaatcctgcaaccagggcccttaccctcttgtccaagcagtcaagagaagccttggctccctgtgaaggattaacttacagagaagcaggcaagatgaccttgctgcctggggcctgctctctcccaggaattctcatgtgggattccccttgccaggccggcctttggatctctcttccaagcctttcctgacttcctcttagatcatagattggacctggttttgttttcctgcagctgttgacttgttgccctgaagtacaataaaaaaaattcattttgctccagtaaaaaaaaaaaa

SEQ ID NO: 438403 - DNA, 1097 bp, Homo sapiens
ggctcgcgagcagatacaggcacaaggcatccccatgtggggtggggaggaaagggttgatcctttccatctaatgtggttctagaaacctcatggattccaggcaagaagcttagcactgtactctgggaaggggaatattgcaccttgtttctttgtttttcctaggagttagcagaagcctttcagaaggacttcacaaaatccaccaaggaaaggcttctcttgactgcgggcgtatctgcagggaggcaaatgattgataacagctatcaagttgagaaactggcaaaagatctggatttcatcaacctcctgtcctttgacttccatgggtcttgggaaaagccccttatcactggccacaacagccctctgagcaaggggtggcaggacagagggccaagctcctactacaatgtggaatatgctgtggggtactggatacataagggaatgccatcagagaaggtggtcatgggcatccccacatatgggcactccttcacactggcctctgcagaaaccaccgtgggggcccctgcctctggccctggagctgctggacccatcacagagtcttcaggcttcctggcctattatgagatctgccagttcctgaaaggagccaagatcacgcggctccaggatcagcaggttccctacgcagtcaaggggaaccagtgggtgggctatgatgatgtgaagagtatggagaccaaggttcagttcttaaagaatttaaacctgggaggagccatgatctggtctattgacatggatgacttcactggcaaatcctgcaaccagggcccttaccctcttgtccaagcagtcaagagaagccttggctccctgtgaaggattaacttacagagaagcaggcaagatgaccttgctgcctggggcctgctctctcccaggaattctcatgtgggattccccttgccaggccggcctttggatctctcttccaagcctttcctgacttcctcttagatcatagattggacctggttttgttttcctgcagctgttgacttgttgccctgaagtacaataaaaaaaattcattttgctccagtaaaaaaaaaaaa

SEQ ID NO: 438404 - DNA, 2040 bp, Homo sapiens
cctctggctgaaagtagccggaaaggcctggctacttatgggctaagggttttgaatctgggctgcagattgtgcagagagttaatttacaaccttagaacagtggacaatgcttgatagtgtcagactgtgggcactggaaaccggctggtctcaggatagggatcctatacctccaacacttggattgctgacctttcacttctcaacttggtcaacggaagtcaaaaaccccagcaaggccacctgctgaattctagaacttccaggacttcccgacctagagcacatggccaaacactttctgcagccaggatgtcactgccctcccctgattaagataaatagacttggcctaataattatccaaatagattaattcttccaacaaaagaaagagttctggaagtcaatacccaatagccttctttcctgatggtgcagtagagagcaaaatccatctctaagcccagagttcgtgatattttggaaatagctacaatggtgaatttcaccccctggagagttctgtcactggcacttgttccagggttccagcagagtccctcttctcaaataggaagcactggctcagaagactgtccccagcataagatggagtctcactctgtcacccaggctggaccatgagtgcttttttaaacctcattttaaatctgaaagaagaatgaatacattggacaggctgtcgaaacctcagtggataaaagacctagagaatgtgtatcccagaagaagctggccaaggatatgggagcaaccaccatggaccagaagtctctctgggcaggtgtagtggtcttgctgcttctccagggaggatctgcctacaaactggtttgctactttaccaactggtcccaggaccggcaggaaccaggaaaattcacccctgagaatattgaccccttcctatgctctcatctcatctattcattcgccagcatcgaaaacaacaaggttatcatcaaggacaagagtgaagtgatgctctaccagaccatcaacagtctcaaaaccaagaatcccaaactgaaaattctcttgtccattggagggtacctgtttggttccaaagggttccaccctatggtggattcttctacatcacgcttggaattcattaactccataatcctgtttctgaggaaccataactttgatggactggatgtaagctggatctacccagatcagaaagaaaacactcatttcactgtgctgattcatgagttagcagaagcctttcagaaggacttcacaaaatccaccaaggaaaggcttctcttgactgcgggcgtatctgcagggaggcaaatgattgataacagctatcaagttgagaaactggcaaaagatctggatttcatcaacctcctgtcctttgacttccatgggtcttgggaaaagccccttatcactggccacaacagccctctgagcaaggggtggcaggacagagggccaagctcctactacaatgtggaatatgctgtggggtactggatacataagggaatgccatcagagaaggtggtcatgggcatccccacatatgggcactccttcacactggcctctgcagaaaccaccgtgggggcccctgcctctggccctggagctgctggacccatcacagagtcttcaggcttcctggcctattatgagatctgccagttcctgaaaggagccaagatcacgcggctccaggatcagcaggttccctacgcagtcaaggggaaccagtgggtgggctatgatgatgtgaagagtatggagaccaaggattaacttacagagaagcaggcaagatgaccttgctgcctggggcctgctctctcccaggaattctcatgtgggattccccttgccaggccggcctttggatctctcttccaagcctttcctgacttcctcttagatcatagattggacctggttttgttttcctgcagctgttgacttgttgccctgaagtacaataaaaaaaattcattttgctccagtaaaaaaaaaaaa

SEQ ID NO: 438405 - DNA, 2150 bp, Homo sapiens
cctctggctgaaagtagccggaaaggcctggctacttatgggctaagggttttgaatctgggctgcagattgtgcagagagttaatttacaaccttagaacagtggacaatgcttgatagtgtcagactgtgggcactggaaaccggctggtctcaggatagggatcctatacctccaacacttggattgctgacctttcacttctcaacttggtcaacggaagtcaaaaaccccagcaaggccacctgctgaattctagaacttccaggacttcccgacctagagcacatggccaaacactttctgcagccaggatgtcactgccctcccctgattaagataaatagacttggcctaataattatccaaatagattaattcttccaacaaaagaaagagttctggaagtcaatacccaatagccttctttcctgatggtgcagtagagagcaaaatccatctctaagcccagagttcgtgatattttggaaatagctacaatggtgaatttcaccccctggagagttctgtcactggcacttgttccagggttccagcagagtccctcttctcaaataggaagcactggctcagaagactgtccccagcataagatggagtctcactctgtcacccaggctggaccatgagtgcttttttaaacctcattttaaatctgaaagaagaatgaatacattggacaggctgtcgaaacctcagtggataaaagacctagagaatgtgtatcccagaagaagctggccaaggatatgggagcaaccaccatggaccagaagtctctctgggcaggatctgcctacaaactggtttgctactttaccaactggtcccaggaccggcaggaaccaggaaaattcacccctgagaatattgaccccttcctatgctctcatctcatctattcattcgccagcatcgaaaacaacaaggttatcatcaaggacaagagtgaagtgatgctctaccagaccatcaacagtctcaaaaccaagaatcccaaactgaaaattctcttgtccattggagggtacctgtttggttccaaagggttccaccctatggtggattcttctacatcacgcttggaattcattaactccataatcctgtttctgaggaaccataactttgatggactggatgtaagctggatctacccagatcagaaagaaaacactcatttcactgtgctgattcatgagttagcagaagcctttcagaaggacttcacaaaatccaccaaggaaaggcttctcttgactgcgggcgtatctgcagggaggcaaatgattgataacagctatcaagttgagaaactggcaaaagatctggatttcatcaacctcctgtcctttgacttccatgggtcttgggaaaagccccttatcactggccacaacagccctctgagcaaggggtggcaggacagagggccaagctcctactacaatgtggaatatgctgtggggtactggatacataagggaatgccatcagagaaggtggtcatgggcatccccacatatgggcactccttcacactggcctctgcagaaaccaccgtgggggcccctgcctctggccctggagctgctggacccatcacagagtcttcaggcttcctggcctattatgagatctgccagttcctgaaaggagccaagatcacgcggctccaggatcagcaggttccctacgcagtcaaggggaaccagtgggtgggctatgatgatgtgaagagtatggagaccaaggttcagttcttaaagaatttaaacctgggaggagccatgatctggtctattgacatggatgacttcactggcaaatcctgcaaccagggcccttaccctcttgtccaagcagtcaagagaagccttggctccctgtgaaggattaacttacagagaagcaggcaagatgaccttgctgcctggggcctgctctctcccaggaattctcatgtgggattccccttgccaggccggcctttggatctctcttccaagcctttcctgacttcctcttagatcatagattggacctggttttgttttcctgcagctgttgacttgttgccctgaagtacaataaaaaaaattcattttgctccagtaaaaaaaaaaaa

SEQ ID NO: 438406 - DNA, 1454 bp, Homo sapiens
  misc_feature (1)..(1): n is a, c, g, or t
ncacagcagctgtggctggggagcccagatgaagtgtggctctatcttgtatgtgagcacacccacattttcactgccattatctgggacagcagaaccaggtttggctcaacagatttctctttccacccatctattgcaggtgtagtggtcttgctgcttctccagggaggatctgcctacaaactggtttgctactttaccaactggtcccaggaccggcaggaaccaggaaaattcacccctgagaatattgaccccttcctatgctctcatctcatctattcattcgccagcatcgaaaacaacaaggttatcatcaaggacaagagtgaagtgatgctctaccagaccatcaacagtctcaaaaccaagttccaccctatggtggattcttctacatcacgcttggaattcattaactccataatcctgtttctgaggaaccataactttgatggactggatgtaagctggatctacccagatcagaaagaaaacactcatttcactgtgctgattcatgagttagcagaagcctttcagaaggacttcacaaaatccaccaaggaaaggcttctcttgactgcgggcgtatctgcagggaggcaaatgattgataacagctatcaagttgagaaactggcaaaagatctggatttcatcaacctcctgtcctttgacttccatgggtcttgggaaaagccccttatcactggccacaacagccctctgagcaaggggtggcaggacagagggccaagctcctactacaatgtggaatatgctgtggggtactggatacataagggaatgccatcagagaaggtggtcatgggcatccccacatatgggcactccttcacactggcctctgcagaaaccaccgtgggggcccctgcctctggccctggagctgctggacccatcacagagtcttcaggcttcctggcctattatgagatctgccagttcctgaaaggagccaagatcacgcggctccaggatcagcaggttccctacgcagtcaaggggaaccagtgggtgggctatgatgatgtgaagagtatggagaccaaggttcagttcttaaagaatttaaacctgggaggagccatgatctggtctattgacatggatgacttcactggcaaatcctgcaaccagggcccttaccctcttgtccaagcagtcaagagaagccttggctccctgtgaaggattaacttacagagaagcaggcaagatgaccttgctgcctggggcctgctctctcccaggaattctcatgtgggattccccttgccaggccggcctttggatctctcttccaagcctttcctgacttcctcttagatcatagattggacctggttttgttttcctgcagctgttgacttgttgccctgaagtacaataaaaaaaattcattttgctccagtaaaaaaaaaaaa

SEQ ID NO: 438407 - DNA, 2123 bp, Homo sapiens
cctctggctgaaagtagccggaaaggcctggctacttatgggctaagggttttgaatctgggctgcagattgtgcagagagttaatttacaaccttagaacagtggacaatgcttgatagtgtcagactgtgggcactggaaaccggctggtctcaggatagggatcctatacctccaacacttggattgctgacctttcacttctcaacttggtcaacggaagtcaaaaaccccagcaaggccacctgctgaattctagaacttccaggacttcccgacctagagcacatggccaaacactttctgcagccaggatgtcactgccctcccctgattaagataaatagacttggcctaataattatccaaatagattaattcttccaacaaaagaaagagttctggaagtcaatacccaatagccttctttcctgatggtgcagtagagagcaaaatccatctctaagcccagagttcgtgatattttggaaatagctacaatggtgaatttcaccccctggagagttctgtcactggcacttgttccagggttccagcagagtccctcttctcaaataggaagcactggctcagaagactgtccccagcataagatggagtctcactctgtcacccaggctggaccatgagtgcttttttaaacctcattttaaatctgaaagaagaatgaatacattggacaggctgtcgaaacctcagtggataaaagacctagagaatgtgtatcccagaagaagctggccaaggatatgggagcaaccaccatggaccagaagtctctctgggcaggtgtagtggtcttgctgcttctccagggaggatctgcctacaaactggtttgctactttaccaactggtcccaggaccggcaggaaccaggaaaattcacccctgagaatattgaccccttcctatgctctcatctcatctattcattcgccagcatcgaaaacaacaaggttatcatcaaggacaagagtgaagtgatgctctaccagaccatcaacagtctcaaaaccaagaatcccaaactgaaaattctcttgtccattggagggtacctgtttggttccaaagggttccaccctatggtggattcttctacatcacgcttggaattcattaactccataatcctgtttctgaggaaccataactttgatggactggatgagttagcagaagcctttcagaaggacttcacaaaatccaccaaggaaaggcttctcttgactgcgggcgtatctgcagggaggcaaatgattgataacagctatcaagttgagaaactggcaaaagatctggatttcatcaacctcctgtcctttgacttccatgggtcttgggaaaagccccttatcactggccacaacagccctctgagcaaggggtggcaggacagagggccaagctcctactacaatgtggaatatgctgtggggtactggatacataagggaatgccatcagagaaggtggtcatgggcatccccacatatgggcactccttcacactggcctctgcagaaaccaccgtgggggcccctgcctctggccctggagctgctggacccatcacagagtcttcaggcttcctggcctattatgagatctgccagttcctgaaaggagccaagatcacgcggctccaggatcagcaggttccctacgcagtcaaggggaaccagtgggtgggctatgatgatgtgaagagtatggagaccaaggttcagttcttaaagaatttaaacctgggaggagccatgatctggtctattgacatggatgacttcactggcaaatcctgcaaccagggcccttaccctcttgtccaagcagtcaagagaagccttggctccctgtgaaggattaacttacagagaagcaggcaagatgaccttgctgcctggggcctgctctctcccaggaattctcatgtgggattccccttgccaggccggcctttggatctctcttccaagcctttcctgacttcctcttagatcatagattggacctggttttgttttcctgcagctgttgacttgttgccctgaagtacaataaaaaaaattcattttgctccagtaaaaaaaaaaaa

SEQ ID NO: 438408 - DNA, 349 bp, Homo sapiens
ctcccaaaagtgcggggattacaggcgtgagccaccatgccttgccaacagttaggtgtgttaggtttagtccatataagggctagaacttcccttacacttaaatcttaaaaggaaaatattttcttaagatttctttttttaaacattaagtggtgcattaatcttttttctatagcctaatatgcaaatctgcctactttgagtaaggctaaatagcttcaggcttcttctgtaggcgtgagttgaacttcagttgagtgtttggaagatgtttgtcatcagtcactagagagtgaccagtcagtacaaaagcattccctactagaaaaatagctgtgtccacagc

SEQ ID NO: 438409 - DNA, 1206 bp, Homo sapiens
  misc_feature (3)..(3): n is a, c, g, or t
  misc_feature (5)..(6): n is a, c, g, or t
ggngnngcaccatgttagccaggctggtctcgaactcctgacctcaggtgatcacctgcctcggcctcccaaagtgctgggattacaggcatgagccatcgcatcgggccgagaatgttagatctcttaactttggtgtcgtggaagcagcatgggctttagagtcaggcagatctgggttcaaatcctgtctggcagtctagtggtgtagcttctttctggtaagaaacctacctttcctgatgctcagtttcctcatctgtaaaatgggaacaaaaataacctgttttgtggagttgttctgtgacggtggttctcatgtgtggtagctggggcagcaccagcagcagtggcggcctcagcatcacctgggaacttgtcagaaatgcaaattctcgggcttcaccctagacctcctgaatcaggaattctgggaatgactaggcaaactattttcatgagccctgtaggtgattctgaagcttgttcaagtttgagagtcactgacctatggattaaggtgagtgagtgcacctgtgacagaacaagtgctcactgctcttggtttccttattaaaagagggagggagttgaaatggggtagctctcagattgcctctctcctgttttattttgtgattctcccttttagccatggaattgggggaaggaaagaggaaccatttgtctatcacaaactgtcccagagtcttccagatttcacgtttggaatgaaagtctcaggaaggcacggactttgttttcttcctcatgtatggcatagagcagcggtccccaacccctgggccacagatcagtatcgttctgtggcctgttaggaaccaggctgcacagcaggaagtgagcggcgggccagcaagctaagcttcatctgtttttacagccgcttcccattgcttccgttactgcctgagccccacctcctgttagatcagcggtggcattagattctcataggagtgcgaaccctattgtgaactgcccacgcgagggatgtaggttgtccgctgcttatgagaatccagcacctgccgatctgtcactgttccccgtcaccctcagatgggaccgtctagttgtaggaaaacaagctcagggctcccactgattctacattttggtgagttgtataattgttatgtattgcaatgtaataataatagaaataaagtgtacgataaatgc

SEQ ID NO: 438410 - DNA, 1533 bp, Homo sapiens
  misc_feature (3)..(3): n is a, c, g, or t
  misc_feature (5)..(6): n is a, c, g, or t
ggngnngcaccatgttagccaggctggtctcgaactcctgacctcaggtgatcacctgcctcggcctcccaaagtgctgggattacaggcatgagccatcgcatcgggccgagaatgttagatctcttaactttggtgtcgtggaagcagcatgggctttagagtcaggcagatctgggttcaaatcctgtctggcagtctagtggtgtagcttctttctggtaagaaacctacctttcctgatgctcagtttcctcatctgtaaaatgggaacaaaaataacctgttttgtggagttgttctgtgacggtggttctcatgtgtggtagctggggcagcaccagcagcagtggcggcctcagcatcacctgggaacttgtcagaaatgcaaattctcgggcttcaccctagacctcctgaatcaggaattctgggaatgactaggcaaactattttcatgagccctgtaggtgattctgaagcttgttcaagtttgagagtcactgacctatggattaaggtgagtgagtgcacctgtgacagaacaagtgctcactgctcttggtttccttattaaaagagggagggagttgaaatggggtagctctcagattgcctctctcctgttttattttgtgattctcccttttagccatggaattgggggaaggaaagaggaaccatttgtctatcacaaactgtcccagagtcttccagatttcacgtttggaatgaaagtctcaggaaggcacggactttgttttcttcctcatgtatggcatagagcagcggtccccaacccctgggccacagatcagtatcgttctgtggcctgttaggaaccaggctgcacagcaggaagtgagcggcgggccagcaagctaagcttcatctgtttttacagccgcttcccattgcttccgttactgcctgagccccacctcctgttagatcagcggtggcattagattctcataggagtgcgaaccctattgtgaactgcccacgcgagggatgtaggttgtccgctgcttatgagaatccagcacctgccgatctgtcactgttccccgtcaccctcagatgggaccgtctagttgtaggaaaacaagctcagggctcccactgattctacattttggtgagttgtataattgttatgtattgcaatgtaataataatagaaataaagtgtacgataaatgcaatgcgcttgaatcatcctgaaactccccccacccaaccccagtctgtggaaaaattgttttccaggaaaccgttccctggtgccaaaaaggttggggaccactggcatagagtaagggcttggtctctaggcacagcctgatactacctttggaagcaagatgctgaatccctccatgcctcagtttcctcatctgtgaaatgctgatagtaacatgagtcaattaatataaagtacctggaacacacagaagtgtttttattggtctagtgcccacactgtgcttggcacttggcaaaagatgaataaacatttaagaatgaaca

SEQ ID NO: 438411 - DNA, 1657 bp, Homo sapiens
ttgagcccaggagttggaagcttcagtgagctgtgattgtgccactgcactccagactggacaacagagtgaaaccctgtttctctaaaagaaaaatgtatggccaggcatggtggctcatgcctgtaaacacagcattttgggaggctggtctcgaactcctgacctcaggtgatcacctgcctcggcctcccaaagtgctgggattacaggcatgagccatcgcatcgggccgagaatgttagatctcttaactttggtgtcgtggaagcagcatgggctttagagtcaggcagatctgggttcaaatcctgtctggcagtctagtggtgtagcttctttctggtaagaaacctacctttcctgatgctcagtttcctcatctgtaaaatgggaacaaaaataacctgttttgtggagttgttctgtgacggtggttctcatgtgtggtagctggggcagcaccagcagcagtggcggcctcagcatcacctgggaacttgtcagaaatgcaaattctcgggcttcaccctagacctcctgaatcaggaattctgggaatgactaggcaaactattttcatgagccctgtaggtgattctgaagcttgttcaagtttgagagtcactgacctatggattaaggtgagtgagtgcacctgtgacagaacaagtgctcactgctcttggtttccttattaaaagagggagggagttgaaatggggtagctctcagattgcctctctcctgttttattttgtgattctcccttttagccatggaattgggggaaggaaagaggaaccatttgtctatcacaaactgtcccagagtcttccagatttcacgtttggaatgaaagtctcaggaaggcacggactttgttttcttcctcatgtatggcatagagcagcggtccccaacccctgggccacagatcagtatcgttctgtggcctgttaggaaccaggctgcacagcaggaagtgagcggcgggccagcaagctaagcttcatctgtttttacagccgcttcccattgcttccgttactgcctgagccccacctcctgttagatcagcggtggcattagattctcataggagtgcgaaccctattgtgaactgcccacgcgagggatgtaggttgtccgctgcttatgagaatccagcacctgccgatctgtcactgttccccgtcaccctcagatgggaccgtctagttgtaggaaaacaagctcagggctcccactgattctacattttggtgagttgtataattgttatgtattgcaatgtaataataatagaaataaagtgtacgataaatgcaatgcgcttgaatcatcctgaaactccccccacccaaccccagtctgtggaaaaattgttttccaggaaaccgttccctggtgccaaaaaggttggggaccactggcatagagtaagggcttggtctctaggcacagcctgatactacctttggaagcaagatgctgaatccctccatgcctcagtttcctcatctgtgaaatgctgatagtaacatgagtcaattaatataaagtacctggaacacacagaagtgtttttattggtctagtgcccacactgtgcttggcacttggcaaaagatgaataaacatttaagaatgaaca

SEQ ID NO: 438412 - DNA, 894 bp, Homo sapiens
ccagaagcttgatataccacctagatcactaaggaaatcataacacttctttcatgttctagagcccaccctagtgagtggatagcccacaagctcatagctagactcagtgaactgtgataaggaagatggtggaaagctgactagtgtggaggtgagtgaggtcagagagaagacagatctgaagaggattattgatgagatcattatgaagggcatgctgaaacttctaatatgaatagtccagatttagataaaagggaatgtagaagtagcccaaacttcagtaactaacatttcttatattatgtatttatgtgttcacttatttatatcaacactcctatcccatcttaatgcatgttagttttttgtcttatgaccctctgccacccacttctaagacccattcttaatttgttacatttgaataaatatctttcaaaaaacaaagtagtagcacaaattgaccacagtattcagtaaagctaaattcccctttttgccacagtataaagtcacttattaaggtctatgaatggtgctatattgaaccaatacattttcctttacatgtacctatttatcctttcatatttcaccaaatatttactgagctcctagttagataataaaccaccttatcactggtcagttaatatttattgaatatatttggtgtccctagcaccattcagatgtattttttactgctaatgtctgtcatttacaggtgtgttaatagccattataattgttatgaggccagaatgatcactttggatagagatttttaaaatgagtttttactcattataaaattataataattgacattctcatttgattttgataatattgataattgatgaaatgatcattgtagaaaactgc

SEQ ID NO: 438413 - DNA, 1790 bp, Homo sapiens
gagccgggaggcgcacgctcgctcgtacggcggccgcggcggcagggcggggccggagcagcgggcggcggcggaggcggcgcccgggagcgctcttcgcttccctcggggtcttgctcggacctcggccaccgcctgggatccccaggactcgtgcgtgcagcatgggcggcgtcggggagccgggaccgcgggagggacccgcgcagccgggggcaccgctgcccaccttctgctgggagcagatccgcgcgcacgaccagcccggcgacaagtggctggtcatcgagcgccgcgtctacgacatcagccgctgggcacagcggcacccagggggcagccgcctcatcggccaccacggcgctgaggacgccacggatgccttccgtgccttccatcaagatctcaattttgtgcgcaagttcctacagcccctgttgattggagagctggctccggaagaacccagccaggatggacccctgaatgcgcagctggtcgaggacttccgagccctgcaccaggcagccgaggacatgaagctgtttgatgccagtcccaccttctttgctttcctactgggccacatcctggccatggaggtgctggcctggctccttatctacctcctgggtcctggctgggtgcccagtgccctggccgccttcatcctggccatctctcaggctcagtcctggtgtctgcagcatgacctgggccatgcctccatcttcaagaagtcctggtggaaccacgtggcccagaagttcgtgatggggcagctaaagggcttctccgcccactggtggaacttccgccacttccagcaccacgccaagcccaacatcttccacaaagacccagacgtgacggtggcgcccgtcttcctcctgggggagtcatccgtcgagtatggcaagaagaaacgcagatacctaccctacaaccagcagcacctgtacttcttcctgatcggcccgccgctgctcaccctggtgaactttgaagtggaaaatctggcgtacatgctggtgtgcatgcagtgggcggatttgctctgggccgccagcttctatgcccgcttcttcttatcctacctccccttctacggcgtccctggggtgctgctcttctttgttgctgtcagggtcctggaaagccactggttcgtgtggatcacacagatgaaccacatccccaaggagatcggccacgagaagcaccgggactgggtcagctctcagctggcagccacctgcaacgtggagccctcacttttcaccaactggttcagcgggcacctcaacttccagatcgagcaccacctcttccccaggatgccgagacacaactacagccgggtggccccgctggtcaagtcgctgtgtgccaagcacggcctcagctacgaagtgaagcccttcctcaccgcgctggtggacatcgtcaggtccctgaagaagtctggtgacatctggctggacgcctacctccatcagtgaaggcaacacccaggcgggcagagaagggctcagggcaccagcaaccaagccagcccccggcgggatcgatacccccacccctccactggccagcctgggggtgccctgcctgccctcctggtactgttgtcttcccctcggccccctcacatgtgtattcagcagccctatggccttggctctgggcctgatgggacaggggtagagggaaggtgagcatagcacattttcctagagcgagaattgggggaaagctgttatttttatattaaaatacattcagatgta

SEQ ID NO: 438414 - DNA, 336 bp, Homo sapiens
cccagatcttattctacatgcagtggaaacttgtatgacttaagctttttggaaaagcagaaccttttttcgtggttcaagaaatcaaagtcttcccgggaggtctttctgtaaatccagagctgcagatgtttgaccgtgttcagagaggggcccttgtgctgggtgaagtggatggggcacagcaggcaatgggtgaaaagcaggacaacctggggccctgggaggaccagggagggcccatgtctttgactgttcatcagccggctgacttcctgtccgcctgtcgtctgctctgcccatccatccgtagtccttccgcctgtctctgctggt

SEQ ID NO: 438415 - DNA, 299 bp, Homo sapiens
cccagcagagggctccgagagagctgcagcggcggtgggggccccgcagagattggggcccatggtttgaaggctgttcacaggcaccccgagacagcgtcccccctctgggcgcactggatttgacgttgcaggacgcgcggctggaagccccccaggccccgctgctcacagaccgggactccgcctccggttcccgagggcgtggcgaggcgctgcgggacgcccaacaggtgcgtgttgtgtccccaggccccgcgctccgggtggagtcaagagcctggaagccggcagcccgg

SEQ ID NO: 438416 - DNA, 276 bp, Homo sapiens
gcataataggggttggggccacgatgccctgtccttgaccctccaaatttctaggttggccacactgggtatcaggaaggtcttcaagacccgaggacatgaatcctgaatgctggctttttgggcagcagcggaggttctgtccagtcccaggactgtcggcgtccctcttgccagggccacctgctctctgccgattgccatctccagcatgttggacaatcttcactggactctttgaggaagaaagcccctcttttccctttccaccccatg

SEQ ID NO: 438417 - DNA, 1885 bp, Homo sapiens
ctgactggcacagataacatactacgcgtgtcttctaatggctacgctgagtgccctggtgctgtgcgacattctgtgcactgatgtgcggcactgcctctgcgtctgtaacgtgctgtgcctgctgtgctgtgtcatgtggcggggccggagcagcgggcggcggcggaggcggcgcccgggagcgctcttcgcttccctcggggtcttgctcggacctcggccaccgcctgggatccccaggactcgtgcgtgcagcatgggcggcgtcggggagccgggaccgcgggagggacccgcgcagccgggggcaccgctgcccaccttctgctgggagcagatccgcgcgcacgaccagcccggcgacaagtggctggtcatcgagcgccgcgtctacgacatcagccgctgggcacagcggcacccagggggcagccgcctcatcggccaccacggcgctgaggacgccacggatgccttccgtgccttccatcaagatctcaattttgtgcgcaagttcctacagcccctgttgattggagagctggctccggaagaacccagccaggatggacccctgaatgcgcagctggtcgaggacttccgagccctgcaccaggcagccgaggacatgaagctgtttgatgccagtcccaccttctttgctttcctactgggccacatcctggccatggaggtgctggcctggctccttatctacctcctgggtcctggctgggtgcccagtgccctggccgccttcatcctggccatctctcaggctcagtcctggtgtctgcagcatgacctgggccatgcctccatcttcaagaagtcctggtggaaccacgtggcccagaagttcgtgatggggcagctaaagggcttctccgcccactggtggaacttccgccacttccagcaccacgccaagcccaacatcttccacaaagacccagacgtgacggtggcgcccgtcttcctcctgggggagtcatccgtcgagtatggcaagaagaaacgcagatacctaccctacaaccagcagcacctgtacttcttcctgatcggcccgccgctgctcaccctggtgaactttgaagtggaaaatctggcgtacatgctggtgtgcatgcagtgggcggatttgctctgggccgccagcttctatgcccgcttcttcttatcctacctccccttctacggcgtccctggggtgctgctcttctttgttgctgtcagggtcctggaaagccactggttcgtgtggatcacacagatgaaccacatccccaaggagatcggccacgagaagcaccgggactgggtcagctctcagctggcagccacctgcaacgtggagccctcacttttcaccaactggttcagcgggcacctcaacttccagatcgagcaccacctcttccccaggatgccgagacacaactacagccgggtggccccgctggtcaagtcgctgtgtgccaagcacggcctcagctacgaagtgaagcccttcctcaccgcgctggtggacatcgtcaggtccctgaagaagtctggtgacatctggctggacgcctacctccatcagtgaaggcaacacccaggcgggcagagaagggctcagggcaccagcaaccaagccagcccccggcgggatcgatacccccacccctccactggccagcctgggggtgccctgcctgccctcctggtactgttgtcttcccctcggccccctcacatgtgtattcagcagccctatggccttggctctgggcctgatgggacaggggtagagggaaggtgagcatagcacattttcctagagcgagaattgggggaaagctgttatttttatattaaaatacattcagatgta

SEQ ID NO: 438418 - DNA, 2748 bp, Homo sapiens
gagccgggaggcgcacgctcgctcgtacggcggccgcggcggcagggcggggccggagcagcgggcggcggcggaggcggcgcccgggagcgctcttcgcttccctcggggtcttgctcggacctcggccaccgcctgggatccccaggactcgtgcgtgcagcatgggcggcgtcggggagccgggaccgcgggagggacccgcgcagccgggggcaccgctgcccaccttctgctgggagcagatccgcgcgcacgaccagcccggcgacaagtggctggtcatcgagcgccgcgtctacgacatcagccgctgggcacagcggcacccagggggcagccgcctcatcggccaccacggcgctgaggacgccacggatgccttccgtgccttccatcaagatctcaattttgtgcgcaagttcctacagcccctgttgattggagagctggctccggaagaacccagccaggatggacccctgaatgcgcagctggtcgaggacttccgagccctgcaccaggcagccgaggacatgaagctgtttgatgccagtcccaccttctttgctttcctactgggccacatcctggccatggaggtgctggcctggctccttatctacctcctgggtcctggctgggtgcccagtgccctggccgccttcatcctggccatctctcaggctcagtcctggtgtctgcagcatgacctgggccatgcctccatcttcaagaagtcctggtggaaccacgtggcccagaagttcgtgatggggcagctaaagggcttctccgcccactggtggaacttccgccacttccagcaccacgccaagcccaacatcttccacaaagacccagacgtgacggtggcgcccgtcttcctcctgggggagtcatccgtcgagtatggcaagaagaaacgcagatacctaccctacaaccagcagcacctgtacttcttcctgatcggcccgccgctgctcaccctggtgaactttgaagtggaaaatctggcgtacatgctggtgtgcatgcagtgggcggtgagtggggttgcccaggaccccgggcatacggctgccgtggcaggaggtggtgcctcgggggacagtacctgcccatgaaggcaaacagggtgcacatgtgcgtgcaacagtgtggctcacatgtatgcgtgcaacagtgtggctcacatgtgtgcgcgcagcaggagagcgagtgtgcccgtgactgtacgtgtggtgggggggggttgaggaacagggggggtgtgggtctctctcggtgagggtgtcttcccaggaggagttgctgggccgactctgccaggcatctgtgtccctggcagggtcttccccaacacaccctgcatgacaccttcgtcactaaaatcagcctcgtgagctggcagggcaaggaccctgttcctttactcagctgagaaaaccagagagggtggtggcctgtcctgggctctgaggcaaatcaggcagaagggttggatgcctgaggtcctcctcccacccaccaggcctccagacctccgggcacctggagacctctcggtatcgcctctgccctcctctgcaggatttgctctgggccgccagcttctatgcccgcttcttcttatcctacctccccttctacggcgtccctggggtgctgctcttctttgttgctgtcagaggtatggcagggagtggcgaggtcacacacaggcgacaggtgacccccactgcagccccccaccagagcttcccttttcccgtctgcagaatggggccagtggtactgcctccctggcttgctggtggaatcacataaacacaagcgtggcaggagcccagggtcggtgggtttagggagcgtggcctggcttgtaagtggcccggtgggtgtcggagctgctctggactcagcctcacagtggacactgctccattcagattctttaaacactggcaagggggcgatggccacaatcctattgtacagataaggaagtcaaggccacttggggacagctgctctccagcctccactcagggtgcctaagtggtgagctggacctagggcagtgcccgagcctccccacaggtcctggaaagccactggttcgtgtggatcacacagatgaaccacatccccaaggagatcggccacgagaagcaccgggactgggtcagctctcagctggcagccacctgcaacgtggagccctcacttttcaccaactggttcagcgggcacctcaacttccagatcgagcaccacctcttccccaggatgccgagacacaactacagccgggtggccccgctggtcaagtcgctgtgtgccaagcacggcctcagctacgaagtgaagcccttcctcaccgcgctggtggacatcgtcaggtccctgaagaagtctggtgacatctggctggacgcctacctccatcagtgaaggcaacacccaggcgggcagagaagggctcagggcaccagcaaccaagccagcccccggcgggatcgatacccccacccctccactggccagcctgggggtgccctgcctgccctcctggtactgttgtcttcccctcggccccctcacatgtgtattcagcagccctatggccttggctctgggcctgatgggacaggggtagagggaaggtgagcatagcacattttcctagagcgagaattgggggaaagctgttatttttatattaaaatacattcagatgta

SEQ ID NO: 438419 - DNA, 2291 bp, Homo sapiens
  misc_feature (2222)..(2222): n is a, c, g, or t
  misc_feature (2225)..(2225): n is a, c, g, or t
gagccgggaggcgcacgctcgctcgtacggcggccgcggcggcagggcggggccggagcagcgggcggcggcggaggcggcgcccgggagcgctcttcgcttccctcggggtcttgctcggacctcggccaccgcctgggatccccaggactcgtgcgtgcagcatgggcggcgtcggggagccgggaccgcgggagggacccgcgcagccgggggcaccgctgcccaccttctgctgggagcagatccgcgcgcacgaccagcccggcgacaagtggctggtcatcgagcgccgcgtctacgacatcagccgctgggcacagcggcacccagggggcagccgcctcatcggccaccacggcgctgaggacgccacggatgccttccgtgccttccatcaagatctcaattttgtgcgcaagttcctacagcccctgttgattggagagctggctccggaagaacccagccaggatggacccctgaatgcgcagctggtcgaggacttccgagccctgcaccaggcagccgaggacatgaagctgtttgatgccagtcccaccttctttgctttcctactgggccacatcctggccatggaggtgctggcctggctccttatctacctcctgggtcctggctgggtgcccagtgccctggccgccttcatcctggccatctctcaggctcagtcctggtgtctgcagcatgacctgggccatgcctccatcttcaagaagtcctggtggaaccacgtggcccagaagttcgtgatggggcagctaaagggcttctccgcccactggtggaacttccgccacttccagcaccacgccaagcccaacatcttccacaaagacccagacgtgacggtggcgcccgtcttcctcctgggggagtcatccgtcgagtatggcaagaagaaacgcagatacctaccctacaaccagcagcacctgtacttcttcctgatcggcccgccgctgctcaccctggtgaactttgaagtggaaaatctggcgtacatgctggtgtgcatgcagtgggcggatttgctctgggccgccagcttctatgcccgcttcttcttatcctacctccccttctacggcgtccctggggtgctgctcttctttgttgctgtcagaggtatggcagggagtggcgaggtcacacacaggcgacaggtgacccccactgcagccccccaccagagcttcccttttcccgtctgcagaatggggccagtggtactgcctccctggcttgctggtggaatcacataaacacaagcgtggcaggagcccagggtcggtgggtttagggagcgtggcctggcttgtaagtggcccggtgggtgtcggagctgctctggactcagcctcacagtggacactgctccattcagattctttaaacactggcaagggggcgatggccacaatcctattgtacagataaggaagtcaaggccacttggggacagctgctctccagcctccactcagggtgcctaagtggtgagctggacctagggcagtgcccgagcctccccacaggtcctggaaagccactggttcgtgtggatcacacagatgaaccacatccccaaggagatcggccacgagaagcaccgggactgggtcagctctcagctggcagccacctgcaacgtggagccctcacttttcaccaactggttcagcgggcacctcaacttccagatcgagcaccacctcttccccaggatgccgagacacaactacagccgggtggccccgctggtcaagtcgctgtgtgccaagcacggcctcagctacgaagtgaagcccttcctcaccgcgctggtggacatcgtcaggtccctgaagaagtctggtgacatctggctggacgcctacctccatcagtgaaggcaacacccaggcgggcagagaagggctcagggcaccagcaaccaagccagcccccggcgggatcgatacccccacccctccactggccagcctgggggtgccctgcctgccctcctggtactgttgtcttcccctcggccccctcacatgtgtattcagcagccctatggccttggctctgggcctgatgggacaggggtagagggaaggtgagcatagcacattttcctagagcgagaattgggggaaagctgttatttttatattaaaatacattcagatgtaaaaaaaaaagttccctgatanaanagcatggggtgctctggggaaatattggagggtcatccattccacattaaaagagcaagttgtcca

SEQ ID NO: 438420 - DNA, 1490 bp, Homo sapiens
ctgcccctgggcatccctcccggtctcttcctgcgggtttctgatgaaacagccaggctccagtagtggagccagaggatgccttccgtgccttccatcaagatctcaattttgtgcgcaagttcctacagcccctgttgattggagagctggctccggaagaacccagccaggatggacccctgaatgcgcagctggtcgaggacttccgagccctgcaccaggcagccgaggacatgaagctgtttgatgccagtcccaccttctttgctttcctactgggccacatcctggccatggaggtgctggcctggctccttatctacctcctgggtcctggctgggtgcccagtgccctggccgccttcatcctggccatctctcaggctcagtcctggtgtctgcagcatgacctgggccatgcctccatcttcaagaagtcctggtggaaccacgtggcccagaagttcgtgatggggcagctaaagggcttctccgcccactggtggaacttccgccacttccagcaccacgccaagcccaacatcttccacaaagacccagacgtgacggtggcgcccgtcttcctcctgggggagtcatccgtcgagtatggcaagaagaaacgcagatacctaccctacaaccagcagcacctgtacttcttcctgatcggcccgccgctgctcaccctggtgaactttgaagtggaaaatctggcgtacatgctggtgtgcatgcagtgggcggatttgctctgggccgccagcttctatgcccgcttcttcttatcctacctccccttctacggcgtccctggggtgctgctcttctttgttgctgtcagggtcctggaaagccactggttcgtgtggatcacacagatgaaccacatccccaaggagatcggccacgagaagcaccgggactgggtcagctctcagctggcagccacctgcaacgtggagccctcacttttcaccaactggttcagcgggcacctcaacttccagatcgagcaccacctcttccccaggatgccgagacacaactacagccgggtggccccgctggtcaagtcgctgtgtgccaagcacggcctcagctacgaagtgaagcccttcctcaccgcgctggtggacatcgtcaggtccctgaagaagtctggtgacatctggctggacgcctacctccatcagtgaaggcaacacccaggcgggcagagaagggctcagggcaccagcaaccaagccagcccccggcgggatcgatacccccacccctccactggccagcctgggggtgccctgcctgccctcctggtactgttgtcttcccctcggccccctcacatgtgtattcagcagccctatggccttggctctgggcctgatgggacaggggtagagggaaggtgagcatagcacattttcctagagcgagaattgggggaaagctgttatttttatattaaaatacattcagatgta

SEQ ID NO: 438421 - DNA, 1578 bp, Homo sapiens
cccagatcttattctacatgcagtggaaacttgtatgacttaagctttttggaaaagcagaaccttttttcgtggttcaagaaatcaaagtcttcccgggaggtctttctgtaaatccagagctgcagatgtttgaccgtgttcagagaggggcccttgtgctgggatgccttccgtgccttccatcaagatctcaattttgtgcgcaagttcctacagcccctgttgattggagagctggctccggaagaacccagccaggatggacccctgaatgcgcagctggtcgaggacttccgagccctgcaccaggcagccgaggacatgaagctgtttgatgccagtcccaccttctttgctttcctactgggccacatcctggccatggaggtgctggcctggctccttatctacctcctgggtcctggctgggtgcccagtgccctggccgccttcatcctggccatctctcaggctcagtcctggtgtctgcagcatgacctgggccatgcctccatcttcaagaagtcctggtggaaccacgtggcccagaagttcgtgatggggcagctaaagggcttctccgcccactggtggaacttccgccacttccagcaccacgccaagcccaacatcttccacaaagacccagacgtgacggtggcgcccgtcttcctcctgggggagtcatccgtcgagtatggcaagaagaaacgcagatacctaccctacaaccagcagcacctgtacttcttcctgatcggcccgccgctgctcaccctggtgaactttgaagtggaaaatctggcgtacatgctggtgtgcatgcagtgggcggatttgctctgggccgccagcttctatgcccgcttcttcttatcctacctccccttctacggcgtccctggggtgctgctcttctttgttgctgtcagggtcctggaaagccactggttcgtgtggatcacacagatgaaccacatccccaaggagatcggccacgagaagcaccgggactgggtcagctctcagctggcagccacctgcaacgtggagccctcacttttcaccaactggttcagcgggcacctcaacttccagatcgagcaccacctcttccccaggatgccgagacacaactacagccgggtggccccgctggtcaagtcgctgtgtgccaagcacggcctcagctacgaagtgaagcccttcctcaccgcgctggtggacatcgtcaggtccctgaagaagtctggtgacatctggctggacgcctacctccatcagtgaaggcaacacccaggcgggcagagaagggctcagggcaccagcaaccaagccagcccccggcgggatcgatacccccacccctccactggccagcctgggggtgccctgcctgccctcctggtactgttgtcttcccctcggccccctcacatgtgtattcagcagccctatggccttggctctgggcctgatgggacaggggtagagggaaggtgagcatagcacattttcctagagcgagaattgggggaaagctgttatttttatattaaaatacattcagatgta

SEQ ID NO: 438422 - DNA, 1178 bp, Homo sapiens
gagccgggaggcgcacgctcgctcgtacggcggccgcggcggcagggcggggccggagcagcgggcggcggcggaggcggcgcccgggagcgctcttcgcttccctcggggtcttgctcggacctcggccaccgcctgggatccccaggactcgtgcgtgcagcatgggcggcgtcggggagccgggaccgcgggagggacccgcgcagccgggggcaccgctgcccaccttctgctgggagcagatccgcgcgcacgaccagcccggcgacaagtggctggtcatcgagcgccgcgtctacgacatcagccgctgggcacagcggcacccagggggcagccgcctcatcggccaccacggcgctgaggacgccacggatgccttccgtgccttccatcaagatctcaattttgtgcgcaagttcctacagcccctgttgattggagagctggctccggaagaacccagccaggatggacccctgaatgcgcagctggtcgaggacttccgagccctgcaccaggcagccgaggacatgaagctgtttgatgccagtcccaccttctttgctttcctactgggccacatcctggccatggaggtgctggcctggctccttatctacctcctgggtcctggctgggtgcccagtgccctggccgccttcatcctggccatctctcaggctcagtcctggtgtctgcagcatgacctgggccatgcctccatcttcaagaagtcctggtggaaccacgtggcccagaagttcgtgatggggcagctaaagggcttctccgcccactggtggaacttccgccacttccagcaccacgccaagcccaacatcttccacaaagacccagacgtgacggtggcgcccgtcttcctcctgggggagtcatccgtcgagtatggcaagaagaaacgcagatacctaccctacaaccagcagcacctgtacttcttcctgatcggcccgccgctgctcaccctggtgaactttgaagtggaaaatctggcgtacatgctggtgtgcatgcagtgggcggatttgctctgggccgccagcttctatgcccgcttcttcttatcctacctccccttctacggccacattttcctagagcgagaattgggggaaagctgttatttttatattaaaatacattcagatgta

SEQ ID NO: 438423 - DNA, 551 bp, Homo sapiens
gagccgggaggcgcacgctcgctcgtacggcggccgcggcggcagggcggggccggagcagcgggcggcggcggaggcggcgcccgggagcgctcttcgcttccctcggggtcttgctcggacctcggccaccgcctgggatccccaggactcgtgcgtgcagcatgggcggcgtcggggagccgggaccgcgggagggacccgcgcagccgggggcaccgctgcccaccttctgctgggagcagatccgcgcgcacgaccagcccggcgacaagtggctggtcatcgagcgccgcgtctacgacatcagccgctgggcacagcggcacccagggggcagccgcctcatcggccaccacggcgctgaggacgccacggtaaggaagccataaggaagccacccaccggcgggtggagcctggagctcggtcgtgggcgtgatgtcccgctccacctgtggggccttagcatcctccctcccctcgctgacctttgacctccacgccgggacccagagttggggtggactagccagggccagatgtggggta

SEQ ID NO: 438424 - DNA, 498 bp, Homo sapiens
cagccctttagagcgcctggcacagggcttcctagcagattgttgacatttctggctccactgcccaatatcaggcccaagatcgggtgggcaggttccacgtcctctctgtccttgggttgcagcgcccagcaggaggcagcaatggagaactgggtgcaggagggacaggcccacccaggctcatgcctggacttggccttggctgccctccagctcccctacccgacacccgtcaacccggtctagattccattccagagaatgagcattcagctgttctcccaacccaccctccagcccgcatcgctgcctgcccccagggaagggaacccacagggaatggggatctcccctcacatgtgtattcagcagccctatggccttggctctgggcctgatgggacaggggtagagggaaggtgagcatagcacattttcctagagcgagaattgggggaaagctgttatttttatattaaaatacattcagatgta

SEQ ID NO: 438425 - DNA, 198 bp, Homo sapiens
cggcgaattcgtggtgctgctcggcgaattcgtggtgctgctcggcgaattcgtggtgctgctcttctttgttgctgtcggtcctggaaagccactggttcgtgtggatcacacagatgaaccacatccccaaggagatcggccacgagaagcaccgggactgggtcagctctcaggtgggcagcaggggtggggccc

SEQ ID NO: 438426 - DNA, 2201 bp, Homo sapiens
gagccgggaggcgcacgctcgctcgtacggcggccgcggcggcagggcggggccggagcagcgggcggcggcggaggcggcgcccgggagcgctcttcgcttccctcggggtcttgctcggacctcggccaccgcctgggatccccaggactcgtgcgtgcagcatgggcggcgtcggggagccgggaccgcgggagggacccgcgcagccgggggcaccgctgcccaccttctgctgggagcagatccgcgcgcacgaccagcccggcgacaagtggctggtcatcgagcgccgcgtctacgacatcagccgctgggcacagcggcacccagggggcagccgcctcatcggccaccacggcgctgaggacgccacggatgccttccgtgccttccatcaagatctcaattttgtgcgcaagttcctacagcccctgttgattggagagctggctccggaagaacccagccaggatggacccctgaatgcgcagctggtcgaggacttccgagccctgcaccaggcagccgaggacatgaagctgtttgatgccagtcccaccttctttgctttcctactgggccacatcctggccatggaggtgctggcctggctccttatctacctcctgggtcctggctgggtgcccagtgccctggccgccttcatcctggccatctctcaggctcagtcctggtgtctgcagcatgacctgggccatgcctccatcttcaagaagtcctggtggaaccacgtggcccagaagttcgtgatggggcagctaaagggcttctccgcccactggtggaacttccgccacttccagcaccacgccaagcccaacatcttccacaaagacccagacgtgacggtggcgcccgtcttcctcctgggggagtcatccgtcgagtatggcaagaagaaacgcagatacctaccctacaaccagcagcacctgtacttcttcctgatcggcccgccgctgctcaccctggtgaactttgaagtggaaaatctggcgtacatgctggtgtgcatgcagtgggcggatttgctctgggccgccagcttctatgcccgcttcttcttatcctacctccccttctacggcgtccctggggtgctgctcttctttgttgctgtcagaggtatggcagggagtggcgaggtcacacacaggcgacaggtgacccccactgcagccccccaccagagcttcccttttcccgtctgcagaatggggccagtggtactgcctccctggcttgctggtggaatcacataaacacaagcgtggcaggagcccagggtcggtgggtttagggagcgtggcctggcttgtaagtggcccggtgggtgtcggagctgctctggactcagcctcacagtggacactgctccattcagattctttaaacactggcaagggggcgatggccacaatcctattgtacagataaggaagtcaaggccacttggggacagctgctctccagcctccactcagggtgcctaagtggtgagctggacctagggcagtgcccgagcctccccacaggtcctggaaagccactggttcgtgtggatcacacagatgaaccacatccccaaggagatcggccacgagaagcaccgggactgggtcagctctcagctggcagccacctgcaacgtggagccctcacttttcaccaactggttcagcgggcacctcaacttccagatcgagcaccacctcttccccaggatgccgagacacaactacagccgggtggccccgctggtcaagtcgctgtgtgccaagcacggcctcagctacgaagtgaagcccttcctcaccgcgctggtggacatcgtcaggtccctgaagaagtctggtgacatctggctggacgcctacctccatcagtgaaggcaacacccaggcgggcagagaagggctcagggcaccagcaaccaagccagcccccggcgggatcgatacccccacccctccactggccagcctgggggtgccctgcctgccctcctggtactgttgtcttcccctcggccccctcacatgtgtattcagcagccctatggccttggctctgggcctgatgggacaggggtagagggaaggtgagcatagcacattttcctagagcgagaattgggggaaagctgttatttttatattaaaatacattcagatgta

SEQ ID NO: 438427 - DNA, 1817 bp, Homo sapiens
gagccgggaggcgcacgctcgctcgtacggcggccgcggcggcagggcggggccggagcagcgggcggcggcggaggcggcgcccgggagcgctcttcgcttccctcggggtcttgctcggacctcggccaccgcctgggatccccaggactcgtgcgtgcagcatgggcggcgtcggggagccgggaccgcgggagggacccgcgcagccgggggcaccgctgcccaccttctgctgggagcagatccgcgcgcacgaccagcccggcgacaagtggctggtcatcgagcgccgcgtctacgacatcagccgctgggcacagcggcacccagggggcagccgcctcatcggccaccacggcgctgaggacgccacggatgccttccgtgccttccatcaagatctcaattttgtgcgcaagttcctacagcccctgttgattggagagctggctccggaagaacccagccaggatggacccctgaatgcgcagctggtcgaggacttccgagccctgcaccaggcagccgaggacatgaagctgtttgatgccagtcccaccttctttgctttcctactgggccacatcctggccatggaggtgctggcctggctccttatctacctcctgggtcctggctgggtgcccagtgccctggccgccttcatcctggccatctctcaggctcagtcctggtgtctgcagcatgacctgggccatgcctccatcttcaagaagtcctggtggaaccacgtggcccagaagttcgtgatggggcagctaaagggcttctccgcccactggtggaacttccgccacttccagcaccacgccaagcccaacatcttccacaaagacccagacgtgacggtggcgcccgtcttcctcctgggggagtcatccgtcgagtatggcaagaagaaacgcagatacctaccctacaaccagcagcacctgtacttcttcctgatcggcccgccgctgctcaccctggtgaactttgaagtggaaaatctggcgtacatgctggtgtgcatgcagtgggcggatttgctctgggccgccagcttctatgcccgcttcttcttatcctacctccccttctacggcgtccctggggtgctgctcttctttgttgctgtcagggtcctggaaagccactggttcgtgtggatcacacagatgaaccacatccccaaggagatcggccacgagaagcaccgggactgggtcagctctcagctggcagccacctgcaacgtggagccctcacttttcaccaactggttcagcgggcacctcaacttccagatcgagcaccagtgccagcatacgctccccacccccagcctcttccccaggatgccgagacacaactacagccgggtggccccgctggtcaagtcgctgtgtgccaagcacggcctcagctacgaagtgaagcccttcctcaccgcgctggtggacatcgtcaggtccctgaagaagtctggtgacatctggctggacgcctacctccatcagtgaaggcaacacccaggcgggcagagaagggctcagggcaccagcaaccaagccagcccccggcgggatcgatacccccacccctccactggccagcctgggggtgccctgcctgccctcctggtactgttgtcttcccctcggccccctcacatgtgtattcagcagccctatggccttggctctgggcctgatgggacaggggtagagggaaggtgagcatagcacattttcctagagcgagaattgggggaaagctgttatttttatattaaaatacattcagatgta

SEQ ID NO: 438428 - DNA, 1646 bp, Homo sapiens
cccagcagagggctccgagagagctgcagcggcggtgggggccccgcagagattggggcccatggtttgaaggctgttcacaggcaccccgagacagcgtcccccctctgggcgcactggatttgacgttgcaggacgcgcggctggaagccccccaggccccgctgctcacagaccgggactccgcctccggttcccgagggcgtggcgaggcgctgcgggacgcccaacaggatgccttccgtgccttccatcaagatctcaattttgtgcgcaagttcctacagcccctgttgattggagagctggctccggaagaacccagccaggatggacccctgaatgcgcagctggtcgaggacttccgagccctgcaccaggcagccgaggacatgaagctgtttgatgccagtcccaccttctttgctttcctactgggccacatcctggccatggaggtgctggcctggctccttatctacctcctgggtcctggctgggtgcccagtgccctggccgccttcatcctggccatctctcaggctcagtcctggtgtctgcagcatgacctgggccatgcctccatcttcaagaagtcctggtggaaccacgtggcccagaagttcgtgatggggcagctaaagggcttctccgcccactggtggaacttccgccacttccagcaccacgccaagcccaacatcttccacaaagacccagacgtgacggtggcgcccgtcttcctcctgggggagtcatccgtcgagtatggcaagaagaaacgcagatacctaccctacaaccagcagcacctgtacttcttcctgatcggcccgccgctgctcaccctggtgaactttgaagtggaaaatctggcgtacatgctggtgtgcatgcagtgggcggatttgctctgggccgccagcttctatgcccgcttcttcttatcctacctccccttctacggcgtccctggggtgctgctcttctttgttgctgtcagggtcctggaaagccactggttcgtgtggatcacacagatgaaccacatccccaaggagatcggccacgagaagcaccgggactgggtcagctctcagctggcagccacctgcaacgtggagccctcacttttcaccaactggttcagcgggcacctcaacttccagatcgagcaccacctcttccccaggatgccgagacacaactacagccgggtggccccgctggtcaagtcgctgtgtgccaagcacggcctcagctacgaagtgaagcccttcctcaccgcgctggtggacatcgtcaggtccctgaagaagtctggtgacatctggctggacgcctacctccatcagtgaaggcaacacccaggcgggcagagaagggctcagggcaccagcaaccaagccagcccccggcgggatcgatacccccacccctccactggccagcctgggggtgccctgcctgccctcctggtactgttgtcttcccctcggccccctcacatgtgtattcagcagccctatggccttggctctgggcctgatgggacaggggtagagggaaggtgagcatagcacattttcctagagcgagaattgggggaaagctgttatttttatattaaaatacattcagatgta

SEQ ID NO: 438429 - DNA, 1337 bp, Homo sapiens
ctgactgtctgctctccttcaggatgccttccgtgccttccatcaagatctcaattttgtgcgcaagttcctacagcccctgttgattggagagctggctccggaagaacccagccaggatggacccctgaatgcgcagctggtcgaggacttccgagccctgcaccaggcagccgaggacatgaagctgtttgatgccagtcccaccttctttgctttcctactgggccacatcctggccatggaggtgctggcctggctccttatctacctcctgggtcctggctgggtgcccagtgccctggccgccttcatcctggccatctctcaggctcagtcctggtgtctgcagcatgacctgggccatgcctccatcttcaagaagtcctggtggaaccacgtggcccagaagttcgtgatggggcagctaaagggcttctccgcccactggtggaacttccgccacttccagcaccacgccaagcccaacatcttccacaaagacccagacgtgacggtggcgcccgtcttcctcctgggggagtcatccgtcgagtatggcaagaagaaacgcagatacctaccctacaaccagcagcacctgtacttcttcctgatcggcccgccgctgctcaccctggtgaactttgaagtggaaaatctggcgtacatgctggtgtgcatgcagtgggcgggtcctggaaagccactggttcgtgtggatcacacagatgaaccacatccccaaggagatcggccacgagaagcaccgggactgggtcagctctcagctggcagccacctgcaacgtggagccctcacttttcaccaactggttcagcgggcacctcaacttccagatcgagcaccacctcttccccaggatgccgagacacaactacagccgggtggccccgctggtcaagtcgctgtgtgccaagcacggcctcagctacgaagtgaagcccttcctcaccgcgctggtggacatcgtcaggtccctgaagaagtctggtgacatctggctggacgcctacctccatcagtgaaggcaacacccaggcgggcagagaagggctcagggcaccagcaaccaagccagcccccggcgggatcgatacccccacccctccactggccagcctgggggtgccctgcctgccctcctggtactgttgtcttcccctcggccccctcacatgtgtattcagcagccctatggccttggctctgggcctgatgggacaggggtagagggaaggtgagcatagcacattttcctagagcgagaattgggggaaagctgttatttttatattaaaatacattcagatgta

SEQ ID NO: 438430 - DNA, 599 bp, Homo sapiens
gagccgggaggcgcacgctcgctcgtacggcggccgcggcggcagggcggggccggagcagcgggcggcggcggaggcggcgcccgggagcgctcttcgcttccctcggggtcttgctcggacctcggccaccgcctgggatccccaggactcgtgcgtgcagcatgggcggcgtcggggagccgggaccgcgggagggacccgcgcagccgggggcaccgctgcccaccttctgctgggagcagatccgcgcgcacgaccagcccggcgacaagtggctggtcatcgagcgccgcgtctacgacatcagccgctgggcacagcggcacccagggggcagccgcctcatcggccaccacggcgctgaggacgccacggttggccacactgggtatcaggaaggtcttcaagacccgaggacatgaatcctgaatgctggctttttgggcagcagcggaggttctgtccagtcccaggactgtcggcgtccctcttgccagggccacctgctctctgccgattgccatctccagcatgttggacaatcttcactggactctttgaggaagaaagcccctcttttccctttccaccccatg

SEQ ID NO: 438431 - DNA, 749 bp, Homo sapiens
ggatttattttaaattattaatatttttgctaaaaggaagtaccagctcacctgttcctagagcaatgtcttcccagcagcagcagcggcagcagcagcagtgcccaccccagagggcccagcagcagcaagtgaagcagccttgtcagccaccccctgttaaatgtcaagagacatgtgcacccaaaaccaaggatccatgtgctccccaggtcaagaagcaatgcccaccgaaaggcaccatcattccagcccagcagaagtgtccctcagcccagcaagcctccaagagtaaacagaagtaaggatggactggatattaccatcatccaccatcctggctaccagatggaaccttctcttcttccttctcctcttccctccagctcttgagcctaccctcctctcacatctcctcctgcccaagatgtaaggaagcattgtaaggatttcttcccatcgtacccttccccacacataccaccttggcttcttctatatcccaccccgatgctctcccaggtgggtgtgagagagacctcattctctgcaggctccagcgtggccacagctaaggcccatccatttcccaaagtgaggaaagtgtctgggcttcttctggggttccaccctgacaagtagggtcacagaggctggtgcacagtttctgcctcattcctctccatgatgccccctgctctgggcttctctcctgttttccccaataaatatgtgcctcatgtaataaa

SEQ ID NO: 438432 - DNA, 252 bp, Homo sapiens
cttctcatggtgtccctgcccggtttcctttaggctcacctgttcctagagcaatgtcttcccagcagcagcagcggcagcagcagcagtgcccaccccagagggcccagcagcagcaagtgaagcagccttgtcagccaccccctgttaaatgtcaagagacatgtgcacccaaaaccaaggatccatgtgctccccaggtcaagaagcaatgcccaccgaaaggcaccatcattccagcccagcagaagt

SEQ ID NO: 438433 - DNA, 2425 bp, Homo sapiens
accgagtccccagcgcgtgcgcggggccgtggccgaggcctgcgcgccgcccggccgcctgcactgcgcgcgcgcccaccccgcgtgggaggcagcgggaggggcccggagaggtgtggagcggcgcggcgggaggctccgtgggcggccacgggagacagcgccggcgggagcgcgcctctcggcctttcctccgcgcccccgcgtccccagccggccgctccgagaggacccggaggaggcaggtggctttctagaagatgaccatagaggaccttccagattttccattagaaggaaatcctttgtttggaagatacccatttatattttctgcttctgataccccagttatcttttccatttctgcagcaccaatgccttcagactgtgaattttctttctttgatcctaatgatgcatcatgccaggaaattctttttgatcccaaaacttcagtttcagaattatttgccattttgagacagtgggttcctcaggtccaacaaaacattgacattattggaaatgagattcttaagagaggttgcaatgtgaatgatagagatggattgacagatatgactcttttacattatacctgcaaatctggagctcatggtattggtgatgtggaaacagctgtaaaatttgcaactcagcttattgacctgggagcagacattagtttgcggagtcgctggacaaacatgaatgctttgcattatgctgcttattttgatgtccctgaacttataagagtgattttgaaaacatcgaaaccaaaagatgtggatgccacttgcagtgattttaattttggaacagctttgcatattgcagcatacaacttgtgtgcaggtgctgtgaagtgcctcttggagcagggagcaaatcctgcatttaggaatgacaaaggacagatccctgctgatgttgttccagacccagtagatatgccgttagagatggctgacgccgcagccactgctaaggaaatcaagcagatgcttctagatgcggtgcctctgtcatgtaacatctcaaaggccatgctcccaaattatgatcatgtcactggcaaggcaatgcttacgtcacttggcctgaagttgggggatcgtgttgttattgcaggacagaaggttggtacattaagattttgtggaacaactgaatttgcaagtgggcagtgggctggcattgaactggatgaaccagaaggaaaaaataatggaagtgttggaaaagtccagtactttaaatgtgcccccaagtatggtatttttgcacctctttcaaagataagtaaagcaaaaggtcgaaggaagaatataacacacactccttctacaaaagctgctgtacctctcatcaggtcccagaaaattgacgtagctcatgtgacgtcaaaagtaaatactggattaatgacatcaaaaaaagatagtgcttctgagtcaacactttcattgcctcctggtgaagaacttaaaactgtgacagagaaagatgttgccctgcttggatctgtcagcagctgctcctctacatcttctttggaacacagacagagctaccccaagaaacagaatgcaatcagcagtaacaagaagacaatgagcaaaagcccttccctttcatccagagccagtgctggtttgaattcctcagcaacatctacagcaaataatagccgttgcgagggggaactccgcctcggagagagagtgttagtggtaggacagagactgggcaccattaggttctttgggacaacaaacttcgctccaggatattggtatggtatagagcttgaaaaaccccatggcaagaatgatggttcagttggaggtgtgcagtattttagctgttctccaagatatggaatatttgctcccccatccagggtgcaaagagtaacagattccctggataccctttcagaaatttcttcaaataaacagaaccattcttatcctggttttaggagaagttttagcacaacttctgcttcttcccaaaaggagattaacagaagaaatgctttttccaaatcgaaagctgctttgcgtcgcagttggagcagcacccccaccgcaggtggcattgaagggagcgtgaagctgcacgaggggtctcaggtcctgctcacgagctccaatgagatgggtactgttaggtatgtgggccccactgactttgcttcaggtatctggcttggacttgagctccgaagcgccaagggaaaaaatgatgggtcagtgggtgacaagcgctatttcacctgtaagccgaaccatggagtcttagttcgaccgagcagagtgacctatcggggaattaatgggtcaaaacttgtggatgagaattgttaagcttctaaaatattaaataagctcaaatatatatatttggtgtaaat

SEQ ID NO: 438434 - DNA, 1040 bp, Homo sapiens
gatttttgcctggacgaccattttgttgtctaagcttacgaatgttatcacatttcagttcaatctttctgattctcttctgatggactgctgctctgcttgtatatgtgtctttagtttggtgcctctcatcttttagttatgctgactctagaagtaagaactatgtgtacatagtataattttggaaaatatataaatgcaaagaagaaagcaaaaacaaaaaaacctcaatgagtcccactacttatgcatgctgttacaatctgagctcagtgaattttctttctttgatcctaatgatgcatcatgccaggaaattctttttgatcccaaaacttcagtttcagaattatttgccattttgagacagtgggttcctcaggtccaacaaaacattgacattattggaaatgaggtaaggaattcttacattttaagttttgcattgttaggattgttaatggtatagatttttttccccatctgaaaggaagatggtaataaaggagaaaccctttaaaagttctgatatttatttgtatttccaggattttcatggggcagtgagttaatactatatattcttctgattatttcttcatgctctgtacttctgacatttgtagactcctggcgggtgcagggaggggcatttttcatatttccttctttgtaaaattaattttgtaaacttttatgcatttcataaagggatttgattaccatcatgttctatttacacttttggttggtttggtaaatatataggcttgaatgtagtctttaagaatattagattttttgagggagggttccttgaccagtatgttgctgtgttgtaggaagagagtgcttatacttttttcaaatatcattacacgcatagaaataaaattttgctcatttttgagaggaacatatttggagtgccagattacctttggaataatctttaagaatttccttcagcctgctgacaagttcagttttcattattgttgttgagtacagatttaaaaatttacccttaagatatg

SEQ ID NO: 438435 - DNA, 527 bp, Homo sapiens
gctattagaagtggcgtttgcagctaagtacagtgagagcagcaagcttaatctgtcatgcaaacaaaagtaaaaatgctctctgattgcttcagtcacatcctaactacattaaatttcctgccagcaggcaccccattcattctcctacaaacctaatggaaccaaaatggctttttcctctgatttctttagttttcaaaaatagataggcagtagatctttgggggaagtgaaacttcaaggatttttatataatatatctccttggtgtttcttcttaagatagtatctttcataccacctcatccggttttaaaaaataagttgagcagaaacaaagtcctcataaaattccaggtatcattatgtgaaatggcttctcttatgctctggaagaagctgcttggtgtgccttttagcggatgggaaatgggatactaatctttaaatgagagataacatatatggcataatcacattcatgagactagacctacgatcgcaatctgggagtcttgtctagt

SEQ ID NO: 438436 - DNA, 4294 bp, Homo sapiens
tgcctgtggggacgctggctggtgctctcaaaggaggactctaagggaggcctgctgaagcctgccaccaccaccaggttttctgtaattggatctgcacaggggcctcagggagtgcagtatgaaaacacccatttccatgcactcccaaccaacacgctgaacaatctgtactcttggtgagaaagacccatgagggactgaaaattctttttctacgtgacactgagaagacagtcacatggtttgggtggctttctagaagatgaccatagaggaccttccagattttccattagaaggaaatcctttgtttggaagatacccatttatattttctgcttctgataccccagttatcttttccatttctgcagcaccaatgccttcagactgtgaattttctttctttgatcctaatgatgcatcatgccaggaaattctttttgatcccaaaacttcagtttcagaattatttgccattttgagacagtgggttcctcaggtccaacaaaacattgacattattggaaatgagattcttaagagaggttgcaatgtgaatgatagagatggattgacagatatgactcttttacattatacctgcaaatctggagctcatggtattggtgatgtggaaacagctgtaaaatttgcaactcagcttattgacctgggagcagacattagtttgcggagtcgctggacaaacatgaatgctttgcattatgctgcttattttgatgtccctgaacttataagagtgattttgaaaacatcgaaaccaaaagatgtggatgccacttgcagtgattttaattttggaacagctttgcatattgcagcatacaacttgtgtgcaggtgctgtgaagtgcctcttggagcagggagcaaatcctgcatttaggaatgacaaaggacagatccctgctgatgttgttccagacccagtagatatgccgttagagatggctgacgccgcagccactgctaaggaaatcaagcagatgcttctagatgcggtgcctctgtcatgtaacatctcaaaggccatgctcccaaattatgatcatgtcactggcaaggcaatgcttacgtcacttggcctgaagttgggggatcgtgttgttattgcaggacagaaggttggtacattaagattttgtggaacaactgaatttgcaagtgggcagtgggctggcattgaactggatgaaccagaaggaaaaaataatggaagtgttggaaaagtccagtactttaaatgtgcccccaagtatggtatttttgcacctctttcaaagataagtaaagcaaaaggtcgaaggaagaatataacacacactccttctacaaaagctgctgtacctctcatcaggtcccagaaaattgacgtagctcatgtgacgtcaaaagtaaatactggattaatgacatcaaaaaaagatagtgcttctgagtcaacactttcattgcctcctggtgaagaacttaaaactgtgacagagaaagatgttgccctgcttggatctgtcagcagctgctcctctacatcttctttggaacacagacagagctaccccaagaaacagaatgcaatcagcagtaacaagaagacaatgagcaaaagcccttccctttcatccagagccagtgctggtttgaattcctcagcaacatctacagcaaataatagccgttgcgagggggaactccgcctcggagagagagtgttagtggtaggacagagactgggcaccattaggttctttgggacaacaaacttcgctccaggatattggtatggtatagagcttgaaaaaccccatggcaagaatgatggttcagttggaggtgtgcagtattttagctgttctccaagatatggaatatttgctcccccatccagggtgcaaagagtaacagattccctggataccctttcagaaatttcttcaaataaacagaaccattcttatcctggttttaggagaagttttagcacaacttctgcttcttcccaaaaggagattaacagaagaaatgctttttccaaatcgaaagctgctttgcgtcgcagttggagcagcacccccaccgcaggtggcattgaagggagcgtgaagctgcacgaggggtctcaggtcctgctcacgagctccaatgagatgggtactgttaggtatgtgggccccactgactttgcttcaggtatctggcttggacttgagctccgaagcgccaagggaaaaaatgatgggtcagtgggtgacaagcgctatttcacctgtaagccgaaccatggagtcttagttcgaccgagcagagtgacctatcggggaattaatgggtcaaaacttgtggatgagaattgttaagcttctaaaatattaaataagctcaaatatatatatttggtgtaaataaagagtccatggtaaatggtttactttatttagccatattaaaattttgaaaatatagttatcttcttaaaaaccattataacaattcagagagagttctttacaaagccatgaatatgaactatggggaatcatggttcttttaaagcaattttcaaaataagtaccaattaaagctttaggttccaagaagattctgggactcaggaagaaaaagtgccatcaggtgaccagctgttgcatttcttgcttattctgttttgtttttgcacatcataatggatttttcttagtgccctaattgtgaagggtttctctagctttggttatgtgtaatgttcacgtgacctttttttgtcaatcatttttggaatttttctttctttctgtgctttattactaataagtccaatgagtgagtagtagctagatgactagtatgtagttttatattttggtaaaattatttgccctttcagaaatgcctcatctaaagatacatgataattttggagttggaaggggccttagaggctctccagctctgcttcttgcccattgccaaatactgaaatggaagcccgtcttacctggggtcactaactggttggttaactgagctaagaatagactgtgggtctcctcacttgtggcccagtgctctttctgctatacaaaatgtctaatctcagatttttcttctgctgcttgactgcttcatctggatgaactacaaaaaacccatgattaaggtttatgaattcaagtaataattagattttttttgcacagacttacttaacttccttattggatatgtttgtaacacataaacacaaagcacttttcaaacatgatgcacttttatctttgtgaataatttactgtcctttcctcctgggatatgagaaacattttaaaaaacgtatttaacagaagagagcaaataaagatatatcaggaaggatgtattagttatttacttaaatgtttataatatctggattttttttgttttgttactcatagaactggtgttgtttgctgtttttatttctctaattgttgcagagttctgcctgttacaaagctacagaactgtattgtttttattttccttcttgagcacatgttaacaaactaagcttcacattagagtgatgtcataatgtaaaatgtttgcattgtggttaggtattgaagtttatgtcctgtctgtgtaaagattcatcttttattgtaaatatttagactttaccacagaaatattggaacagtttgctttataagattaaaaagcatccttcagaatggagcttgccttgtgcttagaaataatatgttgaactattttgcaatatactattttaaatctaaattctgtcacttcgctgcctttttaaaatagtgtggtatttcaaatattgctagagctattttcctgaaatacatttgcaaaataaggctgctttgtaatcaaggaatatttttattgattgaaggaaatgactgtactgcgattcaaaagtaaacttattttattatacagattatttcttaaaaactctatttataccttaacatgaaatccatgaccacaccaaacttggttattcataatttttcctgttaaatataaaacactgtaagttaaaaacagtaatgccaacattgaatttatttttgaggtcaaagaaccagttgttctctttatatttagatgaggatgattgagtccatatactatgtatgtttacatatactatacatgcacattaggtgttttcatttgtgttttgcttatgaaatgtcatttaaagttcacttcttgagcatcaataaaaagggaagctgtgtggtttt

SEQ ID NO: 438437 - DNA, 3527 bp, Homo sapiens
tcggtacccccccgactagcccgacagccccgactagcccgacagccccgactagcccgacagccccgactagcccgacagccccgactagcccgacagccccgactagcccgacagtggagcagggagcaaatcctgcatttaggaatgacaaaggacagatccctgctgatgttgttccagacccagtagatatgccgttagagatggctgacgccgcagccactgctaaggaaatcaagcagatgcttctagatgcggtgcctctgtcatgtaacatctcaaaggccatgctcccaaattatgatcatgtcactggcaaggcaatgcttacgtcacttggcctgaagttgggggatcgtgttgttattgcaggacagaaggttggtacattaagattttgtggaacaactgaatttgcaagtgggcagtgggctggcattgaactggatgaaccagaaggaaaaaataatggaagtgttggaaaagtccagtactttaaatgtgcccccaagtatggtatttttgcacctctttcaaagataagtaaagcaaaaggtcgaaggaagaatataacacacactccttctacaaaagctgctgtacctctcatcaggtcccagaaaattgacgtagctcatgtgacgtcaaaagtaaatactggattaatgacatcaaaaaaagatagtgcttctgagtcaacactttcattgcctcctggtgaagaacttaaaactgtgacagagaaagatgttgccctgcttggatctgtcagcagctgctcctctacatcttctttggaacacagacagagctaccccaagaaacagaatgcaatcagcagtaacaagaagacaatgagcaaaagcccttccctttcatccagagccagtgctggtttgaattcctcagcaacatctacagcaaataatagccgttgcgagggggaactccgcctcggagagagagtgttagtggtaggacagagactgggcaccattaggttctttgggacaacaaacttcgctccaggatattggtatggtatagagcttgaaaaaccccatggcaagaatgatggttcagttggaggtgtgcagtattttagctgttctccaagatatggaatatttgctcccccatccagggtgcaaagagtaacagattccctggataccctttcagaaatttcttcaaataaacagaaccattcttatcctggttttaggagaagttttagcacaacttctgcttcttcccaaaaggagattaacagaagaaatgctttttccaaatcgaaagctgctttgcgtcgcagttggagcagcacccccaccgcaggtggcattgaagggagcgtgaagctgcacgaggggtctcaggtcctgctcacgagctccaatgagatgggtactgttaggtatgtgggccccactgactttgcttcaggtatctggcttggacttgagctccgaagcgccaagggaaaaaatgatgggtcagtgggtgacaagcgctatttcacctgtaagccgaaccatggagtcttagttcgaccgagcagagtgacctatcggggaattaatgggtcaaaacttgtggatgagaattgttaagcttctaaaatattaaataagctcaaatatatatatttggtgtaaataaagagtccatggtaaatggtttactttatttagccatattaaaattttgaaaatatagttatcttcttaaaaaccattataacaattcagagagagttctttacaaagccatgaatatgaactatggggaatcatggttcttttaaagcaattttcaaaataagtaccaattaaagctttaggttccaagaagattctgggactcaggaagaaaaagtgccatcaggtgaccagctgttgcatttcttgcttattctgttttgtttttgcacatcataatggatttttcttagtgccctaattgtgaagggtttctctagctttggttatgtgtaatgttcacgtgacctttttttgtcaatcatttttggaatttttctttctttctgtgctttattactaataagtccaatgagtgagtagtagctagatgactagtatgtagttttatattttggtaaaattatttgccctttcagaaatgcctcatctaaagatacatgataattttggagttggaaggggccttagaggctctccagctctgcttcttgcccattgccaaatactgaaatggaagcccgtcttacctggggtcactaactggttggttaactgagctaagaatagactgtgggtctcctcacttgtggcccagtgctctttctgctatacaaaatgtctaatctcagatttttcttctgctgcttgactgcttcatctggatgaactacaaaaaacccatgattaaggtttatgaattcaagtaataattagattttttttgcacagacttacttaacttccttattggatatgtttgtaacacataaacacaaagcacttttcaaacatgatgcacttttatctttgtgaataatttactgtcctttcctcctgggatatgagaaacattttaaaaaacgtatttaacagaagagagcaaataaagatatatcaggaaggatgtattagttatttacttaaatgtttataatatctggattttttttgttttgttactcatagaactggtgttgtttgctgtttttatttctctaattgttgcagagttctgcctgttacaaagctacagaactgtattgtttttattttccttcttgagcacatgttaacaaactaagcttcacattagagtgatgtcataatgtaaaatgtttgcattgtggttaggtattgaagtttatgtcctgtctgtgtaaagattcatcttttattgtaaatatttagactttaccacagaaatattggaacagtttgctttataagattaaaaagcatccttcagaatggagcttgccttgtgcttagaaataatatgttgaactattttgcaatatactattttaaatctaaattctgtcacttcgctgcctttttaaaatagtgtggtatttcaaatattgctagagctattttcctgaaatacatttgcaaaataaggctgctttgtaatcaaggaatatttttattgattgaaggaaatgactgtactgcgattcaaaagtaaacttattttattatacagattatttcttaaaaactctatttataccttaacatgaaatccatgaccacaccaaacttggttattcataatttttcctgttaaatataaaacactgtaagttaaaaacagtaatgccaacattgaatttatttttgaggtcaaagaaccagttgttctctttatatttagatgaggatgattgagtccatatactatgtatgtttacatatactatacatgcacattaggtgttttcatttgtgttttgcttatgaaatgtcatttaaagttcacttcttgagcatcaataaaaagggaagctgtgtggtttt

SEQ ID NO: 438438 - DNA, 2214 bp, Homo sapiens
gatttttgcctggacgaccattttgttgtctaagcttacgaatgttatcacatttcagttcaatctttctgattctcttctgatggactgctgctctgcttgtatatgtgtctttagtttggtgcctctcatcttttagttatgctgactctagaagtaagaactatgtgtacatagtataattttggaaaatatataaatgcaaagaagaaagcaaaaacaaaaaaacctcaatgagtcccactacttatgcatgctgttacaatctgagctcagtgaattttctttctttgatcctaatgatgcatcatgccaggaaattctttttgatcccaaaacttcagtttcagaattatttgccattttgagacagtgggttcctcaggtccaacaaaacattgacattattggaaatgagattcttaagagaggttgcaatgtgaatgatagagatggattgacagatatgactcttttacattatacctgcaaatctggagctcatggtattggtgatgtggaaacagctgtaaaatttgcaactcagcttattgacctgggagcagacattagtttgcggagtcgctggacaaacatgaatgctttgcattatgctgcttattttgatgtccctgaacttataagagtgattttgaaaacatcgaaaccaaaagatgtggatgccacttgcagtgattttaattttggaacagctttgcatattgcagcatacaacttgtgtgcaggtgctgtgaagtgcctcttggagcagggagcaaatcctgcatttaggaatgacaaaggacagatccctgctgatgttgttccagacccagtagatatgccgttagagatggctgacgccgcagccactgctaaggaaatcaagcagatgcttctagatgcggtgcctctgtcatgtaacatctcaaaggccatgctcccaaattatgatcatgtcactggcaaggcaatgcttacgtcacttggcctgaagttgggggatcgtgttgttattgcaggacagaaggttggtacattaagattttgtggaacaactgaatttgcaagtgggcagtgggctggcattgaactggatgaaccagaaggaaaaaataatggaagtgttggaaaagtccagtactttaaatgtgcccccaagtatggtatttttgcacctctttcaaagataagtaaagcaaaaggtcgaaggaagaatataacacacactccttctacaaaagctgctgtacctctcatcaggtcccagaaaattgacgtagctcatgtgacgtcaaaagtaaatactggattaatgacatcaaaaaaagatagtgcttctgagtcaacactttcattgcctcctggtgaagaacttaaaactgtgacagagaaagatgttgccctgcttggatctgtcagcagctgctcctctacatcttctttggaacacagacagagctaccccaagaaacagaatgcaatcagcagtaacaagaagacaatgagcaaaagcccttccctttcatccagagccagtgctggtttgaattcctcagcaacatctacagcaaataatagccgttgcgagggggaactccgcctcggagagagagtgttagtggtaggacagagactgggcaccattaggttctttgggacaacaaacttcgctccaggatattggtatggtatagagcttgaaaaaccccatggcaagaatgatggttcagttggaggtgtgcagtattttagctgttctccaagatatggaatatttgctcccccatccagggtgcaaagagtaacagattccctggataccctttcagaaatttcttcaaataaacagaaccattcttatcctggttttaggagaagttttagcacaacttctgcttcttcccaaaaggagattaacagaagaaatgctttttccaagtgagtattaagaagatttagaaaaacacctttcaagatgaacatgatgggattctgtgaagaaagaaaagtggagtgctgtatcttttgcattgcttggtagagttttaacacgtaggagaaaaggtgtgataagtgtattgagaagcgttcttcctccctcctttgcaagcgcaattaaaaatgtcaccagtgactaaaactagtgcactgcatatattttatcttcatagaggtcagaactgttaataaaagttaaaggaatttacatat

SEQ ID NO: 438439 - DNA, 2300 bp, Homo sapiens
gatttttgcctggacgaccattttgttgtctaagcttacgaatgttatcacatttcagttcaatctttctgattctcttctgatggactgctgctctgcttgtatatgtgtctttagtttggtgcctctcatcttttagttatgctgactctagaagtaagaactatgtgtacatagtataattttggaaaatatataaatgcaaagaagaaagcaaaaacaaaaaaacctcaatgagtcccactacttatgcatgctgttacaatctgagctcagtgaattttctttctttgatcctaatgatgcatcatgccaggaaattctttttgatcccaaaacttcagtttcagaattatttgccattttgagacagtgggttcctcaggtccaacaaaacattgacattattggaaatgagattcttaagagaggttgcaatgtgaatgatagagatggattgacagatatgactcttttacattatacctgcaaatctggagctcatggtattggtgatgtggaaacagctgtaaaatttgcaactcagcttattgacctgggagcagacattagtttgcggagtcgctggacaaacatgaatgctttgcattatgctgcttattttgatgtccctgaacttataagagtgattttgaaaacatcgaaaccaaaagatgtggatgccacttgcagtgattttaattttggaacagctttgcatattgcagcatacaacttgtgtgcaggtgctgtgaagtgcctcttggagcagggagcaaatcctgcatttaggaatgacaaaggacagatccctgctgatgttgttccagacccagtagatatgccgttagagatggctgacgccgcagccactgctaaggaaatcaagcagatgcttctagatgcggtgcctctgtcatgtaacatctcaaaggccatgctcccaaattatgatcatgtcactggcaaggcaatgcttacgtcacttggcctgaagttgggggatcgtgttgttattgcaggacagaaggttggtacattaagattttgtggaacaactgaatttgcaagtgggcagtgggctggcattgaactggatgaaccagaaggaaaaaataatggaagtgttggaaaagtccagtactttaaatgtgcccccaagtatggtatttttgcacctctttcaaagataagtaaagcaaaaggtcgaaggaagaatataacacacactccttctacaaaagctgctgtacctctcatcaggtcccagaaaattgacgtagctcatgtgacgtcaaaagtaaatactggattaatgacatcaaaaaaagatagtgcttctgagtcaacactttcattgcctcctggtgaagaacttaaaactgtgacagagaaagatgttgccctgcttggatctgtcagcagctgctcctctacatcttctttggaacacagacagagctaccccaagaaacagaatgcaatcagcagtaacaagaagacaatgagcaaaagcccttccctttcatccagagccagtgctggtttgaattcctcagcaacatctacagcaaataatagccgttgcgagggggaactccgcctcggagagagagtgttagtggtaggacagagactgggcaccattaggttctttgggacaacaaacttcgctccaggatattggtatggtatagagcttgaaaaaccccatggcaagaatgatggttcagttggaggtgtgcagtattttagctgttctccaagatatggaatatttgctcccccatccagggtgcaaagagtaacagattccctggataccctttcagaaatttcttcaaataaacagaaccattcttatcctggtaagactacacagttttgtgttcctaatcaatatttctttgctttcatttattgaaaaatttttattatgaggtattgtatacaaaagggtctataaactgtatttgtatagtttttgtaataatagaacaaacatctgttacctgtcccctggctgaagaagatgataacctgacctgtagaaacccctgagtaccccatcccatctcatctgccttgctcttcatataccccatcctcaggtggaggagtcttgaattgtacattaattattcccttgattctctttatttttgtcacccatatatagatatatcaataaataatatgtgttcagttttgtttgtttgctattttgttatttagcattccgttgaaatattcattccataattgatggttatttgggttatatcctgtgtcttttctat

SEQ ID NO: 438440 - DNA, 558 bp, Homo sapiens
tctactttcatgctgcaacagcagagttcaatagttgtggcagaggtggtatggctagcaaatcctaacatatttactgtccagcaatttgcagaaacagtttgctgtgacccctgttctagtagagatgctgcaggcaatcttggaagagttggtagtttaccagggatcaggttttgtgaatttcccatggcagtaattttcccaggaaactcttcacatttcctttgagcagcttgacctcacatgtgagaaacacaactgtagatgacttatgtgatgaaaggcatcagatatcaaaatcaccaactaactagactagttagaatacctagtgtgattttttggctaatgtgctttttgagtttttctccctttgttttttctcctcttttcctgccctgcccctgtatccctccctgacttaaacaggtttgaattcctcagcaacatctacagcaaataatagccgttgcgagggggaactccgcctcggagagagagtgttagtggtaggacagagactgggcaccattaggttctttgggacaacaaact

SEQ ID NO: 438441 - DNA, 691 bp, Homo sapiens
ctgctctgcaattatgcttgtaaaatgtttttcctgttcactttttgaattttcaaagtttacaattttataatttgaaatcttaatgagtatcatgatcttccctcattttggtcatttatggaaatgttaaaacacctcgactttggttttgtatagtagcataagagttttggataaagtacagatgcttttgaaatgcaatattcatgttctaggatattggtatggtatagagcttgaaaaaccccatggcaagaatgatggttcagttggaggtgtgcagtattttagctgttctccaagatatggaatatttgctcccccatccagggtgcaaaggtgagagaatgaaatttatgtttatttacagaaactttttgtaatctgcagtggttaatagagacactaattttatattaaagatatgctctgattgtagctcatgtcttctttcaaggggttaaccaaccaccttcttcagagagaaggctcatggaaagctaaatttgctttgctgaggatttgcaattttaaaaacctcctttattcctcatttgcaaaccctatgagtatgtgtaggctattagaagtggcgtttgcagctaagtacagtgagagcagcaagcttaatctgtcatgcaaacaaaagtaaaaatgctctctgattgcttcagtcacatcctaacta

SEQ ID NO: 438442 - DNA, 4174 bp, Homo sapiens
gatttttgcctggacgaccattttgttgtctaagcttacgaatgttatcacatttcagttcaatctttctgattctcttctgatggactgctgctctgcttgtatatgtgtctttagtttggtgcctctcatcttttagttatgctgactctagaagtaagaactatgtgtacatagtataattttggaaaatatataaatgcaaagaagaaagcaaaaacaaaaaaacctcaatgagtcccactacttatgcatgctgttacaatctgagctcagtgaattttctttctttgatcctaatgatgcatcatgccaggaaattctttttgatcccaaaacttcagtttcagaattatttgccattttgagacagtgggttcctcaggtccaacaaaacattgacattattggaaatgagattcttaagagaggttgcaatgtgaatgatagagatggattgacagatatgactcttttacattatacctgcaaatctggagctcatggtattggtgatgtggaaacagctgtaaaatttgcaactcagcttattgacctgggagcagacattagtttgcggagtcgctggacaaacatgaatgctttgcattatgctgcttattttgatgtccctgaacttataagagtgattttgaaaacatcgaaaccaaaagatgtggatgccacttgcagtgattttaattttggaacagctttgcatattgcagcatacaacttgtgtgcaggtgctgtgaagtgcctcttggagcagggagcaaatcctgcatttaggaatgacaaaggacagatccctgctgatgttgttccagacccagtagatatgccgttagagatggctgacgccgcagccactgctaaggaaatcaagcagatgcttctagatgcggtgcctctgtcatgtaacatctcaaaggccatgctcccaaattatgatcatgtcactggcaaggcaatgcttacgtcacttggcctgaagttgggggatcgtgttgttattgcaggacagaaggttggtacattaagattttgtggaacaactgaatttgcaagtgggcagtgggctggcattgaactggatgaaccagaaggaaaaaataatggaagtgttggaaaagtccagtactttaaatgtgcccccaagtatggtatttttgcacctctttcaaagataagtaaagcaaaaggtcgaaggaagaatataacacacactccttctacaaaagctgctgtacctctcatcaggtcccagaaaattgacgtagctcatgtgacgtcaaaagtaaatactggattaatgacatcaaaaaaagatagtgcttctgagtcaacactttcattgcctcctggtgaagaacttaaaactgtgacagagaaagatgttgccctgcttggatctgtcagcagctgctcctctacatcttctttggaacacagacagagctaccccaagaaacagaatgcaatcagcagtaacaagaagacaatgagcaaaagcccttccctttcatccagagccagtgctggtttgaattcctcagcaacatctacagcaaataatagccgttgcgagggggaactccgcctcggagagagagtgttagtggtaggacagagactgggcaccattaggttctttgggacaacaaacttcgctccaggatattggtatggtatagagcttgaaaaaccccatggcaagaatgatggttcagttggaggtgtgcagtattttagctgttctccaagatatggaatatttgctcccccatccagggtgcaaagagtaacagattccctggataccctttcagaaatttcttcaaataaacagaaccattcttatcctggttttaggagaagttttagcacaacttctgcttcttcccaaaaggagattaacagaagaaatgctttttccaaatcgaaagctgctttgcgtcgcagttggagcagcacccccaccgcaggtggcattgaagggagcgtgaagctgcacgaggggtctcaggtcctgctcacgagctccaatgagatgggtactgttaggtatgtgggccccactgactttgcttcaggtatctggcttggacttgagctccgaagcgccaagggaaaaaatgatgggtcagtgggtgacaagcgctatttcacctgtaagccgaaccatggagtcttagttcgaccgagcagagtgacctatcggggaattaatgggtcaaaacttgtggatgagaattgttaagcttctaaaatattaaataagctcaaatatatatatttggtgtaaataaagagtccatggtaaatggtttactttatttagccatattaaaattttgaaaatatagttatcttcttaaaaaccattataacaattcagagagagttctttacaaagccatgaatatgaactatggggaatcatggttcttttaaagcaattttcaaaataagtaccaattaaagctttaggttccaagaagattctgggactcaggaagaaaaagtgccatcaggtgaccagctgttgcatttcttgcttattctgttttgtttttgcacatcataatggatttttcttagtgccctaattgtgaagggtttctctagctttggttatgtgtaatgttcacgtgacctttttttgtcaatcatttttggaatttttctttctttctgtgctttattactaataagtccaatgagtgagtagtagctagatgactagtatgtagttttatattttggtaaaattatttgccctttcagaaatgcctcatctaaagatacatgataattttggagttggaaggggccttagaggctctccagctctgcttcttgcccattgccaaatactgaaatggaagcccgtcttacctggggtcactaactggttggttaactgagctaagaatagactgtgggtctcctcacttgtggcccagtgctctttctgctatacaaaatgtctaatctcagatttttcttctgctgcttgactgcttcatctggatgaactacaaaaaacccatgattaaggtttatgaattcaagtaataattagattttttttgcacagacttacttaacttccttattggatatgtttgtaacacataaacacaaagcacttttcaaacatgatgcacttttatctttgtgaataatttactgtcctttcctcctgggatatgagaaacattttaaaaaacgtatttaacagaagagagcaaataaagatatatcaggaaggatgtattagttatttacttaaatgtttataatatctggattttttttgttttgttactcatagaactggtgttgtttgctgtttttatttctctaattgttgcagagttctgcctgttacaaagctacagaactgtattgtttttattttccttcttgagcacatgttaacaaactaagcttcacattagagtgatgtcataatgtaaaatgtttgcattgtggttaggtattgaagtttatgtcctgtctgtgtaaagattcatcttttattgtaaatatttagactttaccacagaaatattggaacagtttgctttataagattaaaaagcatccttcagaatggagcttgccttgtgcttagaaataatatgttgaactattttgcaatatactattttaaatctaaattctgtcacttcgctgcctttttaaaatagtgtggtatttcaaatattgctagagctattttcctgaaatacatttgcaaaataaggctgctttgtaatcaaggaatatttttattgattgaaggaaatgactgtactgcgattcaaaagtaaacttattttattatacagattatttcttaaaaactctatttataccttaacatgaaatccatgaccacaccaaacttggttattcataatttttcctgttaaatataaaacactgtaagttaaaaacagtaatgccaacattgaatttatttttgaggtcaaagaaccagttgttctctttatatttagatgaggatgattgagtccatatactatgtatgtttacatatactatacatgcacattaggtgttttcatttgtgttttgcttatgaaatgtcatttaaagttcacttcttgagcatcaataaaaagggaagctgtgtggtttt

SEQ ID NO: 438443 - DNA, 4289 bp, Homo sapiens
accgagtccccagcgcgtgcgcggggccgtggccgaggcctgcgcgccgcccggccgcctgcactgcgcgcgcgcccaccccgcgtgggaggcagcgggaggggcccggagaggtgtggagcggcgcggcgggaggctccgtgggcggccacgggagacagcgccggcgggagcgcgcctctcggcctttcctccgcgcccccgcgtccccagccggccgctccgagaggacccggaggaggcaggtggctttctagaagatgaccatagaggaccttccagattttccattagaaggaaatcctttgtttggaagatacccatttatattttctgcttctgataccccagttatcttttccatttctgcagcaccaatgccttcagactgtgaattttctttctttgatcctaatgatgcatcatgccaggaaattctttttgatcccaaaacttcagtttcagaattatttgccattttgagacagtgggttcctcaggtccaacaaaacattgacattattggaaatgagattcttaagagaggttgcaatgtgaatgatagagatggattgacagatatgactcttttacattatacctgcaaatctggagctcatggtattggtgatgtggaaacagctgtaaaatttgcaactcagcttattgacctgggagcagacattagtttgcggagtcgctggacaaacatgaatgctttgcattatgctgcttattttgatgtccctgaacttataagagtgattttgaaaacatcgaaaccaaaagatgtggatgccacttgcagtgattttaattttggaacagctttgcatattgcagcatacaacttgtgtgcaggtgctgtgaagtgcctcttggagcagggagcaaatcctgcatttaggaatgacaaaggacagatccctgctgatgttgttccagacccagtagatatgccgttagagatggctgacgccgcagccactgctaaggaaatcaagcagatgcttctagatgcggtgcctctgtcatgtaacatctcaaaggccatgctcccaaattatgatcatgtcactggcaaggcaatgcttacgtcacttggcctgaagttgggggatcgtgttgttattgcaggacagaaggttggtacattaagattttgtggaacaactgaatttgcaagtgggcagtgggctggcattgaactggatgaaccagaaggaaaaaataatggaagtgttggaaaagtccagtactttaaatgtgcccccaagtatggtatttttgcacctctttcaaagataagtaaagcaaaaggtcgaaggaagaatataacacacactccttctacaaaagctgctgtacctctcatcaggtcccagaaaattgacgtagctcatgtgacgtcaaaagtaaatactggattaatgacatcaaaaaaagatagtgcttctgagtcaacactttcattgcctcctggtgaagaacttaaaactgtgacagagaaagatgttgccctgcttggatctgtcagcagctgctcctctacatcttctttggaacacagacagagctaccccaagaaacagaatgcaatcagcagtaacaagaagacaatgagcaaaagcccttccctttcatccagagccagtgctggtttgaattcctcagcaacatctacagcaaataatagccgttgcgagggggaactccgcctcggagagagagtgttagtggtaggacagagactgggcaccattaggttctttgggacaacaaacttcgctccaggatattggtatggtatagagcttgaaaaaccccatggcaagaatgatggttcagttggaggtgtgcagtattttagctgttctccaagatatggaatatttgctcccccatccagggtgcaaagagtaacagattccctggataccctttcagaaatttcttcaaataaacagaaccattcttatcctggttttaggagaagttttagcacaacttctgcttcttcccaaaaggagattaacagaagaaatgctttttccaaatcgaaagctgctttgcgtcgcagttggagcagcacccccaccgcaggtggcattgaagggagcgtgaagctgcacgaggggtctcaggtcctgctcacgagctccaatgagatgggtactgttaggtatgtgggccccactgactttgcttcaggtatctggcttggacttgagctccgaagcgccaagggaaaaaatgatgggtcagtgggtgacaagcgctatttcacctgtaagccgaaccatggagtcttagttcgaccgagcagagtgacctatcggggaattaatgggtcaaaacttgtggatgagaattgttaagcttctaaaatattaaataagctcaaatatatatatttggtgtaaataaagagtccatggtaaatggtttactttatttagccatattaaaattttgaaaatatagttatcttcttaaaaaccattataacaattcagagagagttctttacaaagccatgaatatgaactatggggaatcatggttcttttaaagcaattttcaaaataagtaccaattaaagctttaggttccaagaagattctgggactcaggaagaaaaagtgccatcaggtgaccagctgttgcatttcttgcttattctgttttgtttttgcacatcataatggatttttcttagtgccctaattgtgaagggtttctctagctttggttatgtgtaatgttcacgtgacctttttttgtcaatcatttttggaatttttctttctttctgtgctttattactaataagtccaatgagtgagtagtagctagatgactagtatgtagttttatattttggtaaaattatttgccctttcagaaatgcctcatctaaagatacatgataattttggagttggaaggggccttagaggctctccagctctgcttcttgcccattgccaaatactgaaatggaagcccgtcttacctggggtcactaactggttggttaactgagctaagaatagactgtgggtctcctcacttgtggcccagtgctctttctgctatacaaaatgtctaatctcagatttttcttctgctgcttgactgcttcatctggatgaactacaaaaaacccatgattaaggtttatgaattcaagtaataattagattttttttgcacagacttacttaacttccttattggatatgtttgtaacacataaacacaaagcacttttcaaacatgatgcacttttatctttgtgaataatttactgtcctttcctcctgggatatgagaaacattttaaaaaacgtatttaacagaagagagcaaataaagatatatcaggaaggatgtattagttatttacttaaatgtttataatatctggattttttttgttttgttactcatagaactggtgttgtttgctgtttttatttctctaattgttgcagagttctgcctgttacaaagctacagaactgtattgtttttattttccttcttgagcacatgttaacaaactaagcttcacattagagtgatgtcataatgtaaaatgtttgcattgtggttaggtattgaagtttatgtcctgtctgtgtaaagattcatcttttattgtaaatatttagactttaccacagaaatattggaacagtttgctttataagattaaaaagcatccttcagaatggagcttgccttgtgcttagaaataatatgttgaactattttgcaatatactattttaaatctaaattctgtcacttcgctgcctttttaaaatagtgtggtatttcaaatattgctagagctattttcctgaaatacatttgcaaaataaggctgctttgtaatcaaggaatatttttattgattgaaggaaatgactgtactgcgattcaaaagtaaacttattttattatacagattatttcttaaaaactctatttataccttaacatgaaatccatgaccacaccaaacttggttattcataatttttcctgttaaatataaaacactgtaagttaaaaacagtaatgccaacattgaatttatttttgaggtcaaagaaccagttgttctctttatatttagatgaggatgattgagtccatatactatgtatgtttacatatactatacatgcacattaggtgttttcatttgtgttttgcttatgaaatgtcatttaaagttcacttcttgagcatcaataaaaagggaagctgtgtggtttt

SEQ ID NO: 438444 - DNA, 2140 bp, Homo sapiens
gatttttgcctggacgaccattttgttgtctaagcttacgaatgttatcacatttcagttcaatctttctgattctcttctgatggactgctgctctgcttgtatatgtgtctttagtttggtgcctctcatcttttagttatgctgactctagaagtaagaactatgtgtacatagtataattttggaaaatatataaatgcaaagaagaaagcaaaaacaaaaaaacctcaatgagtcccactacttatgcatgctgttacaatctgagctcagtgaattttctttctttgatcctaatgatgcatcatgccaggaaattctttttgatcccaaaacttcagtttcagaattatttgccattttgagacagtgggttcctcaggtccaacaaaacattgacattattggaaatgagattcttaagagaggttgcaatgtgaatgatagagatggattgacagatatgactcttttacattatacctgcaaatctggagctcatggtattggtgatgtggaaacagctgtaaaatttgcaactcagcttattgacctgggagcagacattagtttgcggagtcgctggacaaacatgaatgctttgcattatgctgcttattttgatgtccctgaacttataagagtgattttgaaaacatcgaaaccaaaagatgtggatgccacttgcagtgattttaattttggaacagctttgcatattgcagcatacaacttgtgtgcaggtgctgtgaagtgcctcttggagcagggagcaaatcctgcatttaggaatgacaaaggacagatccctgctgatgttgttccagacccagtagatatgccgttagagatggctgacgccgcagccactgctaaggaaatcaagcagatgcttctagatgcggtgcctctgtcatgtaacatctcaaaggccatgctcccaaattatgatcatgtcactggcaaggcaatgcttacgtcacttggcctgaagttgggggatcgtgttgttattgcaggacagaaggttggtacattaagattttgtggaacaactgaatttgcaagtgggcagtgggctggcattgaactggatgaaccagaaggaaaaaataatggaagtgttggaaaagtccagtactttaaatgtgcccccaagtatggtatttttgcacctctttcaaagataagtaaagcaaaaggtcgaaggaagaatataacacacactccttctacaaaagctgctgtacctctcatcaggtcccagaaaattgacgtagctcatgtgacgtcaaaagtaaatactggattaatgacatcaaaaaaagatagtgcttctgagtcaacactttcattgcctcctggtgaagaacttaaaactgtgacagagaaagatgttgccctgcttggatctgtcagcagctgctcctctacatcttctttggaacacagacagagctaccccaagaaacagaatgcaatcagcagtaacaagaagacaatgagcaaaagcccttccctttcatccagagccagtgctggtttgaattcctcagcaacatctacagcaaataatagccgttgcgagggggaactccgcctcggagagagagtgttagtggtaggacagagactgggcaccattaggttctttgggacaacaaacttcgctccaggatattggtatggtatagagcttgaaaaaccccatggcaagaatgatggttcagttggaggtgtgcagtattttagctgttctccaagatatggaatatttgctcccccatccagggtgcaaagagtaacagattccctggataccctttcagaaatttcttcaaataaacagaaccattcttatcctggttttaggagaagttttagcacaacttctgcttcttcccaaaaggagattaacagaagaaatgctttttccaagtgagtattaagaagatttagaaaaacacctttcaagatgaacatgatgggattctgtgaagaaagaaaagtggagtgctgtatcttttgcattgcttggtagagttttaacacgtaggagaaaaggtgtgataagtgtattgagaagcgttcttcctccctcctttgcaagcgcaattaaaaatgtcaccagtgacta

SEQ ID NO: 438445 - DNA, 776 bp, Homo sapiens
tgcctgtggggacgctggctggtgctctcaaaggaggactctaagggaggcctgctgaagcctgccaccaccaccaggttttctgtaattggatctgcacaggggcctcagggagtgcagtatgaaaacacccatttccatgcactcccaaccaacacgctgaacaatctgtactcttggtgagaaagacccatgagggactgaaaattctttttctacgtgacactgagaagacagtcacatggtttgggtggctttctagaagatgaccatagaggaccttccagattttccattagaaggaaatcctttgtttggaagatacccatttatattttctgcttctgataccccagttatcttttccatttctgcagcaccaatgccttcagactgtgaattttctttctttgatcctaatgatgcatcatgccaggaaattctttttgatcccaaaacttcagtttcagaattatttgccattttgagacagtgggttcctcaggtccaacaaaacattgacattattggaaatgagattcttaagagaggttgcaatgtgaatgatagagatggattgacagatatgactcttttacattatacctgcaaatctggagctcatggtattgtctgatgtggtggtgctgaagctactggtggtgatggactcctttttcccctcacaactcatcatgaactgatactttcacaaaataaaataaaaatgaatttataatacaaaataaaataaagccataaaatataagcccaaa

SEQ ID NO: 438446 - DNA, 517 bp, Homo sapiens
agcagcaagattaagaaaattgtgcattcaattatatcatcctttgcatttggactatttggagttttcctggtcttactggatgtcactctcgtccttgccgacctaattttcactgacagcaaactttatattccttcggagtatcgttctatttctctagctattgccttattttttctcatggatgttcttcttcgagtatttgtagaagggtaagtttgattatttttataatgcattaagctattttgtacttttataagaagcactttgggaggctgaggtgggaggatcccaaggtcaggagttcgagacaatcctggccaacatggtgaaaccccgtctctactaaaaatacaaaaattagctgggtgtggtggtggttgcctataatcccagctgcttgggatgctgaggcaggagaatcttttgaacctgggaggcagaagttgcattgagccgagatcatgccattgcactctagcctgggtgacagggtgagactccatctcca

SEQ ID NO: 438447 - DNA, 2146 bp, Homo sapiens
  misc_feature (1188)..(1188): n is a, c, g, or t
  misc_feature (1428)..(1428): n is a, c, g, or t
  misc_feature (1490)..(1490): n is a, c, g, or t
tgtgggcgcgacggctgcgagttggggaggtctgtggtgcgggtcgccccgggggatccccggcgcgggcctcgcgcgacggtccacggtcgcgcggcgtgtgtggggggtccacgcacacccgcaaaacttcctcctcccctgctccgggagagcgagcgagcgtgtgtgagagcgagtgtgaggagcgagccgcggcccgacgcccagcgccgccgctggagcagctgtcaaaacttcgccgccgcccgggccccgcggcccgccctccccgcgccgggcccctttctcttcctgctgcgggcggcccgggggaggggccgcgggcggagaccccggaggccggcgcccctcacgccgcccgcccgcccgctccccgcccggcccctgcgcgcgtgcgtgtcctgctcgctccatgttgccgcctctcccggtacctgctgctgctcccggggcttcgggaaatgcgagagtctgagccggggaggaggaacccgagcagcggcggcggcggccgcggcggcgggagccccccaagaggaggaccgggatccatgtgtctttcctggtgactaggatgtcgtcggaggagaacaagtgcgtggagcagccgcagccaccaccccccgaggagcctggagccccggccccgagccccccagccgcagacaaaagacctcggggccggcctcgcaaggcgcttcccctttccagagagccagaaagaaactatttggagttttcctggtcttactggatgtcactctcgtccttgccgacctaattttcactgacagcaaactttatattccttcggagtatcgttctatttctctagctattgccttattttttctcatggatgttcttcttcgagtatttgtagaagctcatccacaccgctcagcacgaaggccttgttctcaggggcctgcttctcaatgaggcggatctgcttgaggttggcatggggcccaatgccaaccgggatcacgatgaccttcttcttcttcaggccctggacgtagcggacaaagttccgggacatccgttggggctcctggctggccatcaggagcagggcgatgcggaaggcttcagggcggtcgatcttgctgatgatttggaacagtgtgtatttcaaggcctcgctggtggaggccacctggctgcccgcatacttcaccnggctggcaacgcgccgcagctctgacggtcgcttccggtccttgagcccgatgtaggcgtgggagccgtcgtggtactccaccacagccacgcggacccacttctaggagatgcgcagccgctccatcatgtccaccacaaaggccttcagcacttcaaactcagcctcggacagcctggaggagccatccagcaggaagatcaggtccagtagcctgctgcagtagaaatcgtgcaacngcggttctgagatgtcctccacatacagagtggtggggctcaccggggcatctgtgggaggnaccaccaggcctcccggctcctggcaggcttcacaggtgagggtgacaccatcacagtggctgcagaaaagagcgaagaaattaaaatggttcagaaagaacctatggacacttctgagccctacagtgtatgactacttccatattcccacagaatctcctctgttccacctgaacttgagatcccacggaccattccacacccaagtgagatgtcactgtttaacatctgtccccaaatagcatgcccccccacttcaaaacacacacatagccgacttcctttgattctagaaaccaaagctttagcccatcctaggatatgaaaaaatatactcgttgttctaggccatccacacagccactcaaagctgatttcttttcaacctacatctttagcaacatgaatacttaattataatctaagccttcttacaagtgtctccaagaacaaatgttactaaaatgtagacgctaacctgtgcttgtacatgttctgttgaagataaatgctttacagtacatattctaacagaatgtaaattgcatgagttttaaaacatgtttaatacgttgggccctaacgaagagagaaaaaattggagcaaaaacattgtggaaagatgaataaagattcaaaaccccagctttatcta

SEQ ID NO: 438448 - DNA, 1201 bp, Homo sapiens
tgtgggcgcgacggctgcgagttggggaggtctgtggtgcgggtcgccccgggggatccccggcgcgggcctcgcgcgacggtccacggtcgcgcggcgtgtgtggggggtccacgcacacccgcaaaacttcctcctcccctgctccgggagagcgagcgagcgtgtgtgagagcgagtgtgaggagcgagccgcggcccgacgcccagcgccgccgctggagcagctgtcaaaacttcgccgccgcccgggccccgcggcccgccctccccgcgccgggcccctttctcttcctgctgcgggcggcccgggggaggggccgcgggcggagaccccggaggccggcgcccctcacgccgcccgcccgcccgctccccgcccggcccctgcgcgcgtgcgtgtcctgctcgctccatgttgccgcctctcccggtacctgctgctgctcccggggcttcgggaaatgcgagagtctgagccggggaggaggaacccgagcagcggcggcggcggccgcggcggcgggagccccccaagaggaggaccgggatccatgtgtctttcctggtgactaggatgtcgtcggaggagaacaagtgcgtggagcagccgcagccaccaccccccgaggagcctggagccccggccccgagccccccagccgcagacaaaagacctcggggccggcctcgcaaggcgcttcccctttccagagagccagaaagaaactatttggagttttcctggtcttactggatgtcactctcgtccttgccgacctaattttcactgacagcaaactttatattccttcggagtatcgttctatttctctagctattgccttattttttctcatggatgttcttcttcgagtatttgtagaagggaacaacactacagtcgcccgtagttttgtttctgttcagtctccattgtggcatgccacactctcctggtttgggccctgctcatttctttactgccttcctgcctgccctttttgtgcaggtggattcttgctctgtcacccaggctggagcgtaatggcacaatcttcgctcacttcaacctctgccttctgggttcgagcatcccagctactcgggaggccgaggcaggagcattgcttgtacccaggaggcagagattgcagtgagctgagatcacgccattgcactccagtctgagcaacaagag

SEQ ID NO: 438449 - DNA, 359 bp, Homo sapiens
tcgctcacttcaacctctgccttctgggttcgagcaattctcctgcctcagcctcctgagtaactgggattacaggcgtgtaccaccacatctggctaatttttgtatttttagtagggacggtgttttaccatattggccaggctggtcttgagctcctgaactcaagtgatccactcgcctcagcctcccaaagtgctgagattacaggcttgagcaaccttgcccagccaaaagtaaactttttaattccatcacaatatgttctagatctttgacagactgaaagacatagaatgtcaaaaggtgagactctctcatgtggctaaacaccctcctactgcagatacagaactgag

SEQ ID NO: 438450 - DNA, 1992 bp, Homo sapiens
  misc_feature (1650)..(1650): n is a, c, g, or t
tgtgggcgcgacggctgcgagttggggaggtctgtggtgcgggtcgccccgggggatccccggcgcgggcctcgcgcgacggtccacggtcgcgcggcgtgtgtggggggtccacgcacacccgcaaaacttcctcctcccctgctccgggagagcgagcgagcgtgtgtgagagcgagtgtgaggagcgagccgcggcccgacgcccagcgccgccgctggagcagctgtcaaaacttcgccgccgcccgggccccgcggcccgccctccccgcgccgggcccctttctcttcctgctgcgggcggcccgggggaggggccgcgggcggagaccccggaggccggcgcccctcacgccgcccgcccgcccgctccccgcccggcccctgcgcgcgtgcgtgtcctgctcgctccatgttgccgcctctcccggtacctgctgctgctcccggggcttcgggaaatgcgagagtctgagccggggaggaggaacccgagcagcggcggcggcggccgcggcggcgggagccccccaagaggaggaccgggatccatgtgtctttcctggtgactaggatgtcgtcggaggagaacaagtgcgtggagcagccgcagccaccaccccccgaggagcctggagccccggccccgagccccccagccgcagacaaaagacctcggggccggcctcgcaaggcgcttcccctttccagagagccagaaagaaactcagcccacctgcacccaggtgaaataaacagctttattgctcacacgaagcctgtttggtggtctcttcacacggatgcgcatgaaatttggtgccgtgacttggatcgggggacctcccttaggagatcaatcccctgtcctcctgctctttgctccgtgagaaagatccacctacgacctcaggtcctcagaccgaccagcccaagaaacatctcaccaatttcaaatctgatctattcggcttagcgactgaagattgacgctgcccaatcgcctcggaagtcccctggaccatcacagaagccgagcttcgggtaactctcacagtggagggtaagtccatcccctgtttaatcgatacgggggctacccactccacgttgccttcttttcaagggcctgtttcccttgcccccataactgttgtgggtattgacggccaagcttcaaaacccctgaaaactcccccactctggtgccaacttggacaacactcttttatgcactcttttttagttatccccacctgcccacttcccttattaggccgaaatattttaaccaaattatctgcttccctgactattcctggagtacagctacatctcattgctgcccttcttcccaatccaaagcctcctttgtgtcctctaacatccccacaatatcaccccttaccacaagacctcccttcagcttaatctctcccactctaggttcccacgccgcccctaatcccacttgaagcagccctgagaaacatcgcccattctctctccataccaccccccaaaaattttcgccgctccaacacttcaacactattttgttttatttgtcttattaatatcagaaggcaggaatgtcaggcctctgagcccaggccaggccatcgcatcccctgtgacttgcacgtntacatccagatggcctgaagtaactgaagatccacaaaagaagtaaaaacagccttaactgatgacattccaccattgtgatttgttcctgccccaccctaactgatcaatgtactttgtaatctcccccacccttaagaaggttctttgtaattctccccacccttgagaatgtactttgtgagatccacccctgcccaccagagaacaaccccctttgattgtaattttttattaccttcccaaatcctataaaacagccccacccctatcttccttcactgactctcttttcggactcagcccaccggcacccaggtgaaataaacagctttattgctc

SEQ ID NO: 438451 - DNA, 1192 bp, Homo sapiens
tgtgggcgcgacggctgcgagttggggaggtctgtggtgcgggtcgccccgggggatccccggcgcgggcctcgcgcgacggtccacggtcgcgcggcgtgtgtggggggtccacgcacacccgcaaaacttcctcctcccctgctccgggagagcgagcgagcgtgtgtgagagcgagtgtgaggagcgagccgcggcccgacgcccagcgccgccgctggagcagctgtcaaaacttcgccgccgcccgggccccgcggcccgccctccccgcgccgggcccctttctcttcctgctgcgggcggcccgggggaggggccgcgggcggagaccccggaggccggcgcccctcacgccgcccgcccgcccgctccccgcccggcccctgcgcgcgtgcgtgtcctgctcgctccatgttgccgcctctcccggtacctgctgctgctcccggggcttcgggaaatgcgagagtctgagccggggaggaggaacccgagcagcggcggcggcggccgcggcggcgggagccccccaagaggaggaccgggatccatgtgtctttcctggtgactaggatgtcgtcggaggagaacaagtgcgtggagcagccgcagccaccaccccccgaggagcctggagccccggccccgagccccccagccgcagacaaaagacctcggggccggcctcgcaaggcgcttcccctttccagagagccagaaagaaactatttggagttttcctggtcttactggatgtcactctcgtccttgccgacctaattttcactgacagcaaactttatattccttcggagtatcgttctatttctctagctattgccttattttttctcatggatgttcttcttcgagtatttgtagaagggtaagtttgattatttttataatgcattaagctattttgtacttttataagaagcactttgggaggctgaggtgggaggatcccaaggtcaggagttcgagacaatcctggccaacatggtgaaaccccgtctctactaaaaatacaaaaattagctgggtgtggtggtggttgcctataatcccagctgcttgggatgctgaggcaggagaatcttttgaacctgggaggcagaagttgcattgagccgagatcatgccattgcactctagcctgggtgacagggtgagactccatctcca

SEQ ID NO: 438452 - DNA, 800 bp, Homo sapiens
ccctcgcccagccctcccacctgcacacaaggtgccagcataccaggggcaggggagcgggtggggatctgcagcccctctccggagcagcacctctgcagcaccaggtcaggagcctctcaggggagcgtctcaaagtcctggatgaggatgggggcattgggccagccgatcctctccagctcctgaacgttggcattagggcccactccaatgggcaccacctggatgtctccaggcaacctcttgatcttatcagaggcaggatttctggtgaccatggagaccaggttgggcacctgctcccggtcaccctggctgaccaagaagctgtggtcggaggggtacagcagggccaccccagtgttggtcctgttgccaccctggtagcggatctctcgcacccgctgcaggatgtcccctttggactgtgcctcgctgaaggggtactccacggtcaccatgtaggagtactgcagcaccgtgacgtggatgctgtcctggcccacatccatccgctgaatcacctcctccatgaactccttgctcctgttgaagttggcttcaccaattttgtccgatccttccaggacaaatgccacatccagaaccatggagttcctcttgggccccagggtcgaaagccccaagagccccgggcccacagtgacttgtgccatgtgggggggcagagtaggaggaggggcgtcaggggcaaggtcacagaggtagctaacgatctcttccctttgctgctccagctcatccacaccgctcagcacgaaggccttgttctcagg

SEQ ID NO: 438453 - DNA, 406 bp, Homo sapiens
attgtactccagtctgaaaacagcaagaccccgtctctaaaaaattaaaaaaaatatacaacataaacctaaactataaaacagcaatggttccaggtaatgttggccgtgacatttaaagaacaaaattgcttatgaagttgagatggttgccaaattgtaaattcctaactcagggctttgaaaaatcaattgtaggaaagaatctttgacaatttggctacagaaaaaaggaatgattcttttaaaattgtatgcagatggattcactgaaatgcaaaggttgtaataaaacaatttttaaatgttggatcaacagatagtgtaacaaagcaccttgaaacagtattcaccaaataataaaaagctcaactttttattgataaataaaattcgatctaaaata

SEQ ID NO: 438454 - DNA, 1246 bp, Homo sapiens
gtaaaatagagcagattcttaatatattttaaagatagaaccaacagaattttatgatagattagatctagtgtttgaaagaaacgactcaaaggttttggcctgaaaaactggaaggatggagttactatcaactgaagtgagaaagttctgtggggaactggtttgtggggactcctgactggcattcaggagtttaaatttggaaatgttcagtttgagatatctatgagacagccaacttaagatgttgaggtgactgttggatatttgaatccagagtttgggaaagaggtctgtaatatcccttggtatgtgttaaaatccttaggccagtacatacagttcacttatttaatcagattgttaagataatagttttctccttatcctatatgtagagccaatacaatttatttttcaccttaggagttagaaaagaggaacaaattcaaccccaaataagtaggaaataagaaatttcatgaaatagggaaacaaacaatgggagaaattttaaaagtgaaaagttggccttttgaaaaggtaaataaattgataaaccccaagcaagacttaccaagtgtattagcctgttctcacactgttgtaaagaactacctgagactgggtaatttatgaagaaaagagatttaattgactcacaggcccacaggcttaacaggaagcatgactgggagtcctcagtaaacttacagtcatggcagaaggtgaagggcaagcaagcacctttttcacatgatggcaggagagagagtgacaatgaggggggaaatgccacacatgtttaaaccatcagatctcatgagaactcactatcacaagaacagcaagggggaaattggcccctgtgatccaatggtcccccaccaaacccctcccccaattcaacatgagatttgggcaaggatgcaaatccaaactatatcacccaagaaaaaaagtgaaaacataaattatcccacatcacaaatgaaaagagggcatcagtttagaccctacatatattaaaagtaaagtgggtatggaaaacttcattgacaagccgcaacttgatgaaattgacaaatactttaaaagacacagtttaccaaaactgacacaagaagaaatagaaaatcttaaggaactccatatctactacagagattgaatttgtaataaaaaattttctaacaaaaaaactctaggcccatagtagcagtaaattttatcaaccattcaa

SEQ ID NO: 438455 - DNA, 5714 bp, Homo sapiens
cggccgcggcggtagcgcggaaaacaatggggccggggcggtggggagaggccgaggcttgaggtaggcagcaagcgccggctgggggtcgggccgagcggggcaggaggaaaacccgccgccgcgcgcgagcccgctccgctgccctcgggggcatggcgcggccgtgaggcggagaggggtagccgcggggagcgaagcccgcagtgccagccggccccgagaggcccggccccgggcccggcccgtgcagcccgcggcccatggtgctgcccacctgccccatggcggagttcgcgctgccgcggcacagcgcggtcatggagcgccttcgccggcgcatcgagctgtgccggcgccaccacagcacctgcgaggcccgctacgaggccgtgtcgcccgagcgcctggagctggagcgccaacacaccttcgccctgcaccagcgctgcatccaggccaaggccaagcgcgccgggaagcacaggcagccgcccgccgccacggccccggcgcccgccgccccggccccgcgcctggacgccgctgacggccccgagcacggccgcccggccacgcatcttcatgatacagttaagaggaatcttgacagcgccacttcccctcagaatggcgatcaacagaatggctacggggacctctttcctgggcataagaagactcgccgggaggcccctctgggagttgccatctcttccaatggactgcctccagcctcccccctcggtcagtctgacaagccttctggagccgacgccctgcagtccagtgggaagcactctctggggctagactctctcaacaaaaagcgtctggctgactccagccttcacttgaatggaggcagtaaccccagtgagtcatttcctctgagcctgaataaagaactgaagcaggagcctgtcgaagacctgccttgcatgatcactgggactgtcggctccatatcgcaaagcaacctcatgccagacctcaaccttaacgagcaggagtggaaggagctcatcgaggagctgaacaggtcggtgcccgatgaagacatgaaggacctgtttaatgaggacttcgaggagaagaaggacccagagtcttctggctctgccacacaaacccccttggcacaggacattaatattaagacggaattctctccagcagcctttgagcaagaacagttaggctctccacaagtgagggccgggtctgcagggcagacctttctggggccttcctctgcccctgtgagtacagattcccccagcctagggggctcccaaaccttattccacacctctggtcagccccgggcggacaatcccagtccaaacctgatgccggcatcagcccaggcccagaacgcacaaagagcccttgcaggtgtggtattgcccagtcagggcccaggaggggcctcagagctgtcctctgcccaccagctccagcagatcgctgccaagcagaagcgcgagcagatgctccagaacccacagcaggccaccccggcaccagccccgggccagatgtccacatggcagcagacggggccctcccacagttccttagatgtcccttaccccatggagaagcctgccagcccttccagctacaagcaagacttcactaactccaaactgctcatgatgcctagtgtgaataagagttcccctcggcccggaggcccctacctccagcccagccatgtgaacctgctgagtcaccagccaccgagtaacttgaatcagaactccgcgaataaccaggggtctgtgctggactacggcaatacaaaacccctttctcattacaaagcggactgtgggcaaggcagcccggggtctggccagagcaagccagccctgatggcttatcttccccagcagctgtcccatataagtcacgagcagaactccctgtttctgatgaagccaaagccaggaaatatgcctttccgatcactggttccacctggccaggagcagaacccttccagtgtccctgtgcaagcccaggctaccagtgttgggacccagccgcctgccgtgtccgtggccagctcccacaacagctccccctatctcagcagccagcaacaggccgctgtaatgaagcagcatcagttgcttttggaccaacagaaacaaagggagcagcagcaaaagcatttacagcaacagcagttccttcagaggcaacagcaccttctcgcggaacaggagaagcaacagtttcagcgccatctgacccgcccaccaccccagtaccaagacccgacacaaggcagcttcccacagcaggttggacagttcacagggtcctctgctgccgtgcccggcatgaacaccttgggtccatccaactccagctgtcctcgagtgttccctcaggctgggaatctgatgccaatgggccctggacatgcttcagtttcctctctccccacaaactcaggccaacaggaccggggtgtggctcagttccctggctcccaaaacatgcctcagagcagcctctatggcatggcttctggcataacccagatagttgcccagcccccgccacaggccaccaatggacatgcccacattccacggcagaccaacgtgggccagaacacctccgtctcagctgcctatgggcagaactctctgggaagctctggcctctcccagcagcacaataaggggaccctgaaccctggtttaacaaagccaccggtcccaagggtgtcaccagccatgggaggccagaattcctcctggcagcatcagggaatgccgaacctcagtggccagaccccagggaacagcaacgtgagtcccttcactgcagcctccagtttccacatgcagcagcaggcccacctgaaaatgtctagcccgcaattctcccaggcagtgcccaacaggcccatggctcccatgagctcagcagctgccgtggggtccttgctacccccagtgagtgcacagcagaggaccagcgcccctgccccagcaccacccccaacagcccctcagcagggcttgcctggcctgagcccagcagggcctgagctgggggccttcagccagagccctgcctcacagatgggcggtcgggcggggctgcactgcacccaggcctaccctgtgcggaccgcgggccaggagctgccttttgcctatagcgggcagccaggtggcagtgggctctctagtgtggctggacacaccgatctgatcgactccctgctgaagaacaggacttcagaggagtggatgagtgatttggacgacctgttagggtctcagtaatggaaggatttgtagtgtttttagtgttcattcatcctatatttttattctcagattcaaagaaagagcaactactttggaccaaaagcccatggcctggggagctgggcaggtagagcccaagctccaggtgaggcctggccctgggcagggtctgtggctgcgcccctcaggccagcagttgaggtccatcgggctggccccagcccatctgctggcatcagtacctggtgttgggacagcaggatagggttctaaaggtggttttctatccaaacgaccaaaaaaccaacagtaacaccagtgaaaccccacactgtcgggcttataaaaatctgtgccatcatggtgattttatccaagactgctccacttaccccagtgctggggacaagtttctgttgaaactttagatagcagaattatttgcaatttgtagcatagaaaagatttttaaatttttttacaaaaggtttttaaacagattagggtaggtgatggtttaaatcaattaagtggcattggaaacctagggtttccttttgattaagagccttttttgtttctgctctttgtcagctttcaggggagaaggaggccactggaaaattatttccctaagtgcaggctgttgactgcgtatgccaaaaagggacaggaggcatgggatagcaggtctggtgacacagctagggtcttcctagcagctcctcctcctccctcccaaggcccccaggaatcccttcctcccatgtcctggcagcaggaccccaggctacatatggaaggtagagatgtgggggtcctgtatcctggagtattatgtctccccaccttctgcagttttctctgaacatgtatgttgcccatggtgggagcgtggtcactgtgcagttgtgcacagatgtctttcctttaccgttggcctttctgtctgcctctccttcctctctgcagcccaaatggaaaacaattatttactccattggagggaaaggaagagtcttagaattcctaagggaaccttagcataaaggttttggggaaggaggccgtaggccggcccggaggaagcaattccacttggtttgacaacttctgccactcccatgtcagatgacttgcacttcttaaagagattgctttataacactaagacatcctttctaaagattcaagtggacttgactaagctgagggtccacgaaatagaatatgacatgtgagctgtttttggaaaacgaagatggagagagcacttccccgtaacgaaagcaaagtggtaagcacagggtgagacccttttacacagaatggtggagagaaaagagaatgctgaaaagtggctcagatgcagagtgttctgtggagaaactgcagccccacttctgtttccctggagtctcccaatggatcattcaggagtgtcctatgtgagaattgagccaaggaaaatactcatgcaaccagcctgagtcgcggtgaggggacgagaggttgtacacacattggtagttattttgcaccagcagtgcctttctcactgggggtacttggaccctcagatcttcttttctaatagccatttgccaccccaagtggtatgtcggccatttctccttaaaacaccttccctacctttcccatgtactcagtttagctctcaaagaaggggtgaatcataaagccagtgaaaatttcaccctctgagggagttccccaatctgaaggggaagagggtgacctcagcggcttttctcccaaaaatcggctgaaggctggttgtggatccttgttcctctcctgaccccatctggctgctgccccgtctcccacccctgtccccggggctcgctggccctgcactccgccttagtcctggggccggcgacacagtgggggctcctcacttgctgcagtgtcatagcaataaaatgtgattcttggggtccccccagggagctgcccatggctttatttatgaacctggttttcgggagtcaggggaggagatgactttgcttctgtgcacagccccgtcttccaggagccacgactcagaagaaaagggtgctcagacttttgttatacacatttgctttgtgtaaataaatgtttacaattttatatgaaagatggaataagcgctagagcttccaactgtatattttttacttttatagattttaaaactatgatcctttatatgtgtgttttgggggagctatgataagttttatggcaaacggttggtattgttaactttttattgtcatcaaaagttcataaaagtcctattaatccccatattcttctactgcccttaactctggtatacaccaaaaagaaatctttactttccttgttttatcattataaaaataaagtattttgctagta

SEQ ID NO: 438456 - DNA, 392 bp, Homo sapiens
tggcccgctctgcactcagatgtcctgataagtgagcatttctaagcctcgattgcttactggaactattgtgtgcaaatatgaaagcttacatatgcttaacgtaaaaccatacctttgtcactggtgaatcactgggagtaaaactaacacctatggagtaattgttcgttgctaggcgcctgtatgctcagatgtcatcacttttggtctgtgctccagccctgtgggatggttgttattcgaggtcagaagggaagcagagacttggcttcaagagagtgaaccttgaattcactggatggagcttatttggtctgatcagagatttagacgacaggagcttttcccaggtcagaacgcctttagcatgtgcagcagctttgcctcca

SEQ ID NO: 438457 - DNA, 4083 bp, Homo sapiens
tggcccgctctgcactcagatgtcctgataagtgagcatttctaagcctcgattgcttactggaactattgtgtgcaaatatgaaagcttacatatgcttaacgtaaaaccatacctttgtcactggtgaatcactgggagtaaaactaacacctatggagtaattgttcgttgctaggcgcctgtatgctcagatgtcatcacttttggtctgtgctccagccctgtgggatggttgttattcgaggtcagaagggaagcagagacttggcttcaagagagtgaaccttgaattcactggatggagcttatttggtctgatcagagcttagagacttcacagtcccctatctgtgttgacaggagcagaacccttccagtgtccctgtgcaagcccaggctaccagtgttgggacccagccgcctgccgtgtccgtggccagctcccacaacagctccccctatctcagcagccagcaacaggccgctgtaatgaagcagcatcagttgcttttggaccaacagaaacaaagggagcagcagcaaaagcatttacagcaacagcagttccttcagaggcaacagcaccttctcgcggaacaggagaagcaacagtttcagcgccatctgacccgcccaccaccccagtaccaagacccgacacaaggcagcttcccacagcaggttggacagttcacagggtcctctgctgccgtgcccggcatgaacaccttgggtccatccaactccagctgtcctcgagtgttccctcaggctgggaatctgatgccaatgggccctggacatgcttcagtttcctctctccccacaaactcaggccaacaggaccggggtgtggctcagttccctggctcccaaaacatgcctcagagcagcctctatggcatggcttctggcataacccagatagttgcccagcccccgccacaggccaccaatggacatgcccacattccacggcagaccaacgtgggccagaacacctccgtctcagctgcctatgggcagaactctctgggaagctctggcctctcccagcagcacaataaggggaccctgaaccctggtttaacaaagccaccggtcccaagggtgtcaccagccatgggaggccagaattcctcctggcagcatcagggaatgccgaacctcagtggccagaccccagggaacagcaacgtgagtcccttcactgcagcctccagtttccacatgcagcagcaggcccacctgaaaatgtctagcccgcaattctcccaggcagtgcccaacaggcccatggctcccatgagctcagcagctgccgtggggtccttgctacccccagtgagtgcacagcagaggaccagcgcccctgccccagcaccacccccaacagcccctcagcagggcttgcctggcctgagcccagcagggcctgagctgggggccttcagccagagccctgcctcacagatgggcggtcgggcggggctgcactgcacccaggcctaccctgtgcggaccgcgggccaggagctgccttttgcctatagcgggcagccaggtggcagtgggctctctagtgtggctggacacaccgatctgatcgactccctgctgaagaacaggacttcagaggagtggatgagtgatttggacgacctgttagggtctcagtaatggaaggatttgtagtgtttttagtgttcattcatcctatatttttattctcagattcaaagaaagagcaactactttggaccaaaagcccatggcctggggagctgggcaggtagagcccaagctccaggtgaggcctggccctgggcagggtctgtggctgcgcccctcaggccagcagttgaggtccatcgggctggccccagcccatctgctggcatcagtacctggtgttgggacagcaggatagggttctaaaggtggttttctatccaaacgaccaaaaaaccaacagtaacaccagtgaaaccccacactgtcgggcttataaaaatctgtgccatcatggtgattttatccaagactgctccacttaccccagtgctggggacaagtttctgttgaaactttagatagcagaattatttgcaatttgtagcatagaaaagatttttaaatttttttacaaaaggtttttaaacagattagggtaggtgatggtttaaatcaattaagtggcattggaaacctagggtttccttttgattaagagccttttttgtttctgctctttgtcagctttcaggggagaaggaggccactggaaaattatttccctaagtgcaggctgttgactgcgtatgccaaaaagggacaggaggcatgggatagcaggtctggtgacacagctagggtcttcctagcagctcctcctcctccctcccaaggcccccaggaatcccttcctcccatgtcctggcagcaggaccccaggctacatatggaaggtagagatgtgggggtcctgtatcctggagtattatgtctccccaccttctgcagttttctctgaacatgtatgttgcccatggtgggagcgtggtcactgtgcagttgtgcacagatgtctttcctttaccgttggcctttctgtctgcctctccttcctctctgcagcccaaatggaaaacaattatttactccattggagggaaaggaagagtcttagaattcctaagggaaccttagcataaaggttttggggaaggaggccgtaggccggcccggaggaagcaattccacttggtttgacaacttctgccactcccatgtcagatgacttgcacttcttaaagagattgctttataacactaagacatcctttctaaagattcaagtggacttgactaagctgagggtccacgaaatagaatatgacatgtgagctgtttttggaaaacgaagatggagagagcacttccccgtaacgaaagcaaagtggtaagcacagggtgagacccttttacacagaatggtggagagaaaagagaatgctgaaaagtggctcagatgcagagtgttctgtggagaaactgcagccccacttctgtttccctggagtctcccaatggatcattcaggagtgtcctatgtgagaattgagccaaggaaaatactcatgcaaccagcctgagtcgcggtgaggggacgagaggttgtacacacattggtagttattttgcaccagcagtgcctttctcactgggggtacttggaccctcagatcttcttttctaatagccatttgccaccccaagtggtatgtcggccatttctccttaaaacaccttccctacctttcccatgtactcagtttagctctcaaagaaggggtgaatcataaagccagtgaaaatttcaccctctgagggagttccccaatctgaaggggaagagggtgacctcagcggcttttctcccaaaaatcggctgaaggctggttgtggatccttgttcctctcctgaccccatctggctgctgccccgtctcccacccctgtccccggggctcgctggccctgcactccgccttagtcctggggccggcgacacagtgggggctcctcacttgctgcagtgtcatagcaataaaatgtgattcttggggtccccccagggagctgcccatggctttatttatgaacctggttttcgggagtcaggggaggagatgactttgcttctgtgcacagccccgtcttccaggagccacgactcagaagaaaagggtgctcagacttttgttatacacatttgctttgtgtaaataaatgtttacaattttatatgaaagatggaataagcgctagagcttccaactgtatattttttacttttatagattttaaaactatgatcctttatatgtgtgttttgggggagctatgataagttttatggcaaacggttggtattgttaactttttattgtcatcaaaagttcataaaagtcctattaatccccatattcttctactgcccttaactctggtatacaccaaaaagaaatctttactttccttgttttatcattataaaaataaagtattttgctagta

SEQ ID NO: 438458 - DNA, 4982 bp, Homo sapiens
cggccgcggcggtagcgcggaaaacaatggggccggggcggtggggagaggccgaggcttgaggtaggcagcaagcgccggctgggggtcgggccgagcggggcaggaggaaaacccgccgccgcgcgcgagcccgctccgctgccctcgggggcatggcgcggccgtgaggcggagaggggtagccgcggggagcgaagcccgcagtgccagccggccccgagaggcccggccccgggcccggcccgtgcagcccgcggcccatggtgctgcccacctgccccatggcggagttcgcgctgccgcggcacagcgcggtcatggagcgccttcgccggcgcatcgagctgtgccggcgccaccacagcacctgcgaggcccgctacgaggccgtgtcgcccgagcgcctggagctggagcgccaacacaccttcgccctgcaccagcgctgcatccaggccaaggccaagcgcgccgggaagcacaggcagccgcccgccgccacggccccggcgcccgccgccccggccccgcgcctggacgccgctgacggccccgagcacggccgcccggccacgcatcttcatgatacagttaagaggaatcttgacagcgccacttcccctcagaatggcgatcaacagaatggctacggggacctctttcctgggcataagaagactcgccgggaggcccctctgggagttgccatctcttccaatggactgcctccagcctcccccctcggtcagtctgacaagccttctggagccgacgccctgcagtccagtgggaagcactctctggggctagactctctcaacaaaaagcgtctggctgactccagccttcacttgaatggaggcagtaaccccagtgagtcatttcctctgagcctgaataaagaactgaagcaggagcctgtcgaagacctgccttgcatgatcactgggactgtcggctccatatcgcaaagcaacctcatgccagacctcaaccttaacgagcaggagtggaaggagctcatcgaggagctgaacaggtcggtgcccgatgaagacatgaaggacctgtttaatgaggacttcgaggagaagaaggacccagagtcttctggctctgccacacaaacccccttggcacaggacattaatattaagacggaattctctccagcagcctttgagcaagaacagttaggctctccacaagtgagggccgggtctgcagggcagacctttctggggccttcctctgcccctgtgagtacagattcccccagcctagggggctcccaaaccttattccacacctctggtcagccccgggcggacaatcccagtccaaacctgatgccggcatcagcccaggcccagaacgcacaaagagcccttgcaggtgtggtattgcccagtcagggcccaggaggggcctcagagctgtcctctgcccaccagctccagcagatcgctgccaagcagaagcgcgagcagatgctccagaacccacagcaggccaccccggcaccagccccgggccagatgtccacatggcagcagacggggccctcccacagttccttagatgtcccttaccccatggagaagcctgccagcccttccagctacaagcaagacttcactaactccaaactgctcatgatgcctagtgtgaataagagttcccctcggcccggaggcccctacctccagcccagccatgtgaacctgctgagtcaccagccaccgagtaacttgaatcagaactccgcgaataaccaggggtctgtgctggactacggcaatacaaaacccctttctcattacaaagcggactgtgggcaaggcagcccggggtctggccagagcaagccagccctgatggcttatcttccccagcagctgtcccatataagtcacgagcagaactccctgtttctgatgaagccaaagccaggaaatatgcctttccgatcactggttccacctggccaggagcagaacccttccagtgtccctgtgcaagcccaggctaccagtgttgggacccagccgcctgccgtgtccgtggccagctcccacaacagctccccctatctcagcagccagcaacaggccgctgtaatgaagcagcatcagttgcttttggaccaacagaaacaaagggagcagcagcaaaagcatttacagcaacagcagttccttcagaggcaacagcaccttctcgcggaacaggagaagcaacagtttcagcgccatctgacccgcccaccaccccagtaccaagacccgacacaaggcagcttcccacagcaggttggacagttcacagggtcctctgctgccgtgcccggcatgaacaccttgggtccatccaactccagctgtcctcgagtgttccctcaggctgggaatctgatgccaatgggccctggacatgcttcagtttcctctctccccacaaactcaggccaacaggaccggggtgtggctcagttccctggctcccaaaacatgcctcagagcagcctctatggcatggcttctggcataacccagatagttgcccagcccccgccacaggccaccaatggacatgcccacattccacggcagaccaacgtgggccagaacacctccgtctcagctgcctatgggcagaactctctgggaagctctggcctctcccagcagcacaataaggggaccctgaaccctggtttaacaaagccaccggtcccaagggtgtcaccagccatgggaggccagaattcctcctggcagcatcagggaatgccgaacctcagtggccagaccccagggaacagcaacgtgagtcccttcactgcagcctccagtttccacatgcagcagcaggcccacctgaaaatgtctagcccgcaattctcccaggcagtgcccaacaggcccatggctcccatgagctcagcagctgccgtggggtccttgctacccccagtgagtgcacagcagaggaccagcgcccctgccccagcaccacccccaacagcccctcagcagggcttgcctggcctgagcccagcagggcctgagctgggggccttcagccagagccctgcctcacagatgggcggtcgggcggggctgcactgcacccaggcctaccctgtgcggaccgcgggccaggagctgccttttgcctatagcgggcagccaggtggcagtgggctctctagtgtggctggacacaccgatctgatcgactccctgctgaagaacaggacttcagaggagtggatgagtgatttggacgacctgttagggtctcagtaatggaaggatttgtagtgtttttagtgttcattcatcctatatttttattctcagattcaaagaaagagcaactactttggaccaaaagcccatggcctggggagctgggcaggtagagcccaagctccaggtgaggcctggccctgggcagggtctgtggctgcgcccctcaggccagcagttgaggtccatcgggctggccccagcccatctgctggcatcagtacctggtgttgggacagcaggatagggttctaaaggtggttttctatccaaacgaccaaaaaaccaacagtaacaccagtgaaaccccacactgtcgggcttataaaaatctgtgccatcatggtgattttatccaagactgctccacttaccccagtgctggggacaagtttctgttgaaactttagatagcagaattatttgcaatttgtagcatagaaaagatttttaaatttttttacaaaaggtttttaaacagattagggtaggtgatggtttaaatcaattaagtggcattggaaacctagggtttccttttgattaagagccttttttgtttctgctctttgtcagctttcaggggagaaggaggccactggaaaattatttccctaagtgcaggctgttgactgcgtatgccaaaaagggacaggaggcatgggatagcaggtctggtgacacagctagggtcttcctagcagctcctcctcctccctcccaaggcccccaggaatcccttcctcccatgtcctggcagcaggaccccaggctacatatggaaggtagagatgtgggggtcctgtatcctggagtattatgtctccccaccttctgcagttttctctgaacatgtatgttgcccatggtgggagcgtggtcactgtgcagttgtgcacagatgtctttcctttaccgttggcctttctgtctgcctctccttcctctctgcagcccaaatggaaaacaattatttactccattggagggaaaggaagagtcttagaattcctaagggaaccttagcataaaggttttggggaaggaggccgtaggccggcccggaggaagcaattccacttggtttgacaacttctgccactcccatgtcagatgacttgcacttcttaaagagattgctttataacactaagacatcctttctaaagattcaagtggacttgactaagctgagggtccacgaaatagaatatgacatgtgagctgtttttggaaaacgaagatggagagagcacttccccgtaacgaaagcaaagtggtaagcacagggtgagacccttttacacagaatggtggagagaaaagagaatgctgaaaagtggctcagatgcagagtgttctgtggagaaactgcagccccacttctgtttccctggagtctcccaatggatcattcaggagtgtcctatgtgagaattgagccaaggaaaatactcatgcaaccagcctgagtcgcggtgaggggacgagaggttgtacacacattggtagttattttgcaccagcagtgcctttctcactgggggtacttggaccctcagatcttcttttctaatagccatttgccaccccaagtggtatgtcggccatttctccttaaaacaccttcgcccgtagtcagtgagatcctgtagagtgacctcg

SEQ ID NO: 438459 - DNA, 4598 bp, Homo sapiens
cggccgcggcggtagcgcggaaaacaatggggccggggcggtggggagaggccgaggcttgaggtaggcagcaagcgccggctgggggtcgggccgagcggggcaggaggaaaacccgccgccgcgcgcgagcccgctccgctgccctcgggggcatggcgcggccgtgaggcggagaggggtagccgcggggagcgaagcccgcagtgccagccggccccgagaggcccggccccgggcccggcccgtgcagcccgcggcccatggtgctgcccacctgccccatggcggagttcgcgctgccgcggcacagcgcggtcatggagcgccttcgccggcgcatcgagctgtgccggcgccaccacagcacctgcgaggcccgctacgaggccgtgtcgcccgagcgcctggagctggagcgccaacacaccttcgccctgcaccagcgctgcatccaggccaaggccaagcgcgccgggaagcacaggcagccgcccgccgccacggccccggcgcccgccgccccggccccgcgcctggacgccgctgacggccccgagcacggccgcccggccacgcatcttcatgatacagttaagaggaatcttgacagcgccacttcccctcagaatggcgatcaacagaatggctacggggacctctttcctgggcataagaagactcgccgggaggcccctctgggagttgccatctcttccaatggactgcctccagcctcccccctcggtcagtctgacaagccttctggagccgacgccctgcagtccagtgggaagcactctctggggctagactctctcaacaaaaagcgtctggctgactccagccttcacttgaatggaggcagtaaccccagtgagtcatttcctctgagcctgaataaagaactgaagcaggagcctgtcgaagacctgccttgcatgatcactgggactgtcggctccatatcgcaaagcaacctcatgccagacctcaaccttaacgagcaggagtggaaggagctcatcgaggagctgaacaggtcggtgcccgatgaagacatgaaggacctgtttaatgaggacttcgaggagaagaaggacccagagtcttctggctctgccacacaaacccccttggcacaggacattaatattaagacggaattctctccagcagcctttgagcaagaacagttaggctctccacaagtgagggccgggtctgcagggcagacctttctggggccttcctctgcccctgtgagtacagattcccccagcctagggggctcccaaaccttattccacacctctggtcagccccgggcggacaatcccagtccaaacctgatgccggcatcagcccaggcccagaacgcacaaagagcccttgcaggtgtggtattgcccagtcagggcccaggaggggcctcagagctgtcctctgcccaccagctccagcagatcgctgccaagcagaagcgcgagcagatgctccagaacccacagcaggccaccccggcaccagccccgggccagatgtccacatggcagcagacggggccctcccacagttccttagatgtcccttaccccatggagaagcctgccagcccttccagctacaagcaagacttcactaactccaaactgctcatgatgcctagtgtgaataagagttcccctcggcccggaggcccctacctccagcccagccatgtgaacctgctgagtcaccagccaccgagtaacttgaatcagaactccgcgaataaccaggggtctgtgctggactacggcaatacaaaacccctttctcattacaaagcggactgtgggcaaggcagcccggggtctggccagagcaagccagccctgatggcttatcttccccagcagctgtcccatataagtcacgagcagaactccctgtttctgatgaagccaaagccaggaaatatgcctttccgatcactggttccacctggccaggagcagaacccttccagtgtccctgtgcaagcccaggctaccagtgttgggacccagccgcctgccgtgtccgtggccagctcccacaacagctccccctatctcagcagccagcaacaggccgctgtaatgaagcagcatcagttgcttttggaccaacagaaacaaagggagcagcagcaaaagcatttacagcaacagcagttccttcagaggcaacagcaccttctcgcggaacaggagaagcaacagtttcagcgccatctgacccgcccaccaccccagtaccaagacccgacacaaggcagcttcccacagcaggttggacagttcacagggtcctctgctgccgtgcccggcatgaacaccttgggtccatccaactccagctgtcctcgagtgttccctcaggctgggaatctgatgccaatgggccctggacatgcttcagtttcctctctccccacaaactcaggccaacaggaccggggtgtggctcagttccctggctcccaaaacatgcctcagagcagcctctatggcatggcttctggcataacccagatagttgcccagcccccgccacaggccaccaatggacatgcccacattccacggcagaccaacgtgggccagaacacctccgtctcagctgcctatgggcagaactctctgggaagctctggcctctcccagcagcacaataaggggaccctgaaccctggtttaacaaagccaccggtcccaagggtgtcaccagccatgggaggccagaattcctcctggcagcatcagggaatgccgaacctcagtggccagaccccagggaacagcaacgtgagtcccttcactgcagcctccagtttccacatgcagcagcaggcccacctgaaaatgtctagcccgcaattctcccaggcagtgcccaacaggcccatggctcccatgagctcagcagctgccgtggggtccttgctacccccagtgagtgcacagcagaggaccagcgcccctgccccagcaccacccccaacagcccctcagcagggcttgcctggcctgagcccagcagggcctgagctgggggccttcagccagagccctgcctcacagatgggcggtcgggcggggctgcactgcacccaggcctaccctgtgcggaccgcgggccaggagctgccttttgcctatagcgggcagccaggtggcagtgggctctctagtgtggctggacacaccgatctgatcgactccctgctgaagaacaggacttcagaggagtggatgagtgatttggacgacctgttagggtctcagtaatggaaggatttgtagtgtttttagtgttcattcatcctatatttttattctcagattcaaagaaagagcaactactttggaccaaaagcccatggcctggggagctgggcaggtagagcccaagctccaggtgaggcctggccctgggcagggtctgtggctgcgcccctcaggccagcagttgaggtccatcgggctggccccagcccatctgctggcatcagtacctggtgttgggacagcaggatagggttctaaaggtggttttctatccaaacgaccaaaaaaccaacagtaacaccagtgaaaccccacactgtcgggcttataaaaatctgtgccatcatggtgattttatccaagactgctccacttaccccagtgctggggacaagtttctgttgaaactttagatagcagaattatttgcaatttgtagcatagaaaagatttttaaatttttttacaaaaggtttttaaacagattagggtaggtgatggtttaaatcaattaagtggcattggaaacctagggtttccttttgattaagagccttttttgtttctgctctttgtcagctttcaggggagaaggaggccactggaaaattatttccctaagtgcaggctgttgactgcgtatgccaaaaagggacaggaggcatgggatagcaggtctggtgacacagctagggtcttcctagcagctcctcctcctccctcccaaggcccccaggaatcccttcctcccatgtcctggcagcaggaccccaggctacatatggaaggtagagatgtgggggtcctgtatcctggagtattatgtctccccaccttctgcagttttctctgaacatgtatgttgcccatggtgggagcgtggtcactgtgcagttgtgcacagatgtctttcctttaccgttggcctttctgtctgcctctccttcctctctgcagcccaaatggaaaacaattatttactccattggagggaaaggaagagtcttagaattcctaagggaaccttagcataaaggttttggggaaggaggccgtaggccggcccggaggaagcaattccacttggtttgacaacttctgccactcccatgtcagatgacttgcacttcttaaagagattgctttataacactaagacatcctttctaaagattcaagtggacttgactaagctgagggtccacgaaatagaatatgacatgtgagctgtttttggaaaacgaagatgagacctccgtacgaagcaaggactcactgcctgtc

SEQ ID NO: 438460 - DNA, 822 bp, Homo sapiens
tggcccgctctgcactcagatgtcctgataagtgagcatttctaagcctcgattgcttactggaactattgtgtgcaaatatgaaagcttacatatgcttaacgtaaaaccatacctttgtcactggtgaatcactgggagtaaaactaacacctatggagtaattgttcgttgctaggcgcctgtatgctcagatgtcatcacttttggtctgtgctccagccctgtgggatggttgttattcgaggtcagaagggaagcagagacttggcttcaagagagtgaaccttgaattcactggatggagcttatttggtctgatcagagcttagagacttcacagtcccctatctgtgttgacaggagcagaacccttccagtgtccctgtgcaagcccaggctaccagtgttgggacccagccgcctgccgtgtccgtggccagctcccacaacagctccccctatctcagcaccacgactcagaagaaaagggtgctcagacttttgttatacacatttgctttgtgtaaataaatgtttacaattttatatgaaagatggaataagcgctagagcttccaactgtatattttttacttttatagattttaaaactatgatcctttatatgtgtgttttgggggagctatgataagttttatggcaaacggttggtattgttaactttttattgtcatcaaaagttcataaaagtcctattaatccccatattcttctactgcccttaactctggtatacaccaaaaagaaatctttactttccttgttttatcattataaaaataaagtattttgctagta

SEQ ID NO: 438461 - DNA, 2803 bp, Homo sapiens
cggccgcggcggtagcgcggaaaacaatggggccggggcggtggggagaggccgaggcttgaggtaggcagcaagcgccggctgggggtcgggccgagcggggcaggaggaaaacccgccgccgcgcgcgagcccgctccgctgccctcgggggcatggcgcggccgtgaggcggagaggggtagccgcggggagcgaagcccgcagtgccagccggccccgagaggcccggccccgggcccggcccgtgcagcccgcggcccatggtgctgcccacctgccccatggcggagttcgcgctgccgcggcacagcgcggtcatggagcgccttcgccggcgcatcgagctgtgccggcgccaccacagcacctgcgaggcccgctacgaggccgtgtcgcccgagcgcctggagctggagcgccaacacaccttcgccctgcaccagcgctgcatccaggccaaggccaagcgcgccgggaagcacaggcagccgcccgccgccacggccccggcgcccgccgccccggccccgcgcctggacgccgctgacggccccgagcacggccgcccggccacgcatcttcatgatacagttaagaggaatcttgacagcgccacttcccctcagaatggcgatcaacagaatggctacggggacctctttcctgggcataagaagactcgccgggaggcccctctgggagttgccatctcttccaatggactgcctccagcctcccccctcggtcagtctgacaagccttctggagccgacgccctgcagtccagtgggaagcactctctggggctagactctctcaacaaaaagcgtctggctgactccagccttcacttgaatggaggcagtaaccccagtgagtcatttcctctgagcctgaataaagaactgaagcaggagcctgtcgaagacctgccttgcatgatcactgggactgtcggctccatatcgcaaagcaacctcatgccagacctcaaccttaacgagcaggagtggaaggagctcatcgaggagctgaacaggtcggtgcccgatgaagacatgaaggacctgtttaatgaggacttcgaggagaagaaggacccagagtcttctggctctgccacacaaacccccttggcacaggacattaatattaagacggaattctctccagcagcctttgagcaagaacagttaggctctccacaagtgagggccgggtctgcagggcagacctttctggggccttcctctgcccctgtgagtacagattcccccagcctagggggctcccaaaccttattccacacctctggtcagccccgggcggacaatcccagtccaaacctgatgccggcatcagcccaggcccagaacgcacaaagagcccttgcaggtgtggtattgcccagtcagggcccaggaggggcctcagagctgtcctctgcccaccagctccagcagatcgctgccaagcagaagcgcgagcagatgctccagaacccacagcaggccaccccggcaccagccccgggccagatgtccacatggcagcagacggggccctcccacagttccttagatgtcccttaccccatggagaagcctgccagcccttccagctacaagcaagacttcactaactccaaactgctcatgatgcctagtgtgaataagagttcccctcggcccggaggcccctacctccagcccagccatgtgaacctgctgagtcaccagccaccgagtaacttgaatcagaactccgcgaataaccaggggtctgtgctggactacggcaatacaaaacccctttctcattacaaagcggactgtgggcaaggcagcccggggtctggccagagcaagccagccctgatggcttatcttccccagcagctgtcccatataagtcacgagcagaactccctgtttctgatgaagccaaagccaggaaatatgcctttccgatcactggttccacctggccaggtaagtatgagcctttgctttctgttcctctgctgcagacacttcagtgaggttactcactactttggatgttaattggatccgaggtagttgtgggaagagggaggagggaatagctgctgtcatccttgctcctcttgggagtggaaatttataaaataaaccagggttgattgttaataaaaaatagggtaaagttccctggcatagcttgattattaactgcatgaaggtttcaggaatcacctgcatttagtccactgtctctttcgtgccgtaggatttaaattaagtaatttgcgactgtgttttgcagataaacattacgtttcacgtgcttcttagaggcttggcttttttttttttttttttactacctttcagatctccatgtacaaaattccctaatttttggtaagcttataacattgtaggcatgtgctgcttcccagcacagctcagctctgtgcttacttcatcatggttctaaagcccggtagcatcaaatggaaaatggcccttcgggttgtttcctgttttccgctagtgcagataagcctgcagtgaacgtgaatttgtaatacatgctaaaattttgcaaattaaaaagcccagtgccggtaatatcatgaggaaatagacacactcctgtattgatgagagtgtgtaaatgagctcactgcttttgggaagtcatttgacattatgtatttttcacatgctgtaaaatgttcatatgcattgacacactatatacccgacaagttgatctaaagaaataatccaaaatgaaagaaaaagttatatcc

SEQ ID NO: 438462 - DNA, 2403 bp, Homo sapiens
cggccgcggcggtagcgcggaaaacaatggggccggggcggtggggagaggccgaggcttgaggtaggcagcaagcgccggctgggggtcgggccgagcggggcaggaggaaaacccgccgccgcgcgcgagcccgctccgctgccctcgggggcatggcgcggccgtgaggcggagaggggtagccgcggggagcgaagcccgcagtgccagccggccccgagaggcccggccccgggcccggcccgtgcagcccgcggcccatggtgctgcccacctgccccatggcggagttcgcgctgccgcggcacagcgcggtcatggagcgccttcgccggcgcatcgagctgtgccggcgccaccacagcacctgcgaggcccgctacgaggccgtgtcgcccgagcgcctggagctggagcgccaacacaccttcgccctgcaccagcgctgcatccaggccaaggccaagcgcgccgggaagcacaggcagccgcccgccgccacggccccggcgcccgccgccccggccccgcgcctggacgccgctgacggccccgagcacggccgcccggccacgcatcttcatgatacagttaagaggaatcttgacagcgccacttcccctcagaatggcgatcaacagaatggctacggggacctctttcctgggcataagaagactcgccgggaggcccctctgggagttgccatctcttccaatggactgcctccagcctcccccctcggtcagtctgacaagccttctggagccgacgccctgcagtccagtgggaagcactctctggggctagactctctcaacaaaaagcgtctggctgactccagccttcacttgaatggaggcagtaaccccagtgagtcatttcctctgagcctgaataaagaactgaagcaggagcctgtcgaagacctgccttgcatgatcactgggactgtcggctccatatcgcaaagcaacctcatgccagacctcaaccttaacgagcaggagtggaaggagctcatcgaggagctgaacaggtcggtgcccgatgaagacatgaaggacctgtttaatgaggacttcgaggagaagaaggacccagagtcttctggctctgccacacaaacccccttggcacaggacattaatattaagacggaattctctccagcagcctttgagcaagaacagttaggctctccacaagtgagggccgggtctgcagggcagacctttctggggccttcctctgcccctgtgagtacagattcccccagcctagggggctcccaaaccttattccacacctctggtcagccccgggcggacaatcccagtccaaacctgatgccggcatcagcccaggcccagaacgcacaaagagcccttgcaggtgtggtattgcccagtcagggcccaggaggggcctcagagctgtcctctgcccaccagctccagcagatcgctgccaagcagaagcgcgagcagatgctccagaacccacagcaggccaccccggcaccagccccgggccagatgtccacatggcagcagacggggccctcccacagttccttagatgtcccttaccccatggagaagcctgccagcccttccagctacaagcaagacttcactaactccaaactgctcatgatgcctagtgtgaataagagttcccctcggcccggaggcccctacctccagcccagccatgtgaacctgctgagtcaccagccaccgagtaacttgaatcagaactccgcgaataaccaggggtctgtgctggactacggcaatacaaaacccctttctcattacaaagcggactgtgggcaaggcagcccggggtctggccagagcaagccagccctgatggcttatcttccccagcagctgtcccatataagtcacgagcagaactccctgtttctgatgaagccaaagccaggaaatatgcctttccgatcactggttccacctggccaggagcagaacccttccagtgtccctgtgcaagcccaggctaccagtgttgggacccagccgcctgccgtgtccgtggccagctcccacaacagctccccctatctcagcagccagcaacaggccgctgtaatgaagcagcatcagttgcttttggaccaacagaaacaaagggagcagcagcaaaagcatttacagcaacagcagttccttcagaggcaacagcaccttctcgcggaacaggagaagcaacagtttcagcgccatctgacccgcccaccaccccagtaccaagacccgacacaaggcagcttcccacagcaggttggacagttcacaggtagggggtgtctgtgtgacgagcagggacaggggaggccgctgcctggtgctggttgaatccctgctgtct

SEQ ID NO: 438463 - DNA, 4123 bp, Homo sapiens
gtgcctagaggatcccctgaatcgacggtttctcatcagaaaccaacatcttcaatttcaggttgtcttccgactctttctcttctttttctttttcttcttcttgtcttcctaactccagcccagccatgtgaacctgctgagtcaccagccaccgagtaacttgaatcagaactccgcgaataaccaggggtctgtgctggactacggcaatacaaaacccctttctcattacaaagcggactgtgggcaaggcagcccggggtctggccagagcaagccagccctgatggcttatcttccccagcagctgtcccatataagtcacgagcagaactccctgtttctgatgaagccaaagccaggaaatatgcctttccgatcactggttccacctggccaggagcagaacccttccagtgtccctgtgcaagcccaggctaccagtgttgggacccagccgcctgccgtgtccgtggccagctcccacaacagctccccctatctcagcagccagcaacaggccgctgtaatgaagcagcatcagttgcttttggaccaacagaaacaaagggagcagcagcaaaagcatttacagcaacagcagttccttcagaggcaacagcaccttctcgcggaacaggagaagcaacagtttcagcgccatctgacccgcccaccaccccagtaccaagacccgacacaaggcagcttcccacagcaggttggacagttcacagggtcctctgctgccgtgcccggcatgaacaccttgggtccatccaactccagctgtcctcgagtgttccctcaggctgggaatctgatgccaatgggccctggacatgcttcagtttcctctctccccacaaactcaggccaacaggaccggggtgtggctcagttccctggctcccaaaacatgcctcagagcagcctctatggcatggcttctggcataacccagatagttgcccagcccccgccacaggccaccaatggacatgcccacattccacggcagaccaacgtgggccagaacacctccgtctcagctgcctatgggcagaactctctgggaagctctggcctctcccagcagcacaataaggggaccctgaaccctggtttaacaaagccaccggtcccaagggtgtcaccagccatgggaggccagaattcctcctggcagcatcagggaatgccgaacctcagtggccagaccccagggaacagcaacgtgagtcccttcactgcagcctccagtttccacatgcagcagcaggcccacctgaaaatgtctagcccgcaattctcccaggcagtgcccaacaggcccatggctcccatgagctcagcagctgccgtggggtccttgctacccccagtgagtgcacagcagaggaccagcgcccctgccccagcaccacccccaacagcccctcagcagggcttgcctggcctgagcccagcagggcctgagctgggggccttcagccagagccctgcctcacagatgggcggtcgggcggggctgcactgcacccaggcctaccctgtgcggaccgcgggccaggagctgccttttgcctatagcgggcagccaggtggcagtgggctctctagtgtggctggacacaccgatctgatcgactccctgctgaagaacaggacttcagaggagtggatgagtgatttggacgacctgttagggtctcagtaatggaaggatttgtagtgtttttagtgttcattcatcctatatttttattctcagattcaaagaaagagcaactactttggaccaaaagcccatggcctggggagctgggcaggtagagcccaagctccaggtgaggcctggccctgggcagggtctgtggctgcgcccctcaggccagcagttgaggtccatcgggctggccccagcccatctgctggcatcagtacctggtgttgggacagcaggatagggttctaaaggtggttttctatccaaacgaccaaaaaaccaacagtaacaccagtgaaaccccacactgtcgggcttataaaaatctgtgccatcatggtgattttatccaagactgctccacttaccccagtgctggggacaagtttctgttgaaactttagatagcagaattatttgcaatttgtagcatagaaaagatttttaaatttttttacaaaaggtttttaaacagattagggtaggtgatggtttaaatcaattaagtggcattggaaacctagggtttccttttgattaagagccttttttgtttctgctctttgtcagctttcaggggagaaggaggccactggaaaattatttccctaagtgcaggctgttgactgcgtatgccaaaaagggacaggaggcatgggatagcaggtctggtgacacagctagggtcttcctagcagctcctcctcctccctcccaaggcccccaggaatcccttcctcccatgtcctggcagcaggaccccaggctacatatggaaggtagagatgtgggggtcctgtatcctggagtattatgtctccccaccttctgcagttttctctgaacatgtatgttgcccatggtgggagcgtggtcactgtgcagttgtgcacagatgtctttcctttaccgttggcctttctgtctgcctctccttcctctctgcagcccaaatggaaaacaattatttactccattggagggaaaggaagagtcttagaattcctaagggaaccttagcataaaggttttggggaaggaggccgtaggccggcccggaggaagcaattccacttggtttgacaacttctgccactcccatgtcagatgacttgcacttcttaaagagattgctttataacactaagacatcctttctaaagattcaagtggacttgactaagctgagggtccacgaaatagaatatgacatgtgagctgtttttggaaaacgaagatggagagagcacttccccgtaacgaaagcaaagtggtaagcacagggtgagacccttttacacagaatggtggagagaaaagagaatgctgaaaagtggctcagatgcagagtgttctgtggagaaactgcagccccacttctgtttccctggagtctcccaatggatcattcaggagtgtcctatgtgagaattgagccaaggaaaatactcatgcaaccagcctgagtcgcggtgaggggacgagaggttgtacacacattggtagttattttgcaccagcagtgcctttctcactgggggtacttggaccctcagatcttcttttctaatagccatttgccaccccaagtggtatgtcggccatttctccttaaaacaccttccctacctttcccatgtactcagtttagctctcaaagaaggggtgaatcataaagccagtgaaaatttcaccctctgagggagttccccaatctgaaggggaagagggtgacctcagcggcttttctcccaaaaatcggctgaaggctggttgtggatccttgttcctctcctgaccccatctggctgctgccccgtctcccacccctgtccccggggctcgctggccctgcactccgccttagtcctggggccggcgacacagtgggggctcctcacttgctgcagtgtcatagcaataaaatgtgattcttggggtccccccagggagctgcccatggctttatttatgaacctggttttcgggagtcaggggaggagatgactttgcttctgtgcacagccccgtcttccaggagccacgactcagaagaaaagggtgctcagacttttgttatacacatttgctttgtgtaaataaatgtttacaattttatatgaaagatggaataagcgctagagcttccaactgtatattttttacttttatagattttaaaactatgatcctttatatgtgtgttttgggggagctatgataagttttatggcaaacggttggtattgttaactttttattgtcatcaaaagttcataaaagtcctattaatccccatattcttctactgcccttaactctggtatacaccaaaaagaaatctttactttccttgttttatcattataaaaataaagtattttgctagta

SEQ ID NO: 438464 - DNA, 5954 bp, Homo sapiens
cggccgcggcggtagcgcggaaaacaatggggccggggcggtggggagaggccgaggcttgaggtaggcagcaagcgccggctgggggtcgggccgagcggggcaggaggaaaacccgccgccgcgcgcgagcccgctccgctgccctcgggggcatggcgcggccgtgaggcggagaggggtagccgcggggagcgaagcccgcagtgccagccggccccgagaggcccggccccgggcccggcccgtgcagcccgcggcccatggtgctgcccacctgccccatggcggagttcgcgctgccgcggcacagcgcggtcatggagcgccttcgccggcgcatcgagctgtgccggcgccaccacagcacctgcgaggcccgctacgaggccgtgtcgcccgagcgcctggagctggagcgccaacacaccttcgccctgcaccagcgctgcatccaggccaaggccaagcgcgccgggaagcacaggcagccgcccgccgccacggccccggcgcccgccgccccggccccgcgcctggacgccgctgacggccccgagcacggccgcccggccacgcatcttcatgatacagttaagaggaatcttgacagcgccacttcccctcagaatggcgatcaacagaatggctacggggacctctttcctgggcataagaagactcgccgggaggcccctctgggagttgccatctcttccaatggactgcctccagcctcccccctcggtcagtctgacaagccttctggagccgacgccctgcagtccagtgggaagcactctctggggctagactctctcaacaaaaagcgtctggctgactccagccttcacttgaatggaggcagtaaccccagtgagtcatttcctctgagcctgaataaagaactgaagcaggagcctgtcgaagacctgccttgcatgatcactgggactgtcggctccatatcgcaaagcaacctcatgccagacctcaaccttaacgagcaggagtggaaggagctcatcgaggagctgaacaggtcggtgcccgatgaagacatgaaggacctgtttaatgaggacttcgaggagaagaaggacccagagtcttctggctctgccacacaaacccccttggcacaggacattaatattaagacggaattctctccagcagcctttgagcaagaacagttaggctctccacaagtgagggccgggtctgcagggcagacctttctggggccttcctctgcccctgtgagtacagattcccccagcctagggggctcccaaaccttattccacacctctggtcagccccgggcggacaatcccagtccaaacctgatgccggcatcagcccaggcccagaacgcacaaagagcccttgcaggtgtggtattgcccagtcagggcccaggaggggcctcagagctgtcctctgcccaccagctccagcagatcgctgccaagcagaagcgcgagcagatgctccagaacccacagcaggccaccccggcaccagccccgggccagatgtccacatggcagcagacggggccctcccacagttccttagatgtcccttaccccatggagaagcctgccagcccttccagctacaagcaagacttcactaactccaaactgctcatgatgcctagtgtgaataagagttcccctcggcccggaggcccctacctccagcccagccatgtgaacctgctgagtcaccagccaccgagtaacttgaatcagaactccgcgaataaccaggggtctgtgctggactacggcaatacaaaacccctttctcattacaaagcggactgtgggcaaggcagcccggggtctggccagagcaagccagccctgatggcttatcttccccagcagctgtcccatataagtcacgagcagaactccctgtttctgatgaagccaaagccaggaaatatgcctttccgatcactggttccacctggccaggagcagaacccttccagtgtccctgtgcaagcccaggctaccagtgttgggacccagccgcctgccgtgtccgtggccagctcccacaacagctccccctatctcagcagccagcaacaggccgctgtaatgaagcagcatcagttgcttttggaccaacagaaacaaagggagcagcagcaaaagcatttacagcaacagcagttccttcagaggcaacagcaccttctcgcggaacaggagaagcaacagtttcagcgccatctgacccgcccaccaccccagtaccaagacccgacacaaggcagcttcccacagcaggttggacagttcacagggtcctctgctgccgtgcccggcatgaacaccttgggtccatccaactccagctgtcctcgagtgttccctcaggctgggaatctgatgccaatgggccctggacatgcttcagtttcctctctccccacaaactcaggccaacaggaccggggtgtggctcagttccctggctcccaaaacatgcctcagagcagcctctatggcatggcttctggcataacccagatagttgcccagcccccgccacaggccaccaatggacatgcccacattccacggcagaccaacgtgggccagaacacctccgtctcagctgcctatgggcagaactctctgggaagctctggcctctcccagcagcacaataaggggaccctgaaccctggtttaacaaagccaccggtcccaagggtgtcaccagccatgggaggccagaattcctcctggcagcatcagggaatgccgaacctcagtggccagaccccagggaacagcaacgtgagtcccttcactgcagcctccagtttccacatgcagcagcaggcccacctgaaaatgtctagcccgcaattctcccaggcagtgcccaacaggcccatggctcccatgagctcagcagctgccgtggggtccttgctacccccagtgagtgcacagcagaggaccagcgcccctgccccagcaccacccccaacagcccctcagcagggcttgcctggcctgagcccagcagggcctgagctgggggccttcagccagagccctgcctcacagatgggcggtcgggcggggctgcactgcacccaggcctaccctgtgcggaccgcgggccaggagctgccttttgcctatagcgggcagccaggtggcagtgggctctctagtgtggctggacacaccgatctgatcgactccctgctgaagaacaggacttcagaggagtggatgagtgatttggacgacctgttagggtctcagtaatggaaggatttgtagtgtttttagtgttcattcatcctatatttttattctcagattcaaagaaagagcaactactttggaccaaaagcccatggcctggggagctgggcaggtagagcccaagctccaggtgaggcctggccctgggcagggtctgtggctgcgcccctcaggccagcagttgaggtccatcgggctggccccagcccatctgctggcatcagtacctggtgttgggacagcaggatagggttctaaaggtggttttctatccaaacgaccaaaaaaccaacagtaacaccagtgaaaccccacactgtcgggcttataaaaatctgtgccatcatggtgattttatccaagactgctccacttaccccagtgctggggacaagtttctgttgaaactttagatagcagaattatttgcaatttgtagcatagaaaagatttttaaatttttttacaaaaggtttttaaacagattagggtaggtgatggtttaaatcaattaagtggcattggaaacctagggtttccttttgattaagagccttttttgtttctgctctttgtcagctttcaggggagaaggaggccactggaaaattatttccctaagtgcaggctgttgactgcgtatgccaaaaagggacaggaggcatgggatagcaggtctggtgacacagctagggtcttcctagcagctcctcctcctccctcccaaggcccccaggaatcccttcctcccatgtcctggcagcaggaccccaggctacatatggaaggtagagatgtgggggtcctgtatcctggagtattatgtctccccaccttctgcagttttctctgaacatgtatgttgcccatggtgggagcgtggtcactgtgcagttgtgcacagatgtctttcctttaccgttggcctttctgtctgcctctccttcctctctgcagcccaaatggaaaacaattatttactccattggagggaaaggaagagtcttagaattcctaagggaaccttagcataaaggttttggggaaggaggccgtaggccggcccggaggaagcaattccacttggtttgacaacttctgccactcccatgtcagatgacttgcacttcttaaagagattgctttataacactaagacatcctttctaaagattcaagtggacttgactaagctgagggtccacgaaatagaatatgacatgtgagctgtttttggaaaacgaagatggagagagcacttccccgtaacgaaagcaaagtggtaagcacagggtgagacccttttacacagaatggtggagagaaaagagaatgctgaaaagtggctcagatgcagagtgttctgtggagaaactgcagccccacttctgtttccctggagtctcccaatggatcattcaggagtgtcctatgtgagaattgagccaaggaaaatactcatgcaaccagcctgagtcgcggtgaggggacgagaggttgtacacacattggtagttattttgcaccagcagtgcctttctcactgggggtacttggaccctcagatcttcttttctaatagccatttgccaccccaagtggtatgtcggccatttctccttaaaacaccttccctacctttcccatgtactcagtttagctctcaaagaaggggtgaatcataaagccagtgaaaatttcaccctctgagggagttccccaatctgaaggggaagagggtgacctcagcggcttttctcccaaaaatcggctgaaggctggttgtggatccttgttcctctcctgaccccatctggctgctgccccgtctcccacccctgtccccggggctcgctggccctgcactccgccttagtcctggggccggcgacacagtgggggctcctcacttgctgcagtgtcatagcaataaaatgtgattcttggggtccccccagggagctgcccatggctttatttatgaacctggttttcgggagtcaggggaggagatgactttgcttctgtgcacagccccgtcttccaggagccacgactcagaagaaaagggtgctcagacttttgttatacacatttgctttgtgtaaataaatgtttacaattttatatgaaagatggaataagcgctagagcttccaactgtatattttttacttttatagattttaaaactatgatcctttatatgtgtgttttgggggagctatgataagttttatggcaaacggttggtattgttaactttttattgtcatcaaaagttcataaaagtcctattaatccccatattcttctactgcccttaactctggtatacaccaaaaagaaatctttactttccttgttttatcattataaaaataaagtattttgctagtaaaaaaccaacaaaaaccacaacaccccaacaacacaaaaaaaccaatcaaccaaacaccacaccatacaccaacaaacataaaaaactacacacaacaaccctatcaccaccgacaactcaacacaccaacacccatccatcaaacaaccacacaccaaaaggaccactacccacaccccccacccccccacacacccactcacccacacctcctctcactcaccccacacacactaccc

SEQ ID NO: 438465 - DNA, 2956 bp, Homo sapiens
cggccgcggcggtagcgcggaaaacaatggggccggggcggtggggagaggccgaggcttgaggtaggcagcaagcgccggctgggggtcgggccgagcggggcaggaggaaaacccgccgccgcgcgcgagcccgctccgctgccctcgggggcatggcgcggccgtgaggcggagaggggtagccgcggggagcgaagcccgcagtgccagccggccccgagaggcccggccccgggcccggcccgtgcagcccgcggcccatggtgctgcccacctgccccatggcggagttcgcgctgccgcggcacagcgcggtcatggagcgccttcgccggcgcatcgagctgtgccggcgccaccacagcacctgcgaggcccgctacgaggccgtgtcgcccgagcgcctggagctggagcgccaacacaccttcgccctgcaccagcgctgcatccaggccaaggccaagcgcgccgggaagcacaggcagccgcccgccgccacggccccggcgcccgccgccccggccccgcgcctggacgccgctgacggccccgagcacggccgcccggccacgcatcttcatgatacagttaagaggaatcttgacagcgccacttcccctcagaatggcgatcaacagaatggctacggggacctctttcctgggcataagaagactcgccgggaggcccctctgggagttgccatctcttccaatggactgcctccagcctcccccctcggtcagtctgacaagccttctggagccgacgccctgcagtccagtgggaagcactctctggggctagactctctcaacaaaaagcgtctggctgactccagccttcacttgaatggaggcagtaaccccagtgagtcatttcctctgagcctgaataaagaactgaagcaggagcctgtcgaagacctgccttgcatgatcactgggactgtcggctccatatcgcaaagcaacctcatgccagacctcaaccttaacgagcaggagtggaaggagctcatcgaggagctgaacaggtcggtgcccgatgaagacatgaaggacctgtttaatgaggacttcgaggagaagaaggacccagagtcttctggctctgccacacaaacccccttggcacaggacattaatattaagacggaattctctccagcagcctttgagcaagaacagttaggctctccacaagtgagggccgggtctgcagggcagacctttctggggccttcctctgcccctgtgagtacagattcccccagcctagggggctcccaaaccttattccacacctctggtcagccccgggcggacaatcccagtccaaacctgatgccggcatcagcccaggcccagaacgcacaaagagcccttgcaggtgtggtattgcccagtcagggcccaggaggggcctcagagctgtcctctgcccaccagctccagcagatcgctgccaagcagaagcgcgagcagatgctccagaacccacagcaggccaccccggcaccagccccgggccagatgtccacatggcagcagacggggccctcccacagttccttagatgtcccttaccccatggagaagcctgccagcccttccagctacaagcaagacttcactaactccaaactgctcatgatgcctagtgtgaataagagttcccctcggcccggaggcccctacctccagcccagccatgtgaacctgctgagtcaccagccaccgagtaacttgaatcagaactccgcgaataaccaggggtctgtgctggactacggcaatacaaaacccctttctcattacaaagcggactgtgggcaaggcagcccggggtctggccagagcaagccagccctgatggcttatcttccccagcagctgtcccatataagtcacgagcagaactccctgtttctgatgaagccaaagccaggaaatatgcctttccgatcactggttccacctggccaggagcagaacccttccagtgtccctgtgcaagcccaggctaccagtgttgggacccagccgcctgccgtgtccgtggccagctcccacaacagctccccctatctcagcagccagcaacaggccgctgtaatgaagcagcatcagttgcttttggaccaacagaaacaaagggagcagcagcaaaagcatttacagcaacagcagttccttcagaggcaacagcaccttctcgcggaacaggagaagcaacagtttcagcgccatctgacccgcccaccaccccagtaccaagacccgacacaaggcagcttcccacagcaggttggacagttcacagggtcctctgctgccgtgcccggcatgaacaccttgggtccatccaactccagctgtcctcgagtgttccctcaggctgggaatctgatgccaatgggccctggacatgcttcagtttcctctctccccacaaactcaggccaacaggaccggggtgtggctcagttccctggctcccaaaacatgcctcagagcagcctctatggcatggcttctggcataacccagatagttgcccagcccccgccacaggccaccaatggacatgcccacattccacggcagaccaacgtgggccagaacacctccgtctcagctgcctatgggcagaactctctgggaagctctggcctctcccagcagcacaataaggggaccctgaaccctggtttaacaaagccaccggtcccaagggtgtcaccagccatgggaggccagaattcctcctggcagcatcagggaatgccgaacctcagtggccagaccccagggaacagcaacgtgagtcccttcactgcagcctccgggccattcaacgcctccgggccattcaacgcctccgggccattcaacgcctccaggccatcacgcctccgggccattacaacgcctgggatccttagaaa

SEQ ID NO: 438466 - DNA, 2443 bp, Homo sapiens
cggccgcggcggtagcgcggaaaacaatggggccggggcggtggggagaggccgaggcttgaggtaggcagcaagcgccggctgggggtcgggccgagcggggcaggaggaaaacccgccgccgcgcgcgagcccgctccgctgccctcgggggcatggcgcggccgtgaggcggagaggggtagccgcggggagcgaagcccgcagtgccagccggccccgagaggcccggccccgggcccggcccgtgcagcccgcggcccatggtgctgcccacctgccccatggcggagttcgcgctgccgcggcacagcgcggtcatggagcgccttcgccggcgcatcgagctgtgccggcgccaccacagcacctgcgaggcccgctacgaggccgtgtcgcccgagcgcctggagctggagcgccaacacaccttcgccctgcaccagcgctgcatccaggccaaggccaagcgcgccgggaagcacaggcagccgcccgccgccacggccccggcgcccgccgccccggccccgcgcctggacgccgctgacggccccgagcacggccgcccggccacgcatcttcatgatacagttaagaggaatcttgacagcgccacttcccctcagaatggcgatcaacagaatggctacggggacctctttcctgggcataagaagactcgccgggaggcccctctgggagttgccatctcttccaatggactgcctccagcctcccccctcggtcagtctgacaagccttctggagccgacgccctgcagtccagtgggaagcactctctggggctagactctctcaacaaaaagcgtctggctgactccagccttcacttgaatggaggcagtaaccccagtgagtcatttcctctgagcctgaataaagaactgaagcaggagcctgtcgaagacctgccttgcatgatcactgggactgtcggctccatatcgcaaagcaacctcatgccagacctcaaccttaacgagcaggagtggaaggagctcatcgaggagctgaacaggtcggtgcccgatgaagacatgaaggacctgtttaatgaggacttcgaggagaagaaggacccagagtcttctggctctgccacacaaacccccttggcacaggacattaatattaagacggaattctctccagcagcctttgagcaagaacagttaggctctccacaagtgagggccgggtctgcagggcagacctttctggggccttcctctgcccctgtgagtacagattcccccagcctagggggctcccaaaccttattccacacctctggtcagccccgggcggacaatcccagtccaaacctgatgccggcatcagcccaggcccagaacgcacaaagagcccttgcaggtgtggtattgcccagtcagggcccaggaggggcctcagagctgtcctctgcccaccagctccagcagatcgctgccaagcagaagcgcgagcagatgctccagaacccacagcaggccaccccggcaccagccccgggccagatgtccacatggcagcagacggggccctcccacagttccttagatgtcccttaccccatggagaagcctgccagcccttccagctacaagcaagacttcactaactccaaactgctcatgatgcctagtgtgaataagagttcccctcggcccggaggcccctacctccagcccagccatgtgaacctgctgagtcaccagccaccgagtaacttgaatcagaactccgcgaataaccaggggtctgtgctggactacggcaatacaaaacccctttctcattacaaagcggactgtgggcaaggcagcccggggtctggccagagcaagccagccctgatggcttatcttccccagcagctgtcccatataagtcacgagcagaactccctgtttctgatgaagccaaagccaggaaatatgcctttccgatcactggttccacctggccaggagcagaacccttccagtgtccctgtgcaagcccaggctaccagtgttgggacccagccgcctgccgtgtccgtggccagctcccacaacagctccccctatctcagcagccagcaacaggccgctgtaatgaagcagcatcagttgcttttggaccaacagaaacaaagggagcagcagcaaaagcatttacagcaacagcagttccttcagaggcaacagcaccttctcgcggaacaggagaagcaacagtttcagcgccatctgacccgcccaccaccccagtaccaagacccgacacaaggcagcttcccacagcaggttggacagttcacagctcagggtctgagttgtgcactgcctatgatccactccacagaagttctgatttcttctctgtgcaatggttctgccggcctttctgccgcccagaggtcctggtgagtggg

SEQ ID NO: 438467 - DNA, 2478 bp, Homo sapiens
ctaactgcggagctttaatcttggccccagtgttcagccactcggaggggcgggggctgtggcccattcaggggctgctggtgggctgtagtggggtgggatgacctggccagagccaacgaggatactggagcccaaagtcaagtttagagaccagctgggaacgtgaatggggctcttgattttcttatcaaaatcaccactcctcccagcttggactaaatattctttctagcaagcagctttgtgagctccctgaagcccaaggaaacccttcggtgggagaaatttcatttctgtctgagaggattaaggcagcaggtgactccccctcctcgcctgccgtgtcctgctattctcaggcagctctaaggagaattcttatcacagttcaagtgatttccagaagttccagggcttctgagagaccatcaagggaactttaacaacttgacaaatgtccttgaagtaagatgcctcatctttagggaaaaatggggtttggatttctgcttaggcaaagtctcctgcagttcatccttctctgtcctcttcttgcttcaggcttggggaccgtccctgctgtccccactgtggtggcaatcaggacctaaggtgaagcaaacttgaagttctatctgacaagtttaggcagtaagagaaggagggaaatcggagcaaagctccctcactttattgttgagaaactggcatctggaaagaggaaggaatttgcccaaagtcagtcagctgggataaaaacctgggtgtcctgtccagaaagtgcagggtgctttctgctctgtagcaaggcagcagacatctctgagccaggcccaccaacaggcccttatctggtggttggatcatgatcccattttgcttggacatgctctcaggaagataaaaaccatggagaaacactaggccattgacaaatgatctgagacaactttagaaaacaatgtaggatgaatggaaagagaaagaaaggaaagaaagaagaaaaagaaagaaggaaagaaagaaagagaaaggaaggaaggaaagaaggaaggaaaagaaggaaggaaggaaggaatatagtgttataaatactgcactcaacattttccaaattcttgccattatttttcaaaagtttaatagtttgcagaaatagatactcaagccaaagtctgttttagagaaactttccatggaaagtcagaatttctaccacttccttttctatccacatttccagtgcagaagaaactgagaaacagagctttttgaagagaggacagggccatagcaacaaggaccttcttgggggattaatgggaggtcagtagaattaataaccctccttggatgagtgctactgttttcacatggcttcagatgctatcaacctcaaagaaatgatctcaacagagaagcttattctctcccaacttctacggtaaaatccaggagtattttctctggggatctgcccacaggacaaagtccataaaagcaagtcctgtctggaccatgtggttatctgaagcattagccatcaccagcacaacaaacggggcagggctttccaaggtggggctggtcagaagggaatctttgataagaggcccacaggcagggaaagcgaaatagggttgatgagaccaggggagacctaaaaaaaaggcagctttgtgtcttctagctccaaatatacctgccttttagctcacacactgtcctggagttctcagacctttaggggccctaacacagttcagttcatacaggggttcaaaagggacagtggcccatttgggagacctttaggatcaatgggaatcaattccattgttttgcctcagagtaaagtttctggctcggggacaattataagttgcaaaaaggatagaggcatatcccaagtcttccttcattccacaaataattacaaacaacctactgtgtgccaggcactattcttagcactggaaatacactagtgaagaagcagatgaggaccctgtttattgtttctctccaagaaattctccaagaatattgtttcttggagagaaataataaataaacaagacaatttctgaaagcaataagtgcaatcaagataattaaaggatgctaaagtgtgacttgtggggattgggagagagatgcacagacaatattaaagaggaggcattcgagctttgttgtgaacaccggaagtaacatgccgagcgcctgggggatgggaaactcctatagcaccccacaggctaacagcaagtagggacaagacaaaaagggcaggtggggacatggtagagatgggaccctacccagggaaacagctcccttcagcatctttagccttgccccactcttaggccacacataccccacgtgttgcttcctggagtttcagtgttgccccacatcattccacacacccttcacataggtttcgggcaggagttagggagggccata

SEQ ID NO: 438468 - DNA, 1686 bp, Homo sapiens
gccatttctagggttggaccgtgcaggcacgggcggtcagctgggccgcagctcctccggctctgcagggtcacggaggaagtctcctggaaccagcaggaggaaacatgggggatactggcctgagaaagcggagagaggatgagaagtcgatccagagccaagagcctaagaccaccagtctccaaaaggagctgggcctcatcagtggcatctccatcatcgtgggcaccatcattggctctgggatcttcgtttcccccaagtctgtgctcagcaacacggaagctgtggggccctgcctcatcatatgggcggcttgcggggtcctcgcgacgctgggtgccctgtgctttgcggagcttggcacaatgatcaccaagtcagggggagagtatccctacctgatggaggcctacgggcccatccccgcctacctcttctcctgggccagcctgatcgtcattaagcccacgtccttcgccatcatctgcctcagcttctccgagtatgtgtgtgcgcccttctatgtgggctgcaagcctcctcaaatcgttgtgaaatgcctggccgccgccgccatcttgttcatctcgacagtgaactcactgagcgtgcggctgggaagctacgtccagaacatcttcaccgcggccaagctggtgatcgtggccatcatcatcatcagcgggctggtgctcctggcccaaggaaacacaaagaattttgataattctttcgagggcgcccagctgtctgtgggagccatcagcctggcgttttacaatggactctgggcctatgatggatggaatcaactcaattacatcacagaagaacttagaaacccttacagaaacctgcctttggccattatcatcgggatccccctggtgacggcgtgctacatcctcatgaacgtgtcctacttcaccgtgatgactgccaccgaactcctgcagtcccaggcggtggctgtgacatttggtgaccgtgttctctatcctgcttcttggatcgttccactttttgtggcattttcaaccatcggtgctgctaacgggacctgcttcacagcgggcagactcatttacgtggcgggccgggagggtcacatgctcaaagtgctttcttacatcagcgtcaggcgcctcactccagcccccgccatcatcttttatggtatcatagcaacgatttatatcatccctggtgacataaactcgttagtcaattatttcagctttgctgcatggctgttttatggcctgacgattctaggactcatcgtgatgagatttacaaggaaagagctggaaaggcctatcaaggtgcccgtagtcattcccgtcttgatgacactcatctctgtgtttttggttctggctccaatcatcagcaagcccacctgggagtacctctactgtgtgctgtttatattaagcggccttttattttacttcctgtttgtccactacaagtttggatgggctcagaaaatctcaaagccgattaccatgcaccttcagatgctaatggaagtggtcccaccggaggaagaccctgagtaacaagctccgtctcttgtagccaagtcagctgaatttattttcttaagcaatatttgtggttatttcttcctttttttcctacgaataaaatatactcagatgtttaaaaaaaaat

SEQ ID NO: 438469 - DNA, 881 bp, Homo sapiens
gccatttctagggttggaccgtgcaggcacgggcggtcagctgggccgcagctcctccggctctgcagggtcacggaggaagccagctcccctagtccaggccgagcttgcacttgcgtcttgtctgctgctgctgaaccaagatttagctgtgcgccctccttgcagtctcctggaaccagcaggaggaaacatgggggatactggcctgagaaagcggagagaggatgagaagtcgatccagagccaagagcctaagaccaccagtctccaaaaggaggtgccctgtgctttgcggagcttggcacaatgatcaccaagtcagggggagagtatccctacctgatggaggcctacgggcccatccccgcctacctcttctcctgggccagcctgatcgtcattaagcccacgtccttcgccatcatctgcctcagcttctccgagtatgtgtgtgcgcccttctatgtgggctgcaagcctcctcaaatcgttgtgaaatgcctggccgccgccgccatctgaatcaactcaattacatcacagaagaacttagaaacccttacaggtaacagctgaatcagtgcagaggacagtagccgggcagcctgatttctcttctcctggtgaaggctggagctatttccctgggtattccatgatgcccttcccgacagtgaattatttctttttttttttttttgagacagagtcttgctctgttgcctaggctggagtgcagtggtgcaatctcagctcactcatttttgtatttttttagtagagatgagattttgccatgttggccaggctggtcttgaactcccaacctcaagagattcgcccatctcggcctcccaaagtgctgggattacaggtgt

SEQ ID NO: 438470 - DNA, 2007 bp, Homo sapiens
gccatttctagggttggaccgtgcaggcacgggcggtcagctgggccgcagctcctccggctctgcagggtcacggaggaagccagctcccctagtccaggccgagcttgcacttgcgtcttgtctgctgctgctgaaccaagatttagctgtgcgccctccttgcagtctcctggaaccagcaggaggaaacatgggggatactggcctgagaaagcggagagaggatgagaagtcgatccagagccaagagcctaagaccaccagtctccaaaaggagctgggcctcatcagtggcatctccatcatcgtgggcaccatcattggctctgggatcttcgtttcccccaagtctgtgctcagcaacacggaagctgtggggccctgcctcatcatatgggcggcttgcggggtcctcgcgacgctgggtgccctgtgctttgcggagcttggcacaatgatcaccaagtcagggggagagtatccctacctgatggaggcctacgggcccatccccgcctacctcttctcctgggccagcctgatcgtcattaagcccacgtccttcgccatcatctgcctcagcttctccgagtatgtgtgtgcgcccttctatgtgggctgcaagcctcctcaaatcgttgtgaaatgcctggccgccgccgccatcttgttcatctcgacagtgaactcactgagcgtgcggctgggaagctacgtccagaacatcttcaccgcggccaagctggtgatcgtggccatcatcatcatcagcgggctggtgctcctggcccaaggaaacacaaagaattttgataattctttcgagggcgcccagctgtctgtgggagccatcagcctggcgttttacaatggactctgggcctatgatggatggaatcaactcaattacatcacagaagaacttagaaacccttacagaaacctgcctttggccattatcatcgggatccccctggtgacggcgtgctacatcctcatgaacgtgtcctacttcaccgtgatgactgccaccgaactcctgcagtcccaggcggtggctgtgacatttggtgaccgtgttctctatcctgcttcttggatcgttccactttttgtggcattttcaaccatcggtgctgctaacgggacctgcttcacagcgggcagactcatttacgtggcgggccgggagggtcacatgctcaaagtgctttcttacatcagcgtcaggcgcctcactccagcccccgccatcatcttttatggtatcatagcaacgatttatatcatccctggtgacataaactcgttagtcaattatttcagctttgctgcatggctgttttatggcctgacgattctaggactcatcgtgatgagatttacaaggaaagagctggaaaggcctatcaaggtgcccgtagtcattcccgtcttgatgacactcatctctgtgtttttggttctggctccaatcatcagcaagcccacctgggagtacctctactgtgtgctgtttatattaagcggccttttattttacttcctgtttgtccactacaagtttggatgggctcagaaaatctcaagtaagtaccaacagaagggccgcttggcctctgtgaggtgcaggcaggcacggcgtcctcacctgtcctgactccaagacctctgtcacagtgtctcaccctgctggcagatctccctcgtcccaggaggacacatgcccacgccctcactgtacacctctgggtccacccttgattgttttgttcctgtcaattactgtaataagtaggaagggaaagcaccattttcttttctttttggagacacagtcttgctctgttgcccaggctaaagtgcagtggcatggtcatagctcactgcagtcttgaactcccgggctcaagccatcctcccacctgggcctcccaagtagctgggaccacaggcacacactacacctgggcaacagagcgagagtccatctcaaaaaacaca

SEQ ID NO: 438471 - DNA, 437 bp, Homo sapiens
tgaactggaaagtgcagtcgtccctccggacactcctaggaggtttttatttctattcctgcaattctgggagaagacagaagccaggaaagtgtgaaatccaaccagaaggcaggaaagctggccatcctgagcacagggtctaggtgacgcatcaccaaagactgaaaacaatgtcaccctcacccacaacaactccagtgaaactttcgaatttcagtctaactaactgtactcatttttgactcttatttcagagccgattaccatgcaccttcagatgctaatggaagtggtcccaccggaggaagaccctgagtaacaagctccgtctcttgtagccaagtcagctgaatttattttcttaagcaatatttgtggttatttcttcctttttttcctacgaataaaatatactcagatgtttaaaaaaaaat

SEQ ID NO: 438472 - DNA, 1772 bp, Homo sapiens
gccatttctagggttggaccgtgcaggcacgggcggtcagctgggccgcagctcctccggctctgcagggtcacggaggaagccagctcccctagtccaggccgagcttgcacttgcgtcttgtctgctgctgctgaaccaagatttagctgtgcgccctccttgcagtctcctggaaccagcaggaggaaacatgggggatactggcctgagaaagcggagagaggatgagaagtcgatccagagccaagagcctaagaccaccagtctccaaaaggagctgggcctcatcagtggcatctccatcatcgtgggcaccatcattggctctgggatcttcgtttcccccaagtctgtgctcagcaacacggaagctgtggggccctgcctcatcatatgggcggcttgcggggtcctcgcgacgctgggtgccctgtgctttgcggagcttggcacaatgatcaccaagtcagggggagagtatccctacctgatggaggcctacgggcccatccccgcctacctcttctcctgggccagcctgatcgtcattaagcccacgtccttcgccatcatctgcctcagcttctccgagtatgtgtgtgcgcccttctatgtgggctgcaagcctcctcaaatcgttgtgaaatgcctggccgccgccgccatcttgttcatctcgacagtgaactcactgagcgtgcggctgggaagctacgtccagaacatcttcaccgcggccaagctggtgatcgtggccatcatcatcatcagcgggctggtgctcctggcccaaggaaacacaaagaattttgataattctttcgagggcgcccagctgtctgtgggagccatcagcctggcgttttacaatggactctgggcctatgatggatggaatcaactcaattacatcacagaagaacttagaaacccttacagaaacctgcctttggccattatcatcgggatccccctggtgacggcgtgctacatcctcatgaacgtgtcctacttcaccgtgatgactgccaccgaactcctgcagtcccaggcggtggctgtgacatttggtgaccgtgttctctatcctgcttcttggatcgttccactttttgtggcattttcaaccatcggtgctgctaacgggacctgcttcacagcgggcagactcatttacgtggcgggccgggagggtcacatgctcaaagtgctttcttacatcagcgtcaggcgcctcactccagcccccgccatcatcttttatggtatcatagcaacgatttatatcatccctggtgacataaactcgttagtcaattatttcagctttgctgcatggctgttttatggcctgacgattctaggactcatcgtgatgagatttacaaggaaagagctggaaaggcctatcaaggtgcccgtagtcattcccgtcttgatgacactcatctctgtgtttttggttctggctccaatcatcagcaagcccacctgggagtacctctactgtgtgctgtttatattaagcggccttttattttacttcctgtttgtccactacaagtttggatgggctcagaaaatctcaaagccgattaccatgcaccttcagatgctaatggaagtggtcccaccggaggaagaccctgagtaacaagctccgtctcttgtagccaagtcagctgaatttattttcttaagcaatatttgtggttatttcttcctttttttcctacgaataaaatatactcagatgtttaaaaaaaaat

SEQ ID NO: 438473 - DNA, 1524 bp, Homo sapiens
ggcaaacaggtgtaaatcaggctggactgaatgtccaacgctggagctcagggccgtccagcgagggcggaccacggtgggcccctccatacgagcgcagcctccggtgggaggaaggctccctggggccggggcagtgcctcacaaggggcctgtgggcccttcctctctgtgttccaggtgccctgtgctttgcggagcttggcacaatgatcaccaagtcagggggagagtatccctacctgatggaggcctacgggcccatccccgcctacctcttctcctgggccagcctgatcgtcattaagcccacgtccttcgccatcatctgcctcagcttctccgagtatgtgtgtgcgcccttctatgtgggctgcaagcctcctcaaatcgttgtgaaatgcctggccgccgccgccatcttgttcatctcgacagtgaactcactgagcgtgcggctgggaagctacgtccagaacatcttcaccgcggccaagctggtgatcgtggccatcatcatcatcagcgggctggtgctcctggcccaaggaaacacaaagaattttgataattctttcgagggcgcccagctgtctgtgggagccatcagcctggcgttttacaatggactctgggcctatgatggatggaatcaactcaattacatcacagaagaacttagaaacccttacagaaacctgcctttggccattatcatcgggatccccctggtgacggcgtgctacatcctcatgaacgtgtcctacttcaccgtgatgactgccaccgaactcctgcagtcccaggcggtggctgtgacatttggtgaccgtgttctctatcctgcttcttggatcgttccactttttgtggcattttcaaccatcggtgctgctaacgggacctgcttcacagcgggcagactcatttacgtggcgggccgggagggtcacatgctcaaagtgctttcttacatcagcgtcaggcgcctcactccagcccccgccatcatcttttatggtatcatagcaacgatttatatcatccctggtgacataaactcgttagtcaattatttcagctttgctgcatggctgttttatggcctgacgattctaggactcatcgtgatgagatttacaaggaaagagctggaaaggcctatcaaggtgcccgtagtcattcccgtcttgatgacactcatctctgtgtttttggttctggctccaatcatcagcaagcccacctgggagtacctctactgtgtgctgtttatattaagcggccttttattttacttcctgtttgtccactacaagtttggatgggctcagaaaatctcaaagccgattaccatgcaccttcagatgctaatggaagtggtcccaccggaggaagaccctgagtaacaagctccgtctcttgtagccaagtcagctgaatttattttcttaagcaatatttgtggttatttcttcctttttttcctacgaataaaatatactcagatgtttaaaaaaaaat

SEQ ID NO: 438474 - DNA, 1764 bp, Homo sapiens
gccatttctagggttggaccgtgcaggcacgggcggtcagctgggccgcagctcctccggctctgcagggtcacggaggaagccagctcccctagtccaggccgagcttgcacttgcgtcttgtctgctgctgctgaaccaagatttagctgtgcgccctccttgcagtctcctggaaccagcaggaggaaacatgggggatactggcctgagaaagcggagagaggatgagaagtcgatccagagccaagagcctaagaccaccagtctccaaaaggagctgggcctcatcagtggcatctccatcatcgtgggcaccatcattggctctgggatcttcgtttcccccaagtctgtgctcagcaacacggaagctgtggggccctgcctcatcatatgggcggcttgcggggtcctcgcgacgctgggtgccctgtgctttgcggagcttggcacaatgatcaccaagtcagggggagagtatccctacctgatggaggcctacgggcccatccccgcctacctcttctcctgggccagcctgatcgtcattaagcccacgtccttcgccatcatctgcctcagcttctccgagtatgtgtgtgcgcccttctatgtgggctgcaagcctcctcaaatcgttgtgaaatgcctggccgccgccgccatcttgttcatctcgacagtgaactcactgagcgtgcggctgggaagctacgtccagaacatcttcaccgcggccaagctggtgatcgtggccatcatcatcatcagcgggctggtgctcctggcccaaggaaacacaaagaattttgataattctttcgagggcgcccagctgtctgtgggagccatcagcctggcgttttacaatggactctgggcctatgatggatggaatcaactcaattacatcacagaagaacttagaaacccttacagaaacctgcctttggccattatcatcgggatccccctggtgacggcgtgctacatcctcatgaacgtgtcctacttcaccgtgatgactgccaccgaactcctgcagtcccaggcggtggctgtgacatttggtgaccgtgttctctatcctgcttcttggatcgttccactttttgtggcattttcaaccatcggtgctgctaacgggacctgcttcacagcgggcagactcatttacgtggcgggccgggagggtcacatgctcaaagtgctttcttacatcagcgtcaggcgcctcactccagcccccgccatcatcttttatggtatcatagcaacgatttatatcatccctggtgacataaactcgttagtcaattatttcagctttgctgcatggctgttttatggcctgacgattctaggactcatcgtgatgagatttacaaggaaagagctggaaaggcctatcaaggtgcccgtagtcattcccgtcttgatgacactcatctctgtgtttttggttctggctccaatcatcagcaagcccacctgggagtacctctactgtgtgctgtttatattaagcggccttttattttacttcctgtttgtccacgccagtgcgcctgcgatcaccctctcttttacccttttcccattcaccctcaaatgcgcatgtaagtggtcccctcccccataggcctcagtgacatagcataatatagtagcagcctagtctggtaaaaagtagtatgttcctcaagagtttaggtaatgtcttccattttttctcacgaatgaattaaaaatgattcttta

SEQ ID NO: 438475 - DNA, 7268 bp, Homo sapiens
cggacgcgtgggctgctgcggagccggcagcgcaggcgggcggagcggagctgcccccgtggtggcgggcgatgcccccgtgagcctccctcgccgcccctccccgccccgcgtgcctatccactcggagtccgcgccagcctggggccgggccgcgcctactgccgggttcgcggggcggggtcccggggcagcacctgccccgccttgcggagccgcctcggcctgtggaggccccctccctgtctggaccccggccccacctccggacccttttatcacatcgcctcctctgggagcctgccctgattgccttcacctcatttcttgaaaattggtgttttggcagaagtcaattgaagccttgtgcaaatgccctaggggtgtgctgttgggaggcagccccctgtgatgcggaacaccaggctcagattcatcagttcgagctgcctgaggccctgccaccccggggaccatgtttaacggggagccaggtcctgcctcatctggggcctccaggaatgtggtgcggagctccagcattagcggtgaaatctgcggatcccagcaagccgggggcggggctgggaccaccaccgccaagaagcggcggagcagcctgggtgccaagatggtggccatcgtgggcctgactcagtggagcaagagcacactccagcttccgcagcctgaaggggccaccaagaagctgcgcagcaacatccgccggagcacggagacaggcatcgcggtggagatgcggagccgggtcacacgccagggcagccgggagtccaccgatgggagcaccaacagcaacagctccgacggcacgttcatcttccccactacccggctaggggctgaaagccagttcagcgatttcctggatgggctgggaccagctcagattgtggggcgacagacactggcaacaccacccatgggagatgtgcacattgccatcatggaccggagtggccagctggaggtggaagtgattgaagctcggggcctgacccccaaaccaggctccaaatccctcccagccacctatatcaaggtttacctgctggagaatggggcctgcttggccaagaagaagacaaagatgaccaagaagacctgtgatcccctgtaccagcaggctctgctctttgacgagggaccccagggcaaggtgctgcaggtgatcgtctggggagactatggccgcatggaccacaagtgcttcatgggcatggcccagatcatgctggacgagctggacctcagcgccgcggtcaccggctggtacaaactcttccccacctcctcagtggcagactccacactcggatccctcaccaggcgcctgtcccagtcttccctggagagtgccaccagcccctcatgctcttaaggatgtcaggaagaggccaggatggtggtgtggggaggggtgcctgctggccccatgtcctcccctgtacatagtcttcgtgtctttctggaccccttgtcctgctgcatgcctgttggctactgggctcatcccagctggcagtggagactgtagtgtgtgcgtgtgtgcgtgcgtgtgtgtgtgtgtgtacgtgaccacgttctatctgttcatttgtctgggtatagtcactcctggtgatgatatgggctgaaatgtctccacgtctctttgtgtcttgttgaaaagaaacccaaaggagtgttgtgtggacatgactcaccctgaggagtctccagggatggaggtggggcatgcggccactggtcggtgctgcctggtcctggcctggggcagagcctgtgtgttcttcacctgtgcctgctcctggtggtctctgctttgttttctgtcttgtcttttgttccactcttgactctcccggctctgccactgttttctgagaaatgtagcatccgctgcagctggccacactgagggccctctgggaaccccaccccactggagccgctccggcagctcttcctgccactgaatgcgttctgcagcatgtagcatgcccacctagctccctggccagggccctggggaggcagagggtacccaggggactgagggcttagaaatgactttctctatgaggctggaacctcctccttcttccagtgaagcacgaggtcttggttccagggttcctggccaggtgcccccttagcatttgttcttcatctcctgtctcttcaagcctccccactccaccgtgccgaaggagctctgccagtgggcctgggcaggcagccacagagggcatgttatctgctaaagcaaacagtcctcctgaggccctgagggtggccctgaccccctcagggctcattcctggtgggcatgactcggtaaggaggttctgtgggtagggctgtttgctggaataaggagggctgaggctgagttgttccccgccactgttgaggatcccatctgacatttggggattcactgcatgaagttgttcatttggggctccagtttttgtgcatttccagaccagggtccctgtctgggagctcagacttagctgggctccagcagcctggctccggactctcgtctgccaccatcaccagctctgtctaagcaatacttacccctccgggcttccctgctttcctgtgccccactgctgccctctgcagagccatctgctccaggcacccacctgcctctgcttgctttctcacccatgtctggttggagcttctcacagccactcaaaccctgacttgatttgacaactgggccctgttggtggagaccagtgcctgaactggaccctgtgaaatctgtcccgtgggaatcctgaagtctgactcaggaatgcccagacctgtccctgtccctcctcagctctagggtgaaaggcgagaggttgcacaggacatggacagagcagcccttgggtttgtatctggtaggggagaaagcagcaggacagtggaggtgtgtggaaggcactctttccacctctctccaggcattatccccaggtgctgaaatggctgtggccccagcacctgaggcaggggtacgctacctggggtagcagtagaaaggtcttggggtctgaatgacttggggcctccattcataaccaaagttgtaggggcatggaggcagtggcgccttatggataggtcatctcagcccaaagggcctccttggctggcatggttctgtgttacgttgaagccagagtcttataacacctcccaagaaagataggggaagaagccagaaccccacctggcctgcccacaggacaagaagtgggtaagggcaggaaggaaatgaacggagttagctcccaggctcctatctctgcctgagcctctattcttatattatcagagaaagggaccattgggtgcatagagatggggaggaggccactgggctgaattttctctttaggcggaaatgctctccccaggcccattgcgttcgtcaagttcttggaaatggacaaagggctctgtcctcctcgaccctagtgggggatcaagaaggaaactccgttgcaaaagggtattttaatctcctgtttatgatatattcacctctagagcagtcactgtcagggtgttgcgaaaatactctacacctttgggatgatagggttgttagtgacccacaggacagtatagatgtttgtggatgtagcactgagtggtgatacccagaccagcagtcaccccaggaagtgggggctacccataccctcattcctctggtggggagctgcctgcagagaggcctgccactgggggttccaggccgtggtgacccttgcctctggggaagggttagcacaggggaggttctagctggaggaggggtctgatgtgctggtaacttgggctgacctacctacagtccctggctgccaaaactgctcagcagttgggccactccactattccacctctctaaaagaaggtaatttcctccccaaattgaccttggggaattattcttttaaccctttgcaccaaataagttactcatccccacctggattttaccccatgagggtaaagttgtgtgaggctgacacgtctgtgtgatgcagtgtggctgcacttaagggtctgtttctcagcatcatggatgcaggggcttgtctgaaaagccactctggacctagcctgtcccagaagaggagaatgcacaagtgtaactcctggttgtttgctggggtgggggagcatctgctgtttgaggacggggggtggggaaggaaggaacatgatccctccagaagtctcccaccctggggccaactcactgccatgttcagtgtcccggctccaaatgcccccttgcccagatgaaaccctgcagtggttacaggaatggagctctttgtcattccacctcctctggtcaggcgaggttcactgtgcatatggcagagacaggagtggccctgcagtgatgttgggttgtgggcagggacagtgatggatgactcagagcgtctgtctttgtatttctgctctgttcattctgtcccactttcttcatagactccttttccctgcaatgggtttttggtatgaaaaaggctccagtaaatggagccaagtcttggtttgacaaggggaacttgatccttcagggaagaatcatctccaaaatgactccccatctggtttcttctaccacccaattctactaggaaaggagcacttaggaggctcttgggatgcagcaagtcccaggcaatgccagcatttcatgggggctgaggcagaacccaggagctccaagaaaggccacccatagagctcatcctctgtggaatcactgccggttagaacactgaggtcaagccagtcctcccatggtcatgccacccaccagggaagcatgcctgatctcttctttactgccagccttgaggagagcagaagcctccatttttaaagacaataaagacctccaagggtacttctttggaaatgaaatgtagcacaatcttagcctacgttaccaggagccctgacatgcaaccagggtccctcttccatgccctgctgcccaggagttgctgagctcctcttcccctggggttccagccctcctaatacctcatattccccatcttcctcagcccagaaagcaatggggctttagtgatgctcctcttttgtgtctctctggttgcctctagcactgtgcaaactctgcaagaaattgctgcctttgcttgatgttgtagatgagttgccctccacctggctggagagatggcacatcattcagggccagaaggttgtccagcagtgtttctgcagtggctgcagggagatggaaaagaagagccctgcttccctgcctcctcctacctttctcttccactcctcagagttttcttctccagtatcctgacatgtaaagagattctttaaaatgctgcttcttctactggactgtctttcactgagtagtcagggaggagatgaaaatgtggacacatccccccgccttctccctcaaccttttcactcacgtcagaagaggttggggcaaaacaaaacaagcatgattgaagagcaggggaagcccacacaatcaggtgagccctgatgggggctggactggcctggtctggctgggaaaggattcttttaaaagcgtgcctgagcatctcagagcaatgtcagtgatgccaaagagagcaacttggcctccttgggcaccaactctgatggctgagttgcacaaacgtggctcagatgttggcatgcccgatggtgggaccttgttctctgataaagggcttaatctttccatgtagcaaagcaactttccctccctcccctccccccgaaccctgagcttgggcttgtgtgggcccagcatggctgtgcctgtgagggaagccacatcagtgagagaaagttgcattctctcaggggcctagattggcttggggcaggtgcttgttgaaaagcatgagtgtttctgctttgggaaacccttccagggctctggttggaaacttggccagtaaggacagggccttgggcctcccaaggagttcacaatgatgccaggaagggtccctgagcctgggttccagtcagcttggctaacagaatggggcttgggaattccaggggcaactgagcatccaccccattagccagtgatctggacagggacagctggctacagggaatcaaaggctgttctgtacagttttaccagaaactgtgaccttgggtaaggctcctcacttttctgggcctcaacttcctcatctgcaaaatcagagcattagctgctctccccatgattccctcccagttttaattaaaagtctctgatctggagcacatgagggttgcgagcctggtgcacctggttcctgtctccgtgggctggtttccttcagcccctgatgcccaggctgggtgcaggctctcatctggtccatgcccagatgctgcctcagacaagaactctgggaatcctaacagactctgctttcctctcttcgtggtttgtcctccctcttttattcttgtgtaatgatgagacataattaagggtcatctacaatggacaattttcaaggtgctgatgtgatgtcacaacctccgctacatcctgagtaagtcagtgtccccaacagcagatgaggctgggtctttcctcatttctgcttctgggatgacatcagtgggagagttgaagatctgagaattctaaaggaaatgttctctgatgggaggagagagggaacttatttcccttcaaagtagtttgcttcttaagaccactcctccctccagaatgtctttaaccagacatcatttcagaaggtggggcagctgcttccttaggaagagtgggcctgatagctcaaccaactcctttagcatgtaaactcacagaaggcaagaacccctttttttagactttccaaatgcatcctgcaaagagagagatagctgatagggactgacaagcacactgtttagataagaagcaattagccttttatatctgtgctctatacattttctatgtgcagcatctttcctaacttgttgtggttcccgggtggcaggtgcacagctgggagggactgccggctgtttcgtacaacattcttgccaattcccttgaggagaaaattcttcacatggcttctgcatgtacagtatttgggcagcaaaacatgattaaagtcagtttgaaaatggaaaaaaaaaaaacaaacaaaaaacaaaag

SEQ ID NO: 438476 - DNA, 7188 bp, Homo sapiens
cggacgcgtgggctgctgcggagccggcagcgcaggcgggcggagcggagctgcccccgtggtggcgggcgatgcccccgtgagcctccctcgccgcccctccccgccccgcgtgcctatccactcggagtccgcgccagcctggggccgggccgcgcctactgccgggttcgcggggcggggtcccggggcagcacctgccccgccttgcggagccgcctcggcctgtggaggccccctccctgtctggaccccggccccacctccggaagtcaattgaagccttgtgcaaatgccctaggggtgtgctgttgggaggcagccccctgtgatgcggaacaccaggctcagattcatcagttcgagctgcctgaggccctgccaccccggggaccatgtttaacggggagccaggtcctgcctcatctggggcctccaggaatgtggtgcggagctccagcattagcggtgaaatctgcggatcccagcaagccgggggcggggctgggaccaccaccgccaagaagcggcggagcagcctgggtgccaagatggtggccatcgtgggcctgactcagtggagcaagagcacactccagcttccgcagcctgaaggggccaccaagaagctgcgcagcaacatccgccggagcacggagacaggcatcgcggtggagatgcggagccgggtcacacgccagggcagccgggagtccaccgatgggagcaccaacagcaacagctccgacggcacgttcatcttccccactacccggctaggggctgaaagccagttcagcgatttcctggatgggctgggaccagctcagattgtggggcgacagacactggcaacaccacccatgggagatgtgcacattgccatcatggaccggagtggccagctggaggtggaagtgattgaagctcggggcctgacccccaaaccaggctccaaatccctcccagccacctatatcaaggtttacctgctggagaatggggcctgcttggccaagaagaagacaaagatgaccaagaagacctgtgatcccctgtaccagcaggctctgctctttgacgagggaccccagggcaaggtgctgcaggtgatcgtctggggagactatggccgcatggaccacaagtgcttcatgggcatggcccagatcatgctggacgagctggacctcagcgccgcggtcaccggctggtacaaactcttccccacctcctcagtggcagactccacactcggatccctcaccaggcgcctgtcccagtcttccctggagagtgccaccagcccctcatgctcttaaggatgtcaggaagaggccaggatggtggtgtggggaggggtgcctgctggccccatgtcctcccctgtacatagtcttcgtgtctttctggaccccttgtcctgctgcatgcctgttggctactgggctcatcccagctggcagtggagactgtagtgtgtgcgtgtgtgcgtgcgtgtgtgtgtgtgtgtacgtgaccacgttctatctgttcatttgtctgggtatagtcactcctggtgatgatatgggctgaaatgtctccacgtctctttgtgtcttgttgaaaagaaacccaaaggagtgttgtgtggacatgactcaccctgaggagtctccagggatggaggtggggcatgcggccactggtcggtgctgcctggtcctggcctggggcagagcctgtgtgttcttcacctgtgcctgctcctggtggtctctgctttgttttctgtcttgtcttttgttccactcttgactctcccggctctgccactgttttctgagaaatgtagcatccgctgcagctggccacactgagggccctctgggaaccccaccccactggagccgctccggcagctcttcctgccactgaatgcgttctgcagcatgtagcatgcccacctagctccctggccagggccctggggaggcagagggtacccaggggactgagggcttagaaatgactttctctatgaggctggaacctcctccttcttccagtgaagcacgaggtcttggttccagggttcctggccaggtgcccccttagcatttgttcttcatctcctgtctcttcaagcctccccactccaccgtgccgaaggagctctgccagtgggcctgggcaggcagccacagagggcatgttatctgctaaagcaaacagtcctcctgaggccctgagggtggccctgaccccctcagggctcattcctggtgggcatgactcggtaaggaggttctgtgggtagggctgtttgctggaataaggagggctgaggctgagttgttccccgccactgttgaggatcccatctgacatttggggattcactgcatgaagttgttcatttggggctccagtttttgtgcatttccagaccagggtccctgtctgggagctcagacttagctgggctccagcagcctggctccggactctcgtctgccaccatcaccagctctgtctaagcaatacttacccctccgggcttccctgctttcctgtgccccactgctgccctctgcagagccatctgctccaggcacccacctgcctctgcttgctttctcacccatgtctggttggagcttctcacagccactcaaaccctgacttgatttgacaactgggccctgttggtggagaccagtgcctgaactggaccctgtgaaatctgtcccgtgggaatcctgaagtctgactcaggaatgcccagacctgtccctgtccctcctcagctctagggtgaaaggcgagaggttgcacaggacatggacagagcagcccttgggtttgtatctggtaggggagaaagcagcaggacagtggaggtgtgtggaaggcactctttccacctctctccaggcattatccccaggtgctgaaatggctgtggccccagcacctgaggcaggggtacgctacctggggtagcagtagaaaggtcttggggtctgaatgacttggggcctccattcataaccaaagttgtaggggcatggaggcagtggcgccttatggataggtcatctcagcccaaagggcctccttggctggcatggttctgtgttacgttgaagccagagtcttataacacctcccaagaaagataggggaagaagccagaaccccacctggcctgcccacaggacaagaagtgggtaagggcaggaaggaaatgaacggagttagctcccaggctcctatctctgcctgagcctctattcttatattatcagagaaagggaccattgggtgcatagagatggggaggaggccactgggctgaattttctctttaggcggaaatgctctccccaggcccattgcgttcgtcaagttcttggaaatggacaaagggctctgtcctcctcgaccctagtgggggatcaagaaggaaactccgttgcaaaagggtattttaatctcctgtttatgatatattcacctctagagcagtcactgtcagggtgttgcgaaaatactctacacctttgggatgatagggttgttagtgacccacaggacagtatagatgtttgtggatgtagcactgagtggtgatacccagaccagcagtcaccccaggaagtgggggctacccataccctcattcctctggtggggagctgcctgcagagaggcctgccactgggggttccaggccgtggtgacccttgcctctggggaagggttagcacaggggaggttctagctggaggaggggtctgatgtgctggtaacttgggctgacctacctacagtccctggctgccaaaactgctcagcagttgggccactccactattccacctctctaaaagaaggtaatttcctccccaaattgaccttggggaattattcttttaaccctttgcaccaaataagttactcatccccacctggattttaccccatgagggtaaagttgtgtgaggctgacacgtctgtgtgatgcagtgtggctgcacttaagggtctgtttctcagcatcatggatgcaggggcttgtctgaaaagccactctggacctagcctgtcccagaagaggagaatgcacaagtgtaactcctggttgtttgctggggtgggggagcatctgctgtttgaggacggggggtggggaaggaaggaacatgatccctccagaagtctcccaccctggggccaactcactgccatgttcagtgtcccggctccaaatgcccccttgcccagatgaaaccctgcagtggttacaggaatggagctctttgtcattccacctcctctggtcaggcgaggttcactgtgcatatggcagagacaggagtggccctgcagtgatgttgggttgtgggcagggacagtgatggatgactcagagcgtctgtctttgtatttctgctctgttcattctgtcccactttcttcatagactccttttccctgcaatgggtttttggtatgaaaaaggctccagtaaatggagccaagtcttggtttgacaaggggaacttgatccttcagggaagaatcatctccaaaatgactccccatctggtttcttctaccacccaattctactaggaaaggagcacttaggaggctcttgggatgcagcaagtcccaggcaatgccagcatttcatgggggctgaggcagaacccaggagctccaagaaaggccacccatagagctcatcctctgtggaatcactgccggttagaacactgaggtcaagccagtcctcccatggtcatgccacccaccagggaagcatgcctgatctcttctttactgccagccttgaggagagcagaagcctccatttttaaagacaataaagacctccaagggtacttctttggaaatgaaatgtagcacaatcttagcctacgttaccaggagccctgacatgcaaccagggtccctcttccatgccctgctgcccaggagttgctgagctcctcttcccctggggttccagccctcctaatacctcatattccccatcttcctcagcccagaaagcaatggggctttagtgatgctcctcttttgtgtctctctggttgcctctagcactgtgcaaactctgcaagaaattgctgcctttgcttgatgttgtagatgagttgccctccacctggctggagagatggcacatcattcagggccagaaggttgtccagcagtgtttctgcagtggctgcagggagatggaaaagaagagccctgcttccctgcctcctcctacctttctcttccactcctcagagttttcttctccagtatcctgacatgtaaagagattctttaaaatgctgcttcttctactggactgtctttcactgagtagtcagggaggagatgaaaatgtggacacatccccccgccttctccctcaaccttttcactcacgtcagaagaggttggggcaaaacaaaacaagcatgattgaagagcaggggaagcccacacaatcaggtgagccctgatgggggctggactggcctggtctggctgggaaaggattcttttaaaagcgtgcctgagcatctcagagcaatgtcagtgatgccaaagagagcaacttggcctccttgggcaccaactctgatggctgagttgcacaaacgtggctcagatgttggcatgcccgatggtgggaccttgttctctgataaagggcttaatctttccatgtagcaaagcaactttccctccctcccctccccccgaaccctgagcttgggcttgtgtgggcccagcatggctgtgcctgtgagggaagccacatcagtgagagaaagttgcattctctcaggggcctagattggcttggggcaggtgcttgttgaaaagcatgagtgtttctgctttgggaaacccttccagggctctggttggaaacttggccagtaaggacagggccttgggcctcccaaggagttcacaatgatgccaggaagggtccctgagcctgggttccagtcagcttggctaacagaatggggcttgggaattccaggggcaactgagcatccaccccattagccagtgatctggacagggacagctggctacagggaatcaaaggctgttctgtacagttttaccagaaactgtgaccttgggtaaggctcctcacttttctgggcctcaacttcctcatctgcaaaatcagagcattagctgctctccccatgattccctcccagttttaattaaaagtctctgatctggagcacatgagggttgcgagcctggtgcacctggttcctgtctccgtgggctggtttccttcagcccctgatgcccaggctgggtgcaggctctcatctggtccatgcccagatgctgcctcagacaagaactctgggaatcctaacagactctgctttcctctcttcgtggtttgtcctccctcttttattcttgtgtaatgatgagacataattaagggtcatctacaatggacaattttcaaggtgctgatgtgatgtcacaacctccgctacatcctgagtaagtcagtgtccccaacagcagatgaggctgggtctttcctcatttctgcttctgggatgacatcagtgggagagttgaagatctgagaattctaaaggaaatgttctctgatgggaggagagagggaacttatttcccttcaaagtagtttgcttcttaagaccactcctccctccagaatgtctttaaccagacatcatttcagaaggtggggcagctgcttccttaggaagagtgggcctgatagctcaaccaactcctttagcatgtaaactcacagaaggcaagaacccctttttttagactttccaaatgcatcctgcaaagagagagatagctgatagggactgacaagcacactgtttagataagaagcaattagccttttatatctgtgctctatacattttctatgtgcagcatctttcctaacttgttgtggttcccgggtggcaggtgcacagctgggagggactgccggctgtttcgtacaacattcttgccaattcccttgaggagaaaattcttcacatggcttctgcatgtacagtatttgggcagcaaaacatgattaaagtcagtttgaaaatggaaaaaaaaaaaacaaacaaaaaacaaaag

SEQ ID NO: 438477 - DNA, 3279 bp, Homo sapiens
cggacgcgtgggctgctgcggagccggcagcgcaggcgggcggagcggagctgcccccgtggtggcgggcgatgcccccgtgagcctccctcgccgcccctccccgccccgcgtgcctatccactcggagtccgcgccagcctggggccgggccgcgcctactgccgggttcgcggggcggggtcccggggcagcacctgccccgccttgcggagccgcctcggcctgtggaggccccctccctgtctggaccccggccccacctccggaagtcaattgaagccttgtgcaaatgccctaggggtgtgctgttgggaggcagccccctgtgatgcggaacaccaggctcagattcatcagttcgagctgcctgaggccctgccaccccggggaccatgtttaacggggagccaggtcctgcctcatctggggcctccaggaatgtggtgcggagctccagcattagcggtgaaatctgcggatcccagcaagccgggggcggggctgggaccaccaccgccaagaagcggcggagcagcctgggtgccaagatggtggccatcgtgggcctgactcagtggagcaagagcacactccagcttccgcagcctgaaggggccaccaagaagctgcgcagcaacatccgccggagcacggagacaggcatcgcggtggagatgcggagccgggtcacacgccagggcagccgggagtccaccgatgggagcaccaacagcaacagctccgacggcacgttcatcttccccactacccggctaggggctgaaagccagttcagcgatttcctggatgggctgggaccagctcagattgtggggcgacagacactggcaacaccacccatgggagatgtgcacattgccatcatggaccggagtggccagctggaggtggaagtgattgaagctcggggcctgacccccaaaccaggctccaaatccctcccagccacctatatcaaggtttacctgctggagaatggggcctgcttggccaagaagaagacaaagatgaccaagaagacctgtgatcccctgtaccagcaggctctgctctttgacgagggaccccagggcaaggtgctgcaggtgatcgtctggggagactatggccgcatggaccacaagtgcttcatgggcatggcccagatcatgctggacgagctggacctcagcgccgcggtcaccggctggtacaaactcttccccacctcctcagtggcagactccacactcggatccctcaccaggcgcctgtcccagtcttccctggagagtgccaccagcccctcatgctcttaaggatgtcaggaagaggccaggatggtggtgtggggaggggtgcctgctggccccatgtcctcccctgtacatagtcttcgtgtctttctggaccccttgtcctgctgcatgcctgttggctactgggctcatcccagctggcagtggagactgtagtgtgtgcgtgtgtgcgtgcgtgtgtgtgtgtgtgtacgtgaccacgttctatctgttcatttgtctgggtatagtcactcctggtgatgatatgggctgaaatgtctccacgtctctttgtgtcttgttgaaaagaaacccaaaggagtgttgtgtggacatgactcaccctgaggagtctccagggatggaggtggggcatgcggccactggtcggtgctgcctggtcctggcctggggcagagcctgtgtgttcttcacctgtgcctgctcctggtggtctctgctttgttttctgtcttgtcttttgttccactcttgactctcccggctctgccactgttttctgagaaatgtagcatccgctgcagctggccacactgagggccctctgggaaccccaccccactggagccgctccggcagctcttcctgccactgaatgcgttctgcagcatgtagcatgcccacctagctccctggccagggccctggggaggcagagggtacccaggggactgagggcttagaaatgactttctctatgaggctggaacctcctccttcttccagtgaagcacgaggtcttggttccagggttcctggccaggtgcccccttagcatttgttcttcatctcctgtctcttcaagcctccccactccaccgtgccgaaggagctctgccagtgggcctgggcaggcagccacagagggcatgttatctgctaaagcaaacagtcctcctgaggccctgagggtggccctgaccccctcagggctcattcctggtgggcatgactcggtaaggaggttctgtgggtagggctgtttgctggaataaggagggctgaggctgagttgttccccgccactgttgaggatcccatctgacatttggggattcactgcatgaagttgttcatttggggctccagtttttgtgcatttccagaccagggtccctgtctgggagctcagacttagctgggctccagcagcctggctccggactctcgtctgccaccatcaccagctctgtctaagcaatatttcctctcttcgtggtttgtcctccctcttttattcttgtgtaatgatgagacataattaagggtcatctacaatggacaattttcaaggtgctgatgtgatgtcacaacctccgctacatcctgagtaagtcagtgtccccaacagcagatgaggctgggtctttcctcatttctgcttctgggatgacatcagtgggagagttgaagatctgagaattctaaaggaaatgttctctgatgggaggagagagggaacttatttcccttcaaagtagtttgcttcttaagaccactcctccctccagaatgtctttaaccagacatcatttcagaaggtggggcagctgcttccttaggaagagtgggcctgatagctcaaccaactcctttagcatgtaaactcacagaaggcaagaacccctttttttagactttccaaatgcatcctgcaaagagagagatagctgatagggactgacaagcacactgtttagataagaagcaattagccttttatatctgtgctctatacattttctatgtgcagcatctttcctaacttgttgtggttcccgggtggcaggtgcacagctgggagggactgccggctgtttcgtacaacattcttgccaattcccttgaggagaaaattcttcacatggcttctgcatgtacagtatttgggcagcaaaacatgattaaagtcagtttgaaaatggaaaaaaaaaaaacaaacaaaaaacaaaag

SEQ ID NO: 438478 - DNA, 2122 bp, Homo sapiens
aggccctcacttccggcggcgcgggaggcgcccagcgagccagagtggtggctggtcccgcgcgaaaattctgagctgtacacctctaggaaatgaaacactagttcagaagaagcctgtaaactctcttacaaatacatttggttattcaccatgaggttagcaaagcctaaagcgggtatttctcggagctcaagccaaggaaaggcctatgagaacaagcgcaaaacaggccggcagcggcagaagtggggcatgactattcgatttgactcaagcttcagtagactcagaagaagcttggatgacaaaccctataaatgtactgaatgtgaaaagagtttcagtcagagttcaactctttttcaacaccagaagatccatactggaaagaaatcccataaatgtgctgattgtgggaaaagtttctttcagagttctaatctcattcagcatcgacggatccatacgggggaaaagccctacaaatgtgatgagtgtggagaaagcttcaaacagagctcaaatctcattcagcaccagagaattcatactggagaaaaaccctatcagtgtgatgagtgtggccggtgtttcagccagagctcccaccttattcaacatcagagaacccacactggggagaaaccctaccagtgcagtgaatgtggcaaatgtttcagtcagagctctcatctgaggcagcacatgaaggtgcataaagaagagaagcctcgtaaaacccggggcaaaaatatcagggtgaagactcacttaccctcttggaaagctggtacaggaaggaagtctgtggctggtctccgttaagtatagggctttttgacagctttttgagacctcttaagaaaaaataaaaagtaaaaaatgaaaggaatcttttttagaaatagagatgctttatagtagatcacttaaatactggatcttttgctagtgtgaaaacattgggaatttaatgacattattgagctgaaagaaattacatgagtccagctaccctcatttcttttttatgtgacatggagcacaaagaactgaaaatatgttttgagggagcatgacatccttgacctcatttgaaattacttccattttcaaaaaccatcatgttttgcagatacattttgagaaaaaccatcatgttttgaggatacatttgtgaaagtgcaggcatgccaatgactactcagttttaggactttctgtggaagaaaaaattaaaagggagaagaaatcaattccactacttttgaagttctgcaacagatgagattttgtttgtaaagttttgtagtatattaaccattggtttatcactctagattcaacatattaaaatgtattcaagctcacagatttttaatcagtaaggcctatctatattagttgtcttttatttcttctccttgtggacagttgttaatgaaaggagtaaggatttccctttttttgttttgtttgttttgttttttttaaccaaattcttagagatactatagaatccaaatgagaactgaattggacctcaagtcttctattcctactaatagagttctttgtgatggtaactgctgtgtcgtttgttttccacaagttgggatggattcatgtcgatacatccccatgcccttgacctcttctggcattctcctgtgctctgacaaactgagccagccttttagatctacatgaataaacaaactattttaccaagaaaaatctcagcttgcttactgcttaattaaaaacctacaatttacacacctccctgccttcaagactgtgagctttggatagccctgcttaaatgtttgtcaacaacaagagtcgtaatgtgtcagtacattgtagctcctttgaaatttaactctttctgtgttacatgaattgttttaaggagtccggcaaacatgtttcttcacttccatgagaatggtgccaagtgtcagactctaatgagccctcagctcaggttttaatttctattgaatgctaacattcttctgattttttggtatcttttataatcatatcggtttctgctgtattaatgacaattattcatgaaaataaaaaatgaaatattttgtatactaaaaaa

SEQ ID NO: 438479 - DNA, 2158 bp, Homo sapiens
gggccgggtcaatgaggagcggccggcggagtgctgggaacgggaggcttggactgggggcccgggcgaggcgcggcccgcggcgggtggaactgggcggaaaattctgagctgtacacctctaggaaatgaaacactagttcagaagaagcctgtaaactctcttacaaatacatttggttattcaccatgaggttagcaaagcctaaagcgggtatttctcggagctcaagccaaggaaaggcctatgagaacaagcgcaaaacaggccggcagcggcagaagtggggcatgactattcgatttgactcaagcttcagtagactcagaagaagcttggatgacaaaccctataaatgtactgaatgtgaaaagagtttcagtcagagttcaactctttttcaacaccagaagatccatactggaaagaaatcccataaatgtgctgattgtgggaaaagtttctttcagagttctaatctcattcagcatcgacggatccatacgggggaaaagccctacaaatgtgatgagtgtggagaaagcttcaaacagagctcaaatctcattcagcaccagagaattcatactggagaaaaaccctatcagtgtgatgagtgtggccggtgtttcagccagagctcccaccttattcaacatcagagaacccacactggggagaaaccctaccagtgcagtgaatgtggcaaatgtttcagtcagagctctcatctgaggcagcacatgaaggtgcataaagaagagaagcctcgtaaaacccggggcaaaaatatcagggtgaagactcacttaccctcttggaaagctggtacaggaaggaagtctgtggctggtctccgttaagtatagggctttttgacagctttttgagacctcttaagaaaaaataaaaagtaaaaaatgaaaggaatcttttttagaaatagagatgctttatagtagatcacttaaatactggatcttttgctagtgtgaaaacattgggaatttaatgacattattgagctgaaagaaattacatgagtccagctaccctcatttcttttttatgtgacatggagcacaaagaactgaaaatatgttttgagggagcatgacatccttgacctcatttgaaattacttccattttcaaaaaccatcatgttttgcagatacattttgagaaaaaccatcatgttttgaggatacatttgtgaaagtgcaggcatgccaatgactactcagttttaggactttctgtggaagaaaaaattaaaagggagaagaaatcaattccactacttttgaagttctgcaacagatgagattttgtttgtaaagttttgtagtatattaaccattggtttatcactctagattcaacatattaaaatgtattcaagctcacagatttttaatcagtaaggcctatctatattagttgtcttttatttcttctccttgtggacagttgttaatgaaaggagtaaggatttccctttttttgttttgtttgttttgttttttttaaccaaattcttagagatactatagaatccaaatgagaactgaattggacctcaagtcttctattcctactaatagagttctttgtgatggtaactgctgtgtcgtttgttttccacaagttgggatggattcatgtcgatacatccccatgcccttgacctcttctggcattctcctgtgctctgacaaactgagccagccttttagatctacatgaataaacaaactattttaccaagaaaaatctcagcttgcttactgcttaattaaaaacctacaatttacacacctccctgccttcaagactgtgagctttggatagccctgcttaaatgtttgtcaacaacaagagtcgtaatgtgtcagtacattgtagctcctttgaaatttaactctttctgtgttacatgaattgttttaaggagtccggcaaacatgtttcttcacttccatgagaatggtgccaagtgtcagactctaatgagccctcagctcaggttttaatttctattgaatgctaacattcttctgattttttggtatcttttataatcatatcggtttctgctgtattaatgacaattattcatgaaaataaaaaatgaaatattttgtatactaaaaaa

SEQ ID NO: 438480 - DNA, 1977 bp, Homo sapiens
gggcattctggcgcggagcgtagcggcggcgggcgcagctagcgggtcggccgcggagcgtgatggtgcacgctcggcttcccaccggcagcaggcggcagaagtggggcatgactattcgatttgactcaagcttcagtagactcagaagaagcttggatgacaaaccctataaatgtactgaatgtgaaaagagtttcagtcagagttcaactctttttcaacaccagaagatccatactggaaagaaatcccataaatgtgctgattgtgggaaaagtttctttcagagttctaatctcattcagcatcgacggatccatacgggggaaaagccctacaaatgtgatgagtgtggagaaagcttcaaacagagctcaaatctcattcagcaccagagaattcatactggagaaaaaccctatcagtgtgatgagtgtggccggtgtttcagccagagctcccaccttattcaacatcagagaacccacactggggagaaaccctaccagtgcagtgaatgtggcaaatgtttcagtcagagctctcatctgaggcagcacatgaaggtgcataaagaagagaagcctcgtaaaacccggggcaaaaatatcagggtgaagactcacttaccctcttggaaagctggtacaggaaggaagtctgtggctggtctccgttaagtatagggctttttgacagctttttgagacctcttaagaaaaaataaaaagtaaaaaatgaaaggaatcttttttagaaatagagatgctttatagtagatcacttaaatactggatcttttgctagtgtgaaaacattgggaatttaatgacattattgagctgaaagaaattacatgagtccagctaccctcatttcttttttatgtgacatggagcacaaagaactgaaaatatgttttgagggagcatgacatccttgacctcatttgaaattacttccattttcaaaaaccatcatgttttgcagatacattttgagaaaaaccatcatgttttgaggatacatttgtgaaagtgcaggcatgccaatgactactcagttttaggactttctgtggaagaaaaaattaaaagggagaagaaatcaattccactacttttgaagttctgcaacagatgagattttgtttgtaaagttttgtagtatattaaccattggtttatcactctagattcaacatattaaaatgtattcaagctcacagatttttaatcagtaaggcctatctatattagttgtcttttatttcttctccttgtggacagttgttaatgaaaggagtaaggatttccctttttttgttttgtttgttttgttttttttaaccaaattcttagagatactatagaatccaaatgagaactgaattggacctcaagtcttctattcctactaatagagttctttgtgatggtaactgctgtgtcgtttgttttccacaagttgggatggattcatgtcgatacatccccatgcccttgacctcttctggcattctcctgtgctctgacaaactgagccagccttttagatctacatgaataaacaaactattttaccaagaaaaatctcagcttgcttactgcttaattaaaaacctacaatttacacacctccctgccttcaagactgtgagctttggatagccctgcttaaatgtttgtcaacaacaagagtcgtaatgtgtcagtacattgtagctcctttgaaatttaactctttctgtgttacatgaattgttttaaggagtccggcaaacatgtttcttcacttccatgagaatggtgccaagtgtcagactctaatgagccctcagctcaggttttaatttctattgaatgctaacattcttctgattttttggtatcttttataatcatatcggtttctgctgtattaatgacaattattcatgaaaataaaaaatgaaatattttgtatactaaaaaa

SEQ ID NO: 438481 - DNA, 434 bp, Homo sapiens
tactttttaaatttaaacatgaatgcaattttggtgggttgaagagatattaaaattgaatagttaacagatatctgtaattttttttctgatcatctctaaattttttttccttctacacacagaaaattctgagctgtacacctctaggaaatgaaacactagttcagaagaagcctgtaaactctcttacaaatacatttggttattcaccatgaggttagcaaagcctaaagcgggtatttctcggagctcaagccaaggaaaggcctatgagaacaagcgcaaaacaggccggcagcggcagaagtggggcatgactattcgatttgactcaagcttcagtagactcagaagaagcttggatgacaaaccctataaatgtactgaatgtgaaaagagtttcagtcagagttcaactctttttcaacacc

SEQ ID NO: 438482 - DNA, 339 bp, Homo sapiens
aatgaaaggaatcttttttagaaatagagatgctttatagtagatcacttaaatactggatcttttgctagtgtgaaaacattgggaatttaatgacattattgagctgaaagaaattacatgagtccagctaccctcatttcttttttatgtgacatggagcacaaagaactgaaaatatgttttgagggagcatgacatccttgacctcatttgaaattacttccattttcaaaaaccatcatgttttgcagatacattttgagaaaaaccatcatgttttgaggatacatttgtgaaagtgcaggcatgccaatgactactcagttttaggacttt

SEQ ID NO: 438483 - DNA, 2068 bp, Homo sapiens
aggccctcacttccggcggcgcgggaggcgcccagcgagccagagtggtggctggtcccgcgcgaaaattctgagctgtacacctctaggaaatgaaacactagttcagaagaagcctgtaaactctcttacaaatacatttggttattcaccatgaggttagcaaagcctaaagcgggtatttctcggagctcaagccaaggaaaggcctatgagaacaagcgcaaaacaggccggcagcggcagaagtggggcatgactattcgatttgactcaagcttcagtagactcagaagaagcttggatgacaaaccctataaatgtactgaatgtgaaaagagtttcagtcagagttcaactctttttcaacaccagaagatccatactggaaagaaatcccataaatgtgctgattgtgggaaaagtttctttcagagttctaatctcattcagcatcgacggatccatacgggggaaaagccctacaaatgtgatgagtgtggagaaagcttcaaacagagctcaaatctcattcagcaccagagaattcatactggagaaaaaccctatcagtgtgatgagtgtggccggtgtttcagccagagctcccaccttattcaacatcagagaacccacactggggagaaaccctaccagtgcagtgaatgtggcaaatgtttcagtcagagctctcatctgaggcagcacatgaaggtgcataaagaagagaagcctcgtaaaacccggggcaaaaatatcagggtgaagactcacttaccctcttggaaagctggtacaggaaggaagtctgtggctggtctccgttaagtatagggctttttgacagctttttgagacctcttaagaaaaaataaaaagtaaaaaatgaaaggaatcttttttagaaatagagatgctttatagtagatcacttaaatactggatcttttgctagtgtgactaccctcatttcttttttatgtgacatggagcacaaagaactgaaaatatgttttgagggagcatgacatccttgacctcatttgaaattacttccattttcaaaaaccatcatgttttgcagatacattttgagaaaaaccatcatgttttgaggatacatttgtgaaagtgcaggcatgccaatgactactcagttttaggactttctgtggaagaaaaaattaaaagggagaagaaatcaattccactacttttgaagttctgcaacagatgagattttgtttgtaaagttttgtagtatattaaccattggtttatcactctagattcaacatattaaaatgtattcaagctcacagatttttaatcagtaaggcctatctatattagttgtcttttatttcttctccttgtggacagttgttaatgaaaggagtaaggatttccctttttttgttttgtttgttttgttttttttaaccaaattcttagagatactatagaatccaaatgagaactgaattggacctcaagtcttctattcctactaatagagttctttgtgatggtaactgctgtgtcgtttgttttccacaagttgggatggattcatgtcgatacatccccatgcccttgacctcttctggcattctcctgtgctctgacaaactgagccagccttttagatctacatgaataaacaaactattttaccaagaaaaatctcagcttgcttactgcttaattaaaaacctacaatttacacacctccctgccttcaagactgtgagctttggatagccctgcttaaatgtttgtcaacaacaagagtcgtaatgtgtcagtacattgtagctcctttgaaatttaactctttctgtgttacatgaattgttttaaggagtccggcaaacatgtttcttcacttccatgagaatggtgccaagtgtcagactctaatgagccctcagctcaggttttaatttctattgaatgctaacattcttctgattttttggtatcttttataatcatatcggtttctgctgtattaatgacaattattcatgaaaataaaaaatgaaatattttgtatactaaaaaa

SEQ ID NO: 438484 - DNA, 1265 bp, Homo sapiens
ggggtcgaactaggctaggtacgaggcctgggtgttcaaggagcctcggacgttgtcacgggtttggggtcggggacagagcggtgaccatggccaggctggcgttgtctcctgtgcccagccactggatggtggcgttgctgctgctgctctcagctgagccagtaccagcagccagatcggaggaccggtaccggaatcccaaaggtagtgcttgttcgcggatctggcagagcccacgtttcatagccaggaaacggggcttcacggtgaaaatgcactgctacatgaacagcgcctccggcaatgtgagctggctctggaagcaggagatggacgagaatccccagcagctgaagctggaaaagggccgcatggaagagtcccagaacgaatctctcgccaccctcaccatccaaggcatccggtttgaggacaatggcatctacttctgccagcagaagtgcaacaacacctcggaggtctaccagggctgcggcacagagctgcgagtcatgggattcagcaccttggcacagctgaagcagaggaacacgctgaaggatggtatcatcatgatccagacgctgctgatcatcctcttcatcatcgtgcctatcttcctgctgctggacaaggatgacagcaaggctggcatggaggaagatcacacctacgagggcctggacattgaccagacagccacctatgaggacatagtgacgctgcggacaggggaagtgaagtggtctgtaggtgagcacccaggccaggagtgagagccaggtcgccccatgacctgggtgcaggctccctggcctcagtgactgcttcggagctgcctggctcatggcccaacccctttcccggaccccccagctggcctctgaagctggcccaccagagctgccatttgtctccagcccctggtccccagctcttgccaaagggcctggagtagaaggacaacagggcagcaacttggagggagttctctggggatggacgggacccagccttctgggggtgctatgaggtgatccgtccccacacatgggatgggggaggcagagactggtccagagcccgcaaatggactcggagctgagggcctcccagcagagcttgggaagggccatggacccaactgggccccagaagagccacaggaacatcattcctctcccgcaaccactcccaccccagggaggccctggcctccagtgccttcccccgtggaataaacggtgtgtcctgagaaacca

SEQ ID NO: 438485 - DNA, 961 bp, Homo sapiens
caggggacaggctgcagccggtgcagttacacgttttcctccaaggaggagcctcggacgttgtcacgggtttggggtcggggacagagcggtgaccatggccaggctggcgttgtctcctgtgcccagccactggatggtggcgttgctgctgctgctctcagctgagccagtaccagcagccagatcggaggaccggtaccggaatcccaaaggattcagcaccttggcacagctgaagcagaggaacacgctgaaggatggtatcatcatgatccagacgctgctgatcatcctcttcatcatcgtgcctatcttcctgctgctggacaaggatgacagcaaggctggcatggaggaagatcacacctacgagggcctggacattgaccagacagccacctatgaggacatagtgacgctgcggacaggggaagtgaagtggtctgtaggtgagcacccaggccaggagtgagagccaggtcgccccatgacctgggtgcaggctccctggcctcagtgactgcttcggagctgcctggctcatggcccaacccctttcccggaccccccagctggcctctgaagctggcccaccagagctgccatttgtctccagcccctggtccccagctcttgccaaagggcctggagtagaaggacaacagggcagcaacttggagggagttctctggggatggacgggacccagccttctgggggtgctatgaggtgatccgtccccacacatgggatgggggaggcagagactggtccagagcccgcaaatggactcggagctgagggcctcccagcagagcttgggaagggccatggacccaactgggccccagaagagccacaggaacatcattcctctcccgcaaccactcccaccccagggaggccctggcctccagtgccttcccccgtggaataaacggtgtgtcctgagaaacca

SEQ ID NO: 438486 - DNA, 1258 bp, Homo sapiens
aaactacgggctaggtgcgaggctgggtggtgggagcctcggacgttgtcacgggtttggggtcggggacagagcggtgaccatggccaggctggcgttgtctcctgtgcccagccactggatggtggcgttgctgctgctgctctcagctgagccagtaccagcagccagatcggaggaccggtaccggaatcccaaaggtagtgcttgttcgcggatctggcagagcccacgtttcatagccaggaaacggggcttcacggtgaaaatgcactgctacatgaacagcgcctccggcaatgtgagctggctctggaagcaggagatggacgagaatccccagcagctgaagctggaaaagggccgcatggaagagtcccagaacgaatctctcgccaccctcaccatccaaggcatccggtttgaggacaatggcatctacttctgccagcagaagtgcaacaacacctcggaggtctaccagggctgcggcacagagctgcgagtcatgggattcagcaccttggcacagctgaagcagaggaacacgctgaaggatggtatcatcatgatccagacgctgctgatcatcctcttcatcatcgtgcctatcttcctgctgctggacaaggatgacagcaaggctggcatggaggaagatcacacctacgagggcctggacattgaccagacagccacctatgaggacatagtgacgctgcggacaggggaagtgaagtggtctgtaggtgagcacccaggccaggagtgagagccaggtcgccccatgacctgggtgcaggctccctggcctcagtgactgcttcggagctgcctggctcatggcccaacccctttcccggaccccccagctggcctctgaagctggcccaccagagctgccatttgtctccagcccctggtccccagctcttgccaaagggcctggagtagaaggacaacagggcagcaacttggagggagttctctggggatggacgggacccagccttctgggggtgctatgaggtgatccgtccccacacatgggatgggggaggcagagactggtccagagcccgcaaatggactcggagctgagggcctcccagcagagcttgggaagggccatggacccaactgggccccagaagagccacaggaacatcattcctctcccgcaaccactcccaccccagggaggccctggcctccagtgccttcccccgtggaataaacggtgtgtcctgagaaacca

SEQ ID NO: 438487 - DNA, 1704 bp, Homo sapiens
  misc_feature (1704)..(1704): n is a, c, g, or t
ggggtcgaactaggctaggtacgaggcctgggtgttcaaggagcctcggacgttgtcacgggtttggggtcggggacagagcggtgaccatggccaggctggcgttgtctcctgtgcccagccactggatggtggcgttgctgctgctgctctcagctgagccagtaccagcagccagatcggaggaccggtaccggaatcccaaaggtagtgcttgttcgcggatctggcagagcccacgtttcatagccaggaaacggggcttcacggtgaaaatgcactgctacatgaacagcgcctccggcaatgtgagctggctctggaagcaggagatggacgagaatccccagcagctgaagctggaaaagggccgcatggaagagtcccagaacgaatctctcgccaccctcaccatccaaggcatccggtttgaggacaatggcatctacttctgccagcagaagtgcaacaacacctcggaggtctaccagggctgcggcacagagctgcgagtcatgggattcagcaccttggcacagctgaagcagaggaacacgctgaaggatggtatcatcatgatccagacgctgctgatcatcctcttcatcatcgtgcctatcttcctgctgctggacaaggatgacagcaaggctggcatggaggaagatcacacctacgagggcctggacattgaccagacagccacctatgaggacatagtgacgctgcggacaggggaagtgaagtggtctgtaggtgagcacccaggccaggagtgagagccaggtcgccccatgacctgggtgcaggctccctggcctcagtgactgcttcggagctgcctggctcatggcccaacccctttcccggaccccccagctggcctctgaagctggcccaccagagctgccatttgtctccagcccctggtccccagctcttgccaaagggcctggagtagaaggacaacagggcagcaacttggagggagttctctggggatggacgggacccagccttctgggggtgctatgaggtgatccgtccccacacatgggatgggggaggcagagactggtccagagcccgcaaatggactcggagctgagggcctcccagcagagcttgggaagggccatggacccaactgggccccagaagagccacaggaacatcattcctctcccgcaaccactcccaccccagggaggccctggcctccagtgccttcccccgtggaataaacggtgtgtcctgagaaaccaaaaaaacataacagtctaaacacccgcgagggacttcactactagagggccggcggaaaaactcagcgtacgcgaaatcgggccctggcgctaaacgactgtcctctcgcacccgacttcctcttcaccaccccgtcggtagcctatcgcaccgtcttccccgcttaatggagcgccgcctatattccccgaaacgccccggttcatcccggctgacgccacatcgcgccagccccccgcgccctcacaccccagactccgtcccacacctcctccgtcggcctgcgaacacacaccaccaccacgccgacacctaagcgcagccagcgaccctctgaaccgtgagtacacgcgagcacgatcaccgccgtccccgtcaacccacgacaggcgagacgacagcaccaccccgcgaaccacaccctgcgcttcacccagn

SEQ ID NO: 438488 - DNA, 1068 bp, Homo sapiens
  misc_feature (934)..(934): n is a, c, g, or t
  misc_feature (938)..(939): n is a, c, g, or t
  misc_feature (945)..(945): n is a, c, g, or t
  misc_feature (962)..(962): n is a, c, g, or t
  misc_feature (968)..(968): n is a, c, g, or t
  misc_feature (970)..(970): n is a, c, g, or t
  misc_feature (985)..(985): n is a, c, g, or t
  misc_feature (990)..(990): n is a, c, g, or t
  misc_feature (997)..(997): n is a, c, g, or t
  misc_feature (1002)..(1002): n is a, c, g, or t
  misc_feature (1010)..(1011): n is a, c, g, or t
  misc_feature (1016)..(1016): n is a, c, g, or t
ggggtcgaactaggctaggtacgaggcctgggtgttcaaggagcctcggacgttgtcacgggtttggggtcggggacagagcggtgaccatggccaggctggcgttgtctcctgtgcccagccactggatggtggcgttgctgctgctgctctcagctgagccagtaccagcagccagatcggaggaccggtaccggaatcccaaaggtagtgcttgttcgcggatctggcagagcccacgtttcatagccaggaaacggggcttcacggtgaaaatgcactgctacatgaacagcgcctccggcaatgtgagctggctctggaagcaggagatggacgagaatccccagcagctgaagctggaaaagggccgcatggaagagtcccagaacgaatctctcgccaccctcaccatccaaggcatccggtttgaggacaatggcatctacttctgccagcagaagtgcaacaacacctcggaggtctaccagggctgcggcacagagctgcgagtcatgggattcagcaccttggcacagctgaagcagaggaacacgctgaaggatggtatcatcatgatccagacgctgctgatcatcctcttcatcatcgtgcctatcttcctgctgctggacaaggatgacagcaaggctggcatggaggaagatcacacctacgagggcctggacattgaccagacagccacctatgaggacatagtgacgctgcggacaggggaagtgaagtggtctgtaggtgagcacccaggccaggagtgagagccaggtcgccccatgacctgggtgcaggctccctggcctcagtgactgcttcggagctgcctggctcatggcccaacccctttcccggaccccccagctggcctctgaagctggcccaccagagctgccatttgtctccagcccctggtccntcgnnttgcanggctgggttaaggcacngggccntnggggggtcctggtgncgggnccctctngggtnttgggtcnnccctngtgggggggttgtgcccagtttcggccctttggtgggccggccaaagatttc

SEQ ID NO: 438489 - DNA, 1259 bp, Homo sapiens
tcagatgtagaggcgtcaccgtgttatttcatgctcggcctgcgctttaatgttatatagtggccatcggcgaacaattacaagctggcgtagtctcctagtgcccagccactggataggtaggacgtacagtctgctagctgctactcagctagagccagctaccaacatggccagatacggaggaccggtaccggaatcgtagtgcttgttcgcggatctggcagagcccacgtttcatagccaggaaacggggcttcacggtgaaaatgcactgctacatgaacagcgcctccggcaatgtgagctggctctggaagcaggagatggacgagaatccccagcagctgaagctggaaaagggccgcatggaagagtcccagaacgaatctctcgccaccctcaccatccaaggcatccggtttgaggacaatggcatctacttctgccagcagaagtgcaacaacacctcggaggtctaccagggctgcggcacagagctgcgagtcatgggattcagcaccttggcacagctgaagcagaggaacacgctgaaggatggtatcatcatgatccagacgctgctgatcatcctcttcatcatcgtgcctatcttcctgctgctggacaaggatgacagcaaggctggcatggaggaagatcacacctacgagggcctggacattgaccagacagccacctatgaggacatagtgacgctgcggacaggggaagtgaagtggtctgtaggtgagcacccaggccaggagtgagagccaggtcgccccatgacctgggtgcaggctccctggcctcagtgactgcttcggagctgcctggctcatggcccaacccctttcccggaccccccagctggcctctgaagctggcccaccagagctgccatttgtctccagcccctggtccccagctcttgccaaagggcctggagtagaaggacaacagggcagcaacttggagggagttctctggggatggacgggacccagccttctgggggtgctatgaggtgatccgtccccacacatgggatgggggaggcagagactggtccagagcccgcaaatggactcggagctgagggcctcccagcagagcttgggaagggccatggacccaactgggccccagaagagccacaggaacatcattcctctcccgcaaccactcccaccccagggaggccctggcctccagtgccttcccccgtggaataaacggtgtgtcctgagaaacca

SEQ ID NO: 438490 - DNA, 1273 bp, Homo sapiens
caggggacaggctgcagccggtgcagttacacgttttcctccaaggaggagcctcggacgttgtcacgggtttggggtcggggacagagcggtgaccatggccaggctggcgttgtctcctgtgcccagccactggatggtggcgttgctgctgctgctctcagctgagccagtaccagcagccagatcggaggaccggtaccggaatcccaaaggtagtgcttgttcgcggatctggcagagcccacgtttcatagccaggaaacggggcttcacggtgaaaatgcactgctacatgaacagcgcctccggcaatgtgagctggctctggaagcaggagatggacgagaatccccagcagctgaagctggaaaagggccgcatggaagagtcccagaacgaatctctcgccaccctcaccatccaaggcatccggtttgaggacaatggcatctacttctgccagcagaagtgcaacaacacctcggaggtctaccagggctgcggcacagagctgcgagtcatgggattcagcaccttggcacagctgaagcagaggaacacgctgaaggatggtatcatcatgatccagacgctgctgatcatcctcttcatcatcgtgcctatcttcctgctgctggacaaggatgacagcaaggctggcatggaggaagatcacacctacgagggcctggacattgaccagacagccacctatgaggacatagtgacgctgcggacaggggaagtgaagtggtctgtaggtgagcacccaggccaggagtgagagccaggtcgccccatgacctgggtgcaggctccctggcctcagtgactgcttcggagctgcctggctcatggcccaacccctttcccggaccccccagctggcctctgaagctggcccaccagagctgccatttgtctccagcccctggtccccagctcttgccaaagggcctggagtagaaggacaacagggcagcaacttggagggagttctctggggatggacgggacccagccttctgggggtgctatgaggtgatccgtccccacacatgggatgggggaggcagagactggtccagagcccgcaaatggactcggagctgagggcctcccagcagagcttgggaagggccatggacccaactgggccccagaagagccacaggaacatcattcctctcccgcaaccactcccaccccagggaggccctggcctccagtgccttcccccgtggaataaacggtgtgtcctgagaaacca

SEQ ID NO: 438491 - DNA, 813 bp, Homo sapiens
aaactacgggctaggtgcgaggctgggtggtgggagcctcggacgttgtcacgggtttggggtcggggacagagcggtgaccatggccaggctggcgttgtctcctgtgcccagccactggatggtggcgttgctgctgctgctctcagctgagccagtaccagcagccagatcggaggaccggtaccggaatcccaaaggtagtgcttgttcgcggatctggcagagcccacgtttcatagccaggaaacggggcttcacggtgaaaatgcactgctacatgaacagcgcctccggcaatgtgagctggctctggaagcaggagatggacgagaatccccagcagctgaagctggaaaagggccgcatggaagagtcccagaacgaatctctcgccaccctcaccatccaaggcatccggtttgaggacaatggcatctacttctgccagcagaagtgcaacaacacctcggaggtctaccagggctgcggcacagagctgcgagtcatgggattcagcaccttggcacagctgaagcagaggaacacgctgaaggatggtatcatcatgatccagacgctgctgatcatcctcttcatcatcgtgcctatcttcctgctgctggacaaggatgacagcaaggctggcatggaggaagatcacacctacgaggctggacttttgaccgaaggccctatgggaccttgtgcccgccgaccgggattgagtggctgggtgagcccggccggggtgaccggtcccctgctggggggcccggccgggggtcgggccgggcggccccttcggccctg

SEQ ID NO: 438492 - DNA, 1152 bp, Homo sapiens
ggggtcgaactaggctaggtacgaggcctgggtgttcaaggagcctcggacgttgtcacgggtttggggtcggggacagagcggtgaccatggccaggctggcgttgtctcctgtgcccagccactggatggtggcgttgctgctgctgctctcagctgagccagtaccagcagccagatcggaggaccggtaccggaatcccaaaggtagtgcttgttcgcggatctggcagagcccacgtttcatagccaggaaacggggcttcacggtgaaaatgcactgctacatgaacagcgcctccggcaatgtgagctggctctggaagcaggagatggacgagaatccccagcagctgaagctggaaaagggccgcatggaagagtcccagaacgaatctctcgccaccctcaccatccaaggcatccggtttgaggacaatggcatctacttctgccagcagaagtgcaacaacacctcggaggtctaccagggctgcggcacagagctgcgagtcatgggattcagcaccttggcacagctgaagcagaggaacacgctgaaggatggtatcatcatgatccagacgctgctgatcatcctcttcatcatcgtgcctatcttcctgctgctggacaaggatgacagcaaggctggcatggaggaagatcacacctacgagggcctggacattgaccagacagccacctatgaggacatagtgacgctgcggacaggggaagtgaagtggtctgtaggtgagcacccaggccaggagtgagagccaggtcgccccatgacctgggtgcaggctccctggcctcagtgactgcttcggagctgcctggctcatggcccaacccctttcccggaccccccagctggcctctgaagctggcccaccagagctgccatttgtctccagcccctggtccccagctcttgccaaagggcctggagtagaaggacaacagggcagcaacttggagggagttctctggggatggacgggacccagccttctgggggtgctatgaggtgatccgtccccacacatgggatgggggaggcagagactggtccagagcccgcaaatggagccctggcctccagtgccttcccccgtggaataaacggtgtgtcctgagaaacca

SEQ ID NO: 438493 - DNA, 988 bp, Homo sapiens
ggggtcgaactaggctaggtacgaggcctgggtgttcaaggagcctcggacgttgtcacgggtttggggtcggggacagagcggtgaccatggccaggctggcgttgtctcctgtgcccagccactggatggtggcgttgctgctgctgctctcagctgagccagtaccagcagccagatcggaggaccggtaccggaatcccaaaggtagtgcttgttcgcggatctggcagagcccacgtttcatagccaggaaacggggcttcacggtgaaaatgcactgctacatgaacagcgcctccggcaatgtgagctggctctggaagcaggagatggacgagaatccccagcagctgaagctggaaaagggccgcatggaagagtcccagaacgaatctctcgccaccctcaccatccaaggcatccggtttgaggacaatggcatctacttctgccagcagaagtgcaacaacacctcggaggtctaccagggctgcggcacagagctgcgagtcatgggattcagcaccttggcacagctgaagcagaggaacacgctgaaggatggtatcatcatgatccagacgctgctgatcatcctcttcatcatcgtgcctatcttcctgctgctggacaaggatgacagcaaggctggcatggaggaagatcacacctacgagggcctggacattgaccagacagccacctatgaggacatagtgacgctgcggacaggggaagtgaagtggtctgtaggtgagcacccaggccaggagtgagagccaggtcgccccatgacctgggtgcaggctccctggcctcagtgactgcttcggagctgcctggctcatggcccaacccctttcccggaccccccagctggcctctgaagctggcccaccagagctgccatttgtctccagcccctggtccggccctttggcaagagctggggaccaggggctggagacaaatgcagcctgaatgg

SEQ ID NO: 438494 - DNA, 422 bp, Homo sapiens
cctcggacgttgtcacgggtttggggtcggggacagagcggtgaccatggccaggctggcgttgtctcctgtgcccagccactggatggtggcgttgctgctgctgctctcaggtacagaacccacgacgaggcctgtggggtttgctctcatctccagctgtctgggccctgcggctctgcctcctgcttgctccaccctcctcctctgtctctcactctttaccgcctgtctccctctcatggccctggggcctgggtctgtgggtgtcagctgcacgtggtgatgggctcaggagcctgtggccccagttcctctcctgcctggagagcatcaggctgagctgggcatgaggagcaaaccagagttagcaaccaggaccgtggaagaactaggctcaggaggaagagaggctgagggcg

SEQ ID NO: 438495 - DNA, 681 bp, Homo sapiens
  misc_feature (681)..(681): n is a, c, g, or t
ccgtacgacaatatggcggcgcttagttgcatgaaggcggaaactctgtgacttccggtccgtagtggggcctgcggtgggagtgggaaggaaggcggagggaaccatgcgaggttctgagaattgcggcgagggtcgcctcgagagacggtttctgagcaggaattctgaaatccccaccacttcctccctccgggggatttgatcccctatggccaccgctaacagcatcatcgtgctggatgatgatgacgaagatgaagcagctgctcagccagggccctcccacccactccccaatgcggcctcacctggggcagaagcccctagctcctctgagcctcatggggccagaggaagcagtagttcgggcggcaagaaatgctacaagctggagaatgagaagctgttcgaagagttccttgaactttgtaagatgcagacagcagaccaccctgaggtggtcccattcctctataaccggcagcaacgtgcccactctctgtttttggcctcggcggagttctgcaacatcctctctagggtcctgtctcgggcccggagccggccagccaagctctatgtctacatcaatgagctctgcactgttctcaaggcccactcagccaataacccttcccacacaccctctcttggaccccacctgcctgcctgcctttn

SEQ ID NO: 438496 - DNA, 526 bp, Homo sapiens
ccgtacgacaatatggcggcgcttagttgcatgaaggcggaaactctgtgacttccggtccgtagtggggcctgcggtgggagtgggaaggaaggcggagggaaccatgcgaggttctgagaattgcggcgagggtcgcctcgagagacggtttctgagcaggaattctgaaatccccaccacttcctccctccgggggatttgatcccctatggccaccgctaacagcatcatcgtgctggatgatgatgacgaagatgaagcagctgctcagccagggccctcccacccactccccaatgcggcctcacctggggcagaagcccctagctcctctgagcctcatggggccagaggaagcagtagttcgggcggcaagaaatgctacaagctggagaatgagaagctgttcgaagaggtgagctttagcggggaagattgttgtaccccagggagggggatggctgactggttctcctgtcctttctttcccactaaccccacctcccctttctctcaaccccct

SEQ ID NO: 438497 - DNA, 2982 bp, Homo sapiens
ccgtacgacaatatggcggcgcttagttgcatgaaggcggaaactctgtgacttccggtccgtagtggggcctgcggtgggagtgggaaggaaggcggagggaaccatgcgaggttctgagaattgcggcgagggtcgcctcgagagacggtttctgagatcccctatggccaccgctaacagcatcatcgtgctggatgatgatgacgaagatgaagcagctgctcagccagggccctcccacccactccccaatgcggcctcacctggggcagaagcccctagctcctctgagcctcatggggccagaggaagcagtagttcgggcggcaagaaatgctacaagctggagaatgagaagctgttcgaagagttccttgaactttgtaagatgcagacagcagaccaccctgaggtggtcccattcctctataaccggcagcaacgtgcccactctctgtttttggcctcggcggagttctgcaacatcctctctagggtcctgtctcgggcccggagccggccagccaagctctatgtctacatcaatgagctctgcactgttctcaaggcccactcagccaaaaagaagctgaacttggcccctgccgccaccacctccaatgagccctctgggaataaccctcccacacacctctccttggaccccacaaatgctgaaaacactgcctctcagtctccaaggacccgtggttcccggcggcagatccagcgtttggagcagctgctggcgctctatgtggcagagatccggcggctgcaggaaaaggagttggatctctcagaattggatgacccagactccgcatacctgcaggaggcacggttgaagcgtaagctgatccgcctctttgggcgactatgtgagctgaaagactgctcttcactgaccggccgtgtcatagagcagcgcatcccctaccgtggcacccgctacccagaggttaacaggcgcattgagcggctcatcaacaagccagggcctgataccttccctgactatggggatgtgcttcgggctgtagagaaggcagctgcccgacacagccttggcctcccccgacagcagctccagctcatggctcaggatgccttccgagatgtgggcatcaggttacaggagcgacgtcacctcgatctcatctacaactttggctgccacctcacagatgactataggccaggcgttgaccctgcactatcagatcctgtgttggcccggcgccttcgggaaaaccggagtttggccatgagtcggctggatgaggtcatctccaaatatgcaatgttgcaagacaaaagtgaggagggcgagagaaaaaagagaagagctcggctccaaggcacctcttcccactctgcagacacccccgaagcctccttggattctggtgagggccctagtggaatggcatcccaggggtgcccttctgcctccagagctgagacagatgacgaagacgatgaggagagtgatgaggaagaggaggaggaggaggaagaagaagaggaggaggccacagattctgaagaggaggaggatctggaacagatgcaggagggtcaggaggatgatgaagaggaggacgaagaggaagaagcagcagcaggtaaagatggagacaagagccccatgtcctcactacagatctccaatgaaaagaacctggaacctggcaaacagatcagcagatcttcaggggagcagcaaaacaaaggacgcatagtgtcaccatcgttactgtcagaagaacccctggccccctccagcatagatgctgaaagcaatggagaacagcctgaggagctgaccctggaggaagaaagccctgtgtctcagctctttgagctagagattgaagctttgcccctggataccccttcctctgtggagacggacatttcctcttccaggaagcaatcagaggagcccttcaccactgtcttagagaatggagcaggcatggtctcttctacttccttcaatggaggcgtctctcctcacaactggggagattctggtcccccctgcaaaaaatctcggaaggagaagaagcaaacaggatcagggccattaggaaacagctatgtggaaaggcaaaggtcagtgcatgagaagaatgggaaaaagatatgtaccctgcccagcccaccttcccccttggcttccttggccccagttgctgattcctccacgagggtggactctcccagccatggcctggtgaccagctccctctgcatcccttctccagcccggctgtcccaaaccccccattcacagcctcctcggcctggtacttgcaagacaagtgtggccacacaatgcgatccagaagagatcatcgtgctctcagactctgattagctgcctccccttctccctgcctccagaatgttctgggataacatttggaggaaggtgggaagcagatgactgaggaagggatggactaagctaatccccttttggtggtgtttctttaaaaaaaaaaaaaagcttaagttttacacagaaacattaataaacaataaagttcttttcttactgtaaaaaaaaaaaaaaaaaaaaaaaaaaaaaaaaaaaaaaaaaaaacaaaacaacaaaaaaaaaaaaaaaaaaaaaacaacagacgggccgcgcggcgcccccccaaaaacccccccccggcgcgccccacaccccccccccccccattttgtatagatacaaagggcgcccccacttgagtgagcggagatcaaatttatataacaggaaacgcgaagcgtcgcgccgcgctgattattatataaaccatagattaagtagagtgaagaaaaaacagtgatctgaagggggcgatcatttggtcgagggaagccaaacctaatttttgttggtgtgtggccatcacacatagtgaggcaacaactccccgctgtgaaagttattaagagcgactagggggagaactatcc

SEQ ID NO: 438498 - DNA, 3064 bp, Homo sapiens
ttggggagagctgggcgctgagtctgaggggaaagctgtggtaccttcctgtccctgaaagggagtggagcggccgggggctgaactgggggagggggatttggcgggaagcgcatctagcggaccggccggacccacggttgggatctaagaggaatcgcgagagcgtagcgcggtgcggggggacttttgatcacaggaattctgaaatccccaccacttcctccctccgggggatttgatcccctatggccaccgctaacagcatcatcgtgctggatgatgatgacgaagatgaagcagctgctcagccagggccctcccacccactccccaatgcggcctcacctggggcagaagcccctagctcctctgagcctcatggggccagaggaagcagtagttcgggcggcaagaaatgctacaagctggagaatgagaagctgttcgaagagttccttgaactttgtaagatgcagacagcagaccaccctgaggtggtcccattcctctataaccggcagcaacgtgcccactctctgtttttggcctcggcggagttctgcaacatcctctctagggtcctgtctcgggcccggagccggccagccaagctctatgtctacatcaatgagctctgcactgttctcaaggcccactcagccaaaaagaagctgaacttggcccctgccgccaccacctccaatgagccctctgggaataaccctcccacacacctctccttggaccccacaaatgctgaaaacactgcctctcagtctccaaggacccgtggttcccggcggcagatccagcgtttggagcagctgctggcgctctatgtggcagagatccggcggctgcaggaaaaggagttggatctctcagaattggatgacccagactccgcatacctgcaggaggcacggttgaagcgtaagctgatccgcctctttgggcgactatgtgagctgaaagactgctcttcactgaccggccgtgtcatagagcagcgcatcccctaccgtggcacccgctacccagaggttaacaggcgcattgagcggctcatcaacaagccagggcctgataccttccctgactatggggatgtgcttcgggctgtagagaaggcagctgcccgacacagccttggcctcccccgacagcagctccagctcatggctcaggatgccttccgagatgtgggcatcaggttacaggagcgacgtcacctcgatctcatctacaactttggctgccacctcacagatgactataggccaggcgttgaccctgcactatcagatcctgtgttggcccggcgccttcgggaaaaccggagtttggccatgagtcggctggatgaggtcatctccaaatatgcaatgttgcaagacaaaagtgaggagggcgagagaaaaaagagaagagctcggctccaaggcacctcttcccactctgcagacacccccgaagcctccttggattctggtgagggccctagtggaatggcatcccaggggtgcccttctgcctccagagctgagacagatgacgaagacgatgaggagagtgatgaggaagaggaggaggaggaggaagaagaagaggaggaggccacagattctgaagaggaggaggatctggaacagatgcaggagggtcaggaggatgatgaagaggaggacgaagaggaagaagcagcagcaggtaaagatggagacaagagccccatgtcctcactacagatctccaatgaaaagaacctggaacctggcaaacagatcagcagatcttcaggggagcagcaaaacaaaggacgcatagtgtcaccatcgttactgtcagaagaacccctggccccctccagcatagatgctgaaagcaatggagaacagcctgaggagctgaccctggaggaagaaagccctgtgtctcagctctttgagctagagattgaagctttgcccctggataccccttcctctgtggagacggacatttcctcttccaggaagcaatcagaggagcccttcaccactgtcttagagaatggagcaggcatggtctcttctacttccttcaatggaggcgtctctcctcacaactggggagattctggtcccccctgcaaaaaatctcggaaggagaagaagcaaacaggatcagggccattaggaaacagctatgtggaaaggcaaaggtcagtgcatgagaagaatgggaaaaagatatgtaccctgcccagcccaccttcccccttggcttccttggccccagttgctgattcctccacgagggtggactctcccagccatggcctggtgaccagctccctctgcatcccttctccagcccggctgtcccaaaccccccattcacagcctcctcggcctggtacttgcaagacaagtgtggccacacaatgcgatccagaagagatcatcgtgctctcagactctgattagctgcctccccttctccctgcctccagaatgttctgggataacatttggaggaaggtgggaagcagatgactgaggaagggatggactaagctaatccccttttggtggtgtttctttaaaaaaaaaaaaaagcttaagttttacacagaaacattaataaacaataaagttcttttcttactgtaaaaaaaaaaaaaaaaaaaaaaaaaaaaaaaaaaaaaaaaaaaacaaaacaacaaaaaaaaaaaaaaaaaaaaaacaacagacgggccgcgcggcgcccccccaaaaacccccccccggcgcgccccacaccccccccccccccattttgtatagatacaaagggcgcccccacttgagtgagcggagatcaaatttatataacaggaaacgcgaagcgtcgcgccgcgctgattattatataaaccatagattaagtagagtgaagaaaaaacagtgatctgaagggggcgatcatttggtcgagggaagccaaacctaatttttgttggtgtgtggccatcacacatagtgaggcaacaactccccgctgtgaaagttattaagagcgactagggggagaactatcc

SEQ ID NO: 438499 - DNA, 2958 bp, Homo sapiens
ccgtacgacaatatggcggcgcttagttgcatgaaggcggaaactctgtgacttccggtccgtagtggggcctgcggtgggagtgggaaggaaggcggagggaaccatgcgaggttctgagaattgcggcgagggtcgcctcgagagacggtttctgagcatcatcgtgctggatgatgatgacgaagatgaagcagctgctcagccagggccctcccacccactccccaatgcggcctcacctggggcagaagcccctagctcctctgagcctcatggggccagaggaagcagtagttcgggcggcaagaaatgctacaagctggagaatgagaagctgttcgaagagttccttgaactttgtaagatgcagacagcagaccaccctgaggtggtcccattcctctataaccggcagcaacgtgcccactctctgtttttggcctcggcggagttctgcaacatcctctctagggtcctgtctcgggcccggagccggccagccaagctctatgtctacatcaatgagctctgcactgttctcaaggcccactcagccaaaaagaagctgaacttggcccctgccgccaccacctccaatgagccctctgggaataaccctcccacacacctctccttggaccccacaaatgctgaaaacactgcctctcagtctccaaggacccgtggttcccggcggcagatccagcgtttggagcagctgctggcgctctatgtggcagagatccggcggctgcaggaaaaggagttggatctctcagaattggatgacccagactccgcatacctgcaggaggcacggttgaagcgtaagctgatccgcctctttgggcgactatgtgagctgaaagactgctcttcactgaccggccgtgtcatagagcagcgcatcccctaccgtggcacccgctacccagaggttaacaggcgcattgagcggctcatcaacaagccagggcctgataccttccctgactatggggatgtgcttcgggctgtagagaaggcagctgcccgacacagccttggcctcccccgacagcagctccagctcatggctcaggatgccttccgagatgtgggcatcaggttacaggagcgacgtcacctcgatctcatctacaactttggctgccacctcacagatgactataggccaggcgttgaccctgcactatcagatcctgtgttggcccggcgccttcgggaaaaccggagtttggccatgagtcggctggatgaggtcatctccaaatatgcaatgttgcaagacaaaagtgaggagggcgagagaaaaaagagaagagctcggctccaaggcacctcttcccactctgcagacacccccgaagcctccttggattctggtgagggccctagtggaatggcatcccaggggtgcccttctgcctccagagctgagacagatgacgaagacgatgaggagagtgatgaggaagaggaggaggaggaggaagaagaagaggaggaggccacagattctgaagaggaggaggatctggaacagatgcaggagggtcaggaggatgatgaagaggaggacgaagaggaagaagcagcagcaggtaaagatggagacaagagccccatgtcctcactacagatctccaatgaaaagaacctggaacctggcaaacagatcagcagatcttcaggggagcagcaaaacaaaggacgcatagtgtcaccatcgttactgtcagaagaacccctggccccctccagcatagatgctgaaagcaatggagaacagcctgaggagctgaccctggaggaagaaagccctgtgtctcagctctttgagctagagattgaagctttgcccctggataccccttcctctgtggagacggacatttcctcttccaggaagcaatcagaggagcccttcaccactgtcttagagaatggagcaggcatggtctcttctacttccttcaatggaggcgtctctcctcacaactggggagattctggtcccccctgcaaaaaatctcggaaggagaagaagcaaacaggatcagggccattaggaaacagctatgtggaaaggcaaaggtcagtgcatgagaagaatgggaaaaagatatgtaccctgcccagcccaccttcccccttggcttccttggccccagttgctgattcctccacgagggtggactctcccagccatggcctggtgaccagctccctctgcatcccttctccagcccggctgtcccaaaccccccattcacagcctcctcggcctggtacttgcaagacaagtgtggccacacaatgcgatccagaagagatcatcgtgctctcagactctgattagctgcctccccttctccctgcctccagaatgttctgggataacatttggaggaaggtgggaagcagatgactgaggaagggatggactaagctaatccccttttggtggtgtttctttaaaaaaaaaaaaaagcttaagttttacacagaaacattaataaacaataaagttcttttcttactgtaaaaaaaaaaaaaaaaaaaaaaaaaaaaaaaaaaaaaaaaaaaacaaaacaacaaaaaaaaaaaaaaaaaaaaaacaacagacgggccgcgcggcgcccccccaaaaacccccccccggcgcgccccacaccccccccccccccattttgtatagatacaaagggcgcccccacttgagtgagcggagatcaaatttatataacaggaaacgcgaagcgtcgcgccgcgctgattattatataaaccatagattaagtagagtgaagaaaaaacagtgatctgaagggggcgatcatttggtcgagggaagccaaacctaatttttgttggtgtgtggccatcacacatagtgaggcaacaactccccgctgtgaaagttattaagagcgactagggggagaactatcc

SEQ ID NO: 438500 - DNA, 2768 bp, Homo sapiens
ccgtacgacaatatggcggcgcttagttgcatgaaggcggaaactctgtgacttccggtccgtagtggggcctgcggtgggagtgggaaggaaggcggagggaaccatgcgaggttctgagaattgcggcgagggtcgcctcgagagacggtttctgagttccttgaactttgtaagatgcagacagcagaccaccctgaggtggtcccattcctctataaccggcagcaacgtgcccactctctgtttttggcctcggcggagttctgcaacatcctctctagggtcctgtctcgggcccggagccggccagccaagctctatgtctacatcaatgagctctgcactgttctcaaggcccactcagccaaaaagaagctgaacttggcccctgccgccaccacctccaatgagccctctgggaataaccctcccacacacctctccttggaccccacaaatgctgaaaacactgcctctcagtctccaaggacccgtggttcccggcggcagatccagcgtttggagcagctgctggcgctctatgtggcagagatccggcggctgcaggaaaaggagttggatctctcagaattggatgacccagactccgcatacctgcaggaggcacggttgaagcgtaagctgatccgcctctttgggcgactatgtgagctgaaagactgctcttcactgaccggccgtgtcatagagcagcgcatcccctaccgtggcacccgctacccagaggttaacaggcgcattgagcggctcatcaacaagccagggcctgataccttccctgactatggggatgtgcttcgggctgtagagaaggcagctgcccgacacagccttggcctcccccgacagcagctccagctcatggctcaggatgccttccgagatgtgggcatcaggttacaggagcgacgtcacctcgatctcatctacaactttggctgccacctcacagatgactataggccaggcgttgaccctgcactatcagatcctgtgttggcccggcgccttcgggaaaaccggagtttggccatgagtcggctggatgaggtcatctccaaatatgcaatgttgcaagacaaaagtgaggagggcgagagaaaaaagagaagagctcggctccaaggcacctcttcccactctgcagacacccccgaagcctccttggattctggtgagggccctagtggaatggcatcccaggggtgcccttctgcctccagagctgagacagatgacgaagacgatgaggagagtgatgaggaagaggaggaggaggaggaagaagaagaggaggaggccacagattctgaagaggaggaggatctggaacagatgcaggagggtcaggaggatgatgaagaggaggacgaagaggaagaagcagcagcaggtaaagatggagacaagagccccatgtcctcactacagatctccaatgaaaagaacctggaacctggcaaacagatcagcagatcttcaggggagcagcaaaacaaaggacgcatagtgtcaccatcgttactgtcagaagaacccctggccccctccagcatagatgctgaaagcaatggagaacagcctgaggagctgaccctggaggaagaaagccctgtgtctcagctctttgagctagagattgaagctttgcccctggataccccttcctctgtggagacggacatttcctcttccaggaagcaatcagaggagcccttcaccactgtcttagagaatggagcaggcatggtctcttctacttccttcaatggaggcgtctctcctcacaactggggagattctggtcccccctgcaaaaaatctcggaaggagaagaagcaaacaggatcagggccattaggaaacagctatgtggaaaggcaaaggtcagtgcatgagaagaatgggaaaaagatatgtaccctgcccagcccaccttcccccttggcttccttggccccagttgctgattcctccacgagggtggactctcccagccatggcctggtgaccagctccctctgcatcccttctccagcccggctgtcccaaaccccccattcacagcctcctcggcctggtacttgcaagacaagtgtggccacacaatgcgatccagaagagatcatcgtgctctcagactctgattagctgcctccccttctccctgcctccagaatgttctgggataacatttggaggaaggtgggaagcagatgactgaggaagggatggactaagctaatccccttttggtggtgtttctttaaaaaaaaaaaaaagcttaagttttacacagaaacattaataaacaataaagttcttttcttactgtaaaaaaaaaaaaaaaaaaaaaaaaaaaaaaaaaaaaaaaaaaaacaaaacaacaaaaaaaaaaaaaaaaaaaaaacaacagacgggccgcgcggcgcccccccaaaaacccccccccggcgcgccccacaccccccccccccccattttgtatagatacaaagggcgcccccacttgagtgagcggagatcaaatttatataacaggaaacgcgaagcgtcgcgccgcgctgattattatataaaccatagattaagtagagtgaagaaaaaacagtgatctgaagggggcgatcatttggtcgagggaagccaaacctaatttttgttggtgtgtggccatcacacatagtgaggcaacaactccccgctgtgaaagttattaagagcgactagggggagaactatcc

SEQ ID NO: 438501 - DNA, 3221 bp, Homo sapiens
ccgtacgacaatatggcggcgcttagttgcatgaaggcggaaactctgtgacttccggtccgtagtggggcctgcggtgggagtgggaaggaaggcggagggaaccatgcgaggttctgagaattgcggcgagggtcgcctcgagagacggtttctgagcaggaattctgaaatccccaccacttcctccctccgggggatttgatcccctatggccaccgctaacagcatcatcgtgctggatgatgatgacgaagatgaagcagctgctcagccagggccctcccacccactccccaatgcggcctcacctggggcagaagcccctagctcctctgagcctcatggggccagaggaagcagtagttcgggcggcaagaaatgctacaagctggagaatgagaagctgttcgaagagttccttgaactttgtaagatgcagacagcagaccaccctgaggtggtcccattcctctataaccggcagcaacgtgcccactctctgtttttggcctcggcggagttctgcaacatcctctctagggtcctgtctcgggcccggagccggccagccaagctctatgtctacatcaatgagctctgcactgttctcaaggcccactcagccaaaaagaagctgaacttggcccctgccgccaccacctccaatgagccctctgggaataaccctcccacacacctctccttggaccccacaaatgctgaaaacactgcctctcagtctccaaggacccgtggttcccggcggcagatccagcgtttggagcagctgctggcgctctatgtggcagagatccggcggctgcaggaaaaggagttggatctctcagaattggatgacccagactccgcatacctgcaggaggcacggttgaagcgtaagctgatccgcctctttgggcgactatgtgagctgaaagactgctcttcactgaccggccgtgtcatagagcagcgcatcccctaccgtggcacccgctacccagaggttaacaggcgcattgagcggctcatcaacaagccagggcctgataccttccctgactatggggatgtgcttcgggctgtagagaaggcagctgcccgacacagccttggcctcccccgacagcagctccagctcatggctcaggatgccttccgagatgtgggcatcaggttacaggagcgacgtcacctcgatctcatctacaactttggctgccacctcacagatgactataggccaggcgttgaccctgcactatcagatcctgtgttggcccggcgccttcgggaaaaccggagtttggccatgagtcggctggatgaggtcatctccaaatatgcaatgttgcaagacaaaagtgaggagggcgagagaaaaaagagaagagctcggctccaaggcacctcttcccactctgcagacacccccgaagcctccttggattctggtgagggccctagtggaatggcatcccaggggtgcccttctgcctccagagctgagacagatgacgaagacgatgaggagagtgatgaggaagaggaggaggaggaggaagaagaagaggaggaggccacagattctgaagaggaggaggatctggaacagatgcaggagggtcaggaggatgatgaagaggaggacgaagaggaagaagcagcagcaggtaaagatggagacaagagccccatgtcctcactacagatctccaatgaaaagaacctggaacctggcaaacagatcagcagatcttcaggggagcagcaaaacaaaggacgcatagtgtcaccatcgttactgtcagaagaacccctggccccctccagcatagatgctgaaagcaatggagaacagcctgaggagctgaccctggaggaagaaagccctgtgtctcagctctttgagctagagattgaagctttgcccctggataccccttcctctgtggagacggacatttcctcttccaggaagcaatcagaggagcccttcaccactgtcttagagaatggagcaggcatggtctcttctacttccttcaatggaggcgtctctcctcacaactggggagattctggtcccccctgcaaaaaatctcggaaggagaagaagcaaacaggatcagggccattaggaaacagctatgtggaaaggcaaaggtcagtgcatgagaagaatgggaaaaagatatgtaccctgcccagcccaccttcccccttggcttccttggccccagttgctgattcctccacgagggtggactctcccagccatggcctggtgaccagctccctctgcatcccttctccagcccggctgtcccaaaccccccattcacagcctcctcggcctggtacttgcaaggtaagaaggggagggcgtgtttcctctgacaatttgttctctttcattggctgtttcagctgctctgtctgaatattccacgtgccacatcctgtctcttcctttttcccacccattttatcctctaaatcctcctgtttcttttctcctgtactccagatctctttgactctttgtctctcacttccctgcagacaagtgtggccacacaatgcgatccagaagagatcatcgtgctctcagactctgattagctgcctccccttctccctgcctccagaatgttctgggataacatttggaggaaggtgggaagcagatgactgaggaagggatggactaagctaatccccttttggtggtgtttctttaaaaaaaaaaaaaagcttaagttttacacagaaacattaataaacaataaagttcttttcttactgtaaaaaaaaaaaaaaaaaaaaaaaaaaaaaaaaaaaaaaaaaaaacaaaacaacaaaaaaaaaaaaaaaaaaaaaacaacagacgggccgcgcggcgcccccccaaaaacccccccccggcgcgccccacaccccccccccccccattttgtatagatacaaagggcgcccccacttgagtgagcggagatcaaatttatataacaggaaacgcgaagcgtcgcgccgcgctgattattatataaaccatagattaagtagagtgaagaaaaaacagtgatctgaagggggcgatcatttggtcgagggaagccaaacctaatttttgttggtgtgtggccatcacacatagtgaggcaacaactccccgctgtgaaagttattaagagcgactagggggagaactatcc

SEQ ID NO: 438502 - DNA, 2195 bp, Homo sapiens
ccgtacgacaatatggcggcgcttagttgcatgaaggcggaaactctgtgacttccggtccgtagtggggcctgcggtgggagtgggaaggaaggcggagggaaccatgcgaggttctgagaattgcggcgagggtcgcctcgagagacggtttctgagcaggaattctgaaatccccaccacttcctccctccgggggatttgatcccctatggccaccgctaacagcatcatcgtgctggatgatgatgacgaagatgaagcagctgctcagccagggccctcccacccactccccaatgcggcctcacctggggcagaagcccctagctcctctgagcctcatggggccagaggaagcagtagttcgggcggcaagaaatgctacaagctggagaatgagaagctgttcgaagaggcgttgaccctgcactatcagatcctgtgttggcccggcgccttcgggaaaaccggagtttggccatgagtcggctggatgaggtcatctccaaatatgcaatgttgcaagacaaaagtgaggagggcgagagaaaaaagagaagagctcggctccaaggcacctcttcccactctgcagacacccccgaagcctccttggattctggtgagggccctagtggaatggcatcccaggggtgcccttctgcctccagagctgagacagatgacgaagacgatgaggagagtgatgaggaagaggaggaggaggaggaagaagaagaggaggaggccacagattctgaagaggaggaggatctggaacagatgcaggagggtcaggaggatgatgaagaggaggacgaagaggaagaagcagcagcaggtaaagatggagacaagagccccatgtcctcactacagatctccaatgaaaagaacctggaacctggcaaacagatcagcagatcttcaggggagcagcaaaacaaaggacgcatagtgtcaccatcgttactgtcagaagaacccctggccccctccagcatagatgctgaaagcaatggagaacagcctgaggagctgaccctggaggaagaaagccctgtgtctcagctctttgagctagagattgaagctttgcccctggataccccttcctctgtggagacggacatttcctcttccaggaagcaatcagaggagcccttcaccactgtcttagagaatggagcaggcatggtctcttctacttccttcaatggaggcgtctctcctcacaactggggagattctggtcccccctgcaaaaaatctcggaaggagaagaagcaaacaggatcagggccattaggaaacagctatgtggaaaggcaaaggtcagtgcatgagaagaatgggaaaaagatatgtaccctgcccagcccaccttcccccttggcttccttggccccagttgctgattcctccacgagggtggactctcccagccatggcctggtgaccagctccctctgcatcccttctccagcccggctgtcccaaaccccccattcacagcctcctcggcctggtacttgcaagacaagtgtggccacacaatgcgatccagaagagatcatcgtgctctcagactctgattagctgcctccccttctccctgcctccagaatgttctgggataacatttggaggaaggtgggaagcagatgactgaggaagggatggactaagctaatccccttttggtggtgtttctttaaaaaaaaaaaaaagcttaagttttacacagaaacattaataaacaataaagttcttttcttactgtaaaaaaaaaaaaaaaaaaaaaaaaaaaaaaaaaaaaaaaaaaaacaaaacaacaaaaaaaaaaaaaaaaaaaaaacaacagacgggccgcgcggcgcccccccaaaaacccccccccggcgcgccccacaccccccccccccccattttgtatagatacaaagggcgcccccacttgagtgagcggagatcaaatttatataacaggaaacgcgaagcgtcgcgccgcgctgattattatataaaccatagattaagtagagtgaagaaaaaacagtgatctgaagggggcgatcatttggtcgagggaagccaaacctaatttttgttggtgtgtggccatcacacatagtgaggcaacaactccccgctgtgaaagttattaagagcgactagggggagaactatcc

SEQ ID NO: 438503 - DNA, 1687 bp, Homo sapiens
ctgctgcttcttcctcttcgtcctcctcttcatcatcctcctgaccctcctgcatctgttccagatcctcctcctcttcccactctgcagacacccccgaagcctccttggattctggtgagggccctagtggaatggcatcccaggggtgcccttctgcctccagagctgagacagatgacgaagacgatgaggagagtgatgaggaagaggaggaggaggaggaagaagaagaggaggaggccacagattctgaagaggaggaggatctggaacagatgcaggagggtcaggaggatgatgaagaggaggacgaagaggaagaagcagcagcaggtaaagatggagacaagagccccatgtcctcactacagatctccaatgaaaagaacctggaacctggcaaacagatcagcagatcttcaggggagcagcaaaacaaaggacgcatagtgtcaccatcgttactgtcagaagaacccctggccccctccagcatagatgctgaaagcaatggagaacagcctgaggagctgaccctggaggaagaaagccctgtgtctcagctctttgagctagagattgaagctttgcccctggataccccttcctctgtggagacggacatttcctcttccaggaagcaatcagaggagcccttcaccactgtcttagagaatggagcaggcatggtctcttctacttccttcaatggaggcgtctctcctcacaactggggagattctggtcccccctgcaaaaaatctcggaaggagaagaagcaaacaggatcagggccattaggaaacagctatgtggaaaggcaaaggtcagtgcatgagaagaatgggaaaaagatatgtaccctgcccagcccaccttcccccttggcttccttggccccagttgctgattcctccacgagggtggactctcccagccatggcctggtgaccagctccctctgcatcccttctccagcccggctgtcccaaaccccccattcacagcctcctcggcctggtacttgcaagacaagtgtggccacacaatgcgatccagaagagatcatcgtgctctcagactctgattagctgcctccccttctccctgcctccagaatgttctgggataacatttggaggaaggtgggaagcagatgactgaggaagggatggactaagctaatccccttttggtggtgtttctttaaaaaaaaaaaaaagcttaagttttacacagaaacattaataaacaataaagttcttttcttactgtaaaaaaaaaaaaaaaaaaaaaaaaaaaaaaaaaaaaaaaaaaaacaaaacaacaaaaaaaaaaaaaaaaaaaaaacaacagacgggccgcgcggcgcccccccaaaaacccccccccggcgcgccccacaccccccccccccccattttgtatagatacaaagggcgcccccacttgagtgagcggagatcaaatttatataacaggaaacgcgaagcgtcgcgccgcgctgattattatataaaccatagattaagtagagtgaagaaaaaacagtgatctgaagggggcgatcatttggtcgagggaagccaaacctaatttttgttggtgtgtggccatcacacatagtgaggcaacaactccccgctgtgaaagttattaagagcgactagggggagaactatcc

SEQ ID NO: 438504 - DNA, 2944 bp, Homo sapiens
ccgtacgacaatatggcggcgcttagttgcatgaaggcggaaactctgtgacttccggtccgtagtggggcctgcggtgggagtgggaaggaaggcggagggaaccatgcgaggttctgagaattgcggcgagggtcgcctcgagagacggtttctgagcaggaattctgaaatccccaccacttcctccctccgggggatttgatcccctatggccaccgctaacagcatcatcgtgctggatgatgatgacgaagatgaagcagctgctcagccagggccctcccacccactccccaatgcggcctcacctggggcagaagcccctagctcctctgagcctcatggggccagaggaagcagtagttcgggcggcaagaaatgctacaagctggagaatgagaagctgttcgaagagttccttgaactttgtaagatgcagacagcagaccaccctgaggtggtcccattcctctataaccggcagcaacgtgcccactctctgtttttggcctcggcggagttctgcaacatcctctctagggtcctgtctcgggcccggagccggccagccaagctctatgtctacatcaatgagctctgcactgttctcaaggcccactcagccaaaaagaagctgaacttggcccctgccgccaccacctccaatgagccctctgggaataaccctcccacacacctctccttggaccccacaaatgctgaaaacactgcctctcagtctccaaggacccgtggttcccggcggcagatccagcgtttggagcagctgctggcgctctatgtggcagagatccggcggctgcaggaaaaggagttggatctctcagaattggatgacccagactccgcatacctgcaggaggcacggttgaagcgtaagctgatccgcctctttgggcgactatgtgagctgaaagactgctcttcactgaccggccgtgtcatagagcagcgcatcccctaccgtggcacccgctacccagaggttaacaggcgcattgagcggctcatcaacaagccagggcctgataccttccctgactatggggatgtgcttcgggctgtagagaaggcagctgcccgacacagccttggcctcccccgacagcagctccagctcatggctcaggatgccttccgagatgtgggcatcaggttacaggagcgacgtcacctcgatctcatctacaactttggctgccacctcacagatgactataggccaggcgttgaccctgcactatcagatcctgtgttggcccggcgccttcgggaaaaccggagtttggccatgagtcggctggatgaggtcatctccaaatatgcaatgttgcaagacaaaagtgaggagggcgagagaaaaaagagaagagctcggctccaaggcacctcttcccactctgcagacacccccgaagcctccttggattctggtgagggccctagtggaatggcatcccaggggtgcccttctgcctccagagctgagacagatgacgaagacgatgaggagagtgatgaggaagaggaggaggaggaggaagaagaagaggaggaggccacagattctgaagaggaggaggatctggaacagatgcaggagggtcaggaggatgatgaagaggaggacgaagaggaagaagcagcagcaggtaaagatggagacaagagccccatgtcctcactacagatctccaatgaaaagaacctggaacctggcaaacagatcagcagatcttcaggggagcagcaaaacaaaggacgcatagtgtcaccatcgttactgtcagaagaacccctggccccctccagcatagatgctgaaagcaatggagaacagcctgaggagctgaccctggaggaagaaagccctgtgtctcagctctttgagctagagattgaagctttgcccctggataccccttcctctgtggagacggacatttcctcttccaggaagcaatcagaggagcccttcaccactgtcttagagaatggagcaggcatggtctcttctacttccttcaatggaggcgtctctcctcacaactggggagattctggtcccccctgcaaaaaatctcggaaggagaagaagcaaacaggatcagggccattaggaaacagctatgtggaaaggcaaaggtcagtgcatgagaagaatgggaaaaagatatgtaccctgcccagcccaccttcccccttggcttccttggcggctgtcccaaaccccccattcacagcctcctcggcctggtacttgcaagacaagtgtggccacacaatgcgatccagaagagatcatcgtgctctcagactctgattagctgcctccccttctccctgcctccagaatgttctgggataacatttggaggaaggtgggaagcagatgactgaggaagggatggactaagctaatccccttttggtggtgtttctttaaaaaaaaaaaaaagcttaagttttacacagaaacattaataaacaataaagttcttttcttactgtaaaaaaaaaaaaaaaaaaaaaaaaaaaaaaaaaaaaaaaaaaaacaaaacaacaaaaaaaaaaaaaaaaaaaaaacaacagacgggccgcgcggcgcccccccaaaaacccccccccggcgcgccccacaccccccccccccccattttgtatagatacaaagggcgcccccacttgagtgagcggagatcaaatttatataacaggaaacgcgaagcgtcgcgccgcgctgattattatataaaccatagattaagtagagtgaagaaaaaacagtgatctgaagggggcgatcatttggtcgagggaagccaaacctaatttttgttggtgtgtggccatcacacatagtgaggcaacaactccccgctgtgaaagttattaagagcgactagggggagaactatcc

SEQ ID NO: 438505 - DNA, 2750 bp, Homo sapiens
ccgtacgacaatatggcggcgcttagttgcatgaaggcggaaactctgtgacttccggtccgtagtggggcctgcggtgggagtgggaaggaaggcggagggaaccatgcgaggttctgagaattgcggcgagggtcgcctcgagagacggtttctgagcaggaattctgaaatccccaccacttcctccctccgggggatttgatcccctatggccaccgctaacagcatcatcgtgctggatgatgatgacgaagatgaagcagctgctcagccagggccctcccacccactccccaatgcggcctcacctggggcagaagcccctagctcctctgagcctcatggggccagaggaagcagtagttcgggcggcaagaaatgctacaagctggagaatgagaagctgttcgaagagttccttgaactttgtaagatgcagacagcagaccaccctgaggtggtcccattcctctataaccggcagcaacgtgcccactctctgtttttggcctcggcggagttctgcaacatcctctctagggtcctgtctcgggcccggagccggccagccaagctctatgtctacatcaatgagctctgcactgttctcaaggcccactcagccaaaaagaagctgaacttggcccctgccgccaccacctccaatgagccctctgggaataaccctcccacacacctctccttggaccccacaaatgctgaaaacactgcctctcagtctccaaggacccgtggttcccggcggcagatccagcgtttggagcagctgctggcgctctatgtggcagagatccggcggctgcaggaaaaggagttggatctctcagaattggatgacccagactccgcatacctgcaggaggcacggttgaagcgtaagctgatccgcctctttgggcgactatgtgagctgaaagactgctcttcactgaccggccgtgtcatagagcagcgcatcccctaccgtggcacccgctacccagaggttaacaggcgcattgagcggctcatcaacaagccagggcctgataccttccctgactatggggatgtgcttcgggctgtagagaaggcagctgcccgacacagccttggcctcccccgacagcagctccagctcatggctcaggatgccttccgagatgtgggcatcaggttacaggagcgacgtcacctcgatctcatctacaactttggctgccacctcacagatgactataggccaggcgttgaccctgcactatcagatcctgtgttggcccggcgccttcgggaaaaccggagtttggccatgagtcggctggatgaggtcatctccaaatatgcaatgttgcaagacaaaagtgaggagggcgagagaaaaaagagaagagctcggctccaaggcacctcttcccactctgcagacacccccgaagcctccttggattctggtgagggccctagtggaatggcatcccaggggtgcccttctgcctccagagctgagacagatgacgaagacgatgaggagagtgatgaggaagaggaggaggaggaggaagaagaagaggaggaggccacagattctgaagaggaggaggatctggaacagatgcaggagggtcaggaggatgatgaagaggaggacgaagaggaagaagcagcagcaggtaaagatggagacaagagccccatgtcctcactacagatctccaatgaaaagaacctggaacctggcaaacagatcagcagatcttcaggggagcagcaaaacaaaggacgcatagtgtcaccatcgttactgtcagaagaacccctggccccctccagcatagatgctgaaagcaatggagaacagcctgaggagctgaccctggaggaagaaagccctgtgtctcagctctttgagctagagattgaagctttgcccctggataccccttcctctgtggagacggacatttcctcttccaggaagcaatcagaggagcccttcaccactgtcttagagaatggagcaggcatggtctcttctacttccggctgtcccaaaccccccattcacagcctcctcggcctggtacttgcaagacaagtgtggccacacaatgcgatccagaagagatcatcgtgctctcagactctgattagctgcctccccttctccctgcctccagaatgttctgggataacatttggaggaaggtgggaagcagatgactgaggaagggatggactaagctaatccccttttggtggtgtttctttaaaaaaaaaaaaaagcttaagttttacacagaaacattaataaacaataaagttcttttcttactgtaaaaaaaaaaaaaaaaaaaaaaaaaaaaaaaaaaaaaaaaaaaacaaaacaacaaaaaaaaaaaaaaaaaaaaaacaacagacgggccgcgcggcgcccccccaaaaacccccccccggcgcgccccacaccccccccccccccattttgtatagatacaaagggcgcccccacttgagtgagcggagatcaaatttatataacaggaaacgcgaagcgtcgcgccgcgctgattattatataaaccatagattaagtagagtgaagaaaaaacagtgatctgaagggggcgatcatttggtcgagggaagccaaacctaatttttgttggtgtgtggccatcacacatagtgaggcaacaactccccgctgtgaaagttattaagagcgactagggggagaactatcc

SEQ ID NO: 438506 - DNA, 1476 bp, Homo sapiens
  misc_feature (72)..(72): n is a, c, g, or t
aggcagtaggcacccctgggatgcattccactagggcctcaccagaatcaaggaggcttcgggggtgtcttntgcctccagagctgagacagatgacgaggacgaagaggaagaagcagcagcaggtaaagatggagacaagagccccatgtcctcactacagatctccaatgaaaagaacctggaacctggcaaacagatcagcagatcttcaggggagcagcaaaacaaaggacgcatagtgtcaccatcgttactgtcagaagaacccctggccccctccagcatagatgctgaaagcaatggagaacagcctgaggagctgaccctggaggaagaaagccctgtgtctcagctctttgagctagagattgaagctttgcccctggataccccttcctctgtggagacggacatttcctcttccaggaagcaatcagaggagcccttcaccactgtcttagagaatggagcaggcatggtctcttctacttccttcaatggaggcgtctctcctcacaactggggagattctggtcccccctgcaaaaaatctcggaaggagaagaagcaaacaggatcagggccattaggaaacagctatgtggaaaggcaaaggtcagtgcatgagaagaatgggaaaaagatatgtaccctgcccagcccaccttcccccttggcttccttggccccagttgctgattcctccacgagggtggactctcccagccatggcctggtgaccagctccctctgcatcccttctccagcccggctgtcccaaaccccccattcacagcctcctcggcctggtacttgcaagacaagtgtggccacacaatgcgatccagaagagatcatcgtgctctcagactctgattagctgcctccccttctccctgcctccagaatgttctgggataacatttggaggaaggtgggaagcagatgactgaggaagggatggactaagctaatccccttttggtggtgtttctttaaaaaaaaaaaaaagcttaagttttacacagaaacattaataaacaataaagttcttttcttactgtaaaaaaaaaaaaaaaaaaaaaaaaaaaaaaaaaaaaaaaaaaaacaaaacaacaaaaaaaaaaaaaaaaaaaaaacaacagacgggccgcgcggcgcccccccaaaaacccccccccggcgcgccccacaccccccccccccccattttgtatagatacaaagggcgcccccacttgagtgagcggagatcaaatttatataacaggaaacgcgaagcgtcgcgccgcgctgattattatataaaccatagattaagtagagtgaagaaaaaacagtgatctgaagggggcgatcatttggtcgagggaagccaaacctaatttttgttggtgtgtggccatcacacatagtgaggcaacaactccccgctgtgaaagttattaagagcgactagggggagaactatcc

SEQ ID NO: 438507 - DNA, 2205 bp, Homo sapiens
ccgtacgacaatatggcggcgcttagttgcatgaaggcggaaactctgtgacttccggtccgtagtggggcctgcggtgggagtgggaaggaaggcggagggaaccatgcgaggttctgagaattgcggcgagggtcgcctcgagagacggtttctgagcaggaattctgaaatccccaccacttcctccctccgggggatttgatcccctatggccaccgctaacagcatcatcgtgctggatgatgatgacgaagatgaagcagctgctcagccagggccctcccacccactccccaatgcggcctcacctggggcagaagcccctagctcctctgagcctcatggggccagaggaagcagtagttcgggcggcaagaaatgctacaagctggagaatgagaagctgttcgaagagttccttgaactttgtaagatgcagacagcagaccaccctgaggtggtcccattcctctataaccggcagcaacgtgcccactctctgtttttggcctcggcggagttctgcaacatcctctctagggtcctgtctcgggcccggagccggccagccaagctctatgtctacatcaatgagctctgcactgttctcaaggcccactcagccaaaaagaagctgaacttggcccctgccgccaccacctccaatgagccctctgggaataaccctcccacacacctctccttggaccccacaaatgctgaaaacactgcctctcagtctccaaggacccgtggttcccggcggcagatccagcgtttggagcagctgctggcgctctatgtggcagagatccggcggctgcaggaaaaggagttggatctctcagaattggatgacccagactccgcatacctgcaggaggcacggttgaagcgtaagctgatccgcctctttgggcgactatgtgagctgaaagactgctcttcactgaccggccgtgtcatagagcagcgcatcccctaccgtggcacccgctacccagaggttaacaggcgcattgagcggctcatcaacaagccagggcctgataccttccctgactatggggatgtgcttcgggctgtagagaaggcagctgcccgacacagccttggcctcccccgacagcagctccagctcatggctcaggatgccttccgagatgtgggcatcaggttacaggagcgacgtcacctcgatctcatctacaactttggctgccacctcacagatgactataggccaggcgttgaccctgcactatcagatcctgtgttggcccggcgccttcgggaaaaccggagtttggccatgagtcggctggatgaggtcatctccaaatatgcaatgttgcaagacaaaagtgaggagggcgagagaaaaaagagaagagctcggctccaaggcacctcttcccactctgcagacacccccgaagcctccttggattctggtgagggccctagtggaatggcatcccaggggtgcccttctgcctccagagctgagacagatgacgaagacgatgaggagagtgatgaggaagaggaggaggaggaggaagaagaagaggaggaggccacagattctgaagaggaggaggatctggaacagatgcaggagggtcaggaggatgatgaagaggaggacgaagaggaagaagcagcagcaggatgactgaggaagggatggactaagctaatccccttttggtggtgtttctttaaaaaaaaaaaaaagcttaagttttacacagaaacattaataaacaataaagttcttttcttactgtaaaaaaaaaaaaaaaaaaaaaaaaaaaaaaaaaaaaaaaaaaaacaaaacaacaaaaaaaaaaaaaaaaaaaaaacaacagacgggccgcgcggcgcccccccaaaaacccccccccggcgcgccccacaccccccccccccccattttgtatagatacaaagggcgcccccacttgagtgagcggagatcaaatttatataacaggaaacgcgaagcgtcgcgccgcgctgattattatataaaccatagattaagtagagtgaagaaaaaacagtgatctgaagggggcgatcatttggtcgagggaagccaaacctaatttttgttggtgtgtggccatcacacatagtgaggcaacaactccccgctgtgaaagttattaagagcgactagggggagaactatcc

SEQ ID NO: 438508 - DNA, 2043 bp, Homo sapiens
ccgtacgacaatatggcggcgcttagttgcatgaaggcggaaactctgtgacttccggtccgtagtggggcctgcggtgggagtgggaaggaaggcggagggaaccatgcgaggttctgagaattgcggcgagggtcgcctcgagagacggtttctgagcaggaattctgaaatccccaccacttcctccctccgggggatttgatcccctatggccaccgctaacagcatcatcgtgctggatgatgatgacgaagatgaagcagctgctcagccagggccctcccacccactccccaatgcggcctcacctggggcagaagcccctagctcctctgagcctcatggggccagaggaagcagtagttcgggcggcaagaaatgctacaagctggagaatgagaagctgttcgaagagttccttgaactttgtaagatgcagacagcagaccaccctgaggtggtcccattcctctataaccggcagcaacgtgcccactctctgtttttggcctcggcggagttctgcaacatcctctctagggtcctgtctcgggcccggagccggccagccaagctctatgtctacatcaatgagctctgcactgttctcaaggcccactcagccaaaaagaagctgaacttggcccctgccgccaccacctccaatgagccctctgggaataaccctcccacacacctctccttggaccccacaaatgctgaaaacactgcctctcagtctccaaggacccgtggttcccggcggcagatccagcgtttggagcagctgctggcgctctatgtggcagagatccggcggctgcaggaaaaggagttggatctctcagaattggatgacccagactccgcatacctgcaggaggcacggttgaagcgtaagctgatccgcctctttgggcgactatgtgagctgaaagactgctcttcactgaccggccgtgtcatagagcagcgcatcccctaccgtggcacccgctacccagaggttaacaggcgcattgagcggctcatcaacaagccagggcctgataccttccctgactatggggatgtgcttcgggctgtagagaaggcagctgcccgacacagccttggcctcccccgacagcagctccagctcatggctcaggatgccttccgagatgtgggcatcaggttacaggagcgacgtcacctcgatctcatctacaactttggctgccacctcacagatgactataggccaggcgttgaccctgcactatcagatcctgtgttggcccggcgccttcgggaaaaccggagtttggccatgagtcggctggatgaggtcatctccaaatatgcaatgttgcaagacaaaagtgaggagggcgagagaaaaaagagaagagctcggctccaaggcacctcttcccactctgcagacacccccgaagcctccttggattctggtgagggccctagtggaatggcatcccaggggtgcccttctgcctccagagctgagagatgactgaggaagggatggactaagctaatccccttttggtggtgtttctttaaaaaaaaaaaaaagcttaagttttacacagaaacattaataaacaataaagttcttttcttactgtaaaaaaaaaaaaaaaaaaaaaaaaaaaaaaaaaaaaaaaaaaaacaaaacaacaaaaaaaaaaaaaaaaaaaaaacaacagacgggccgcgcggcgcccccccaaaaacccccccccggcgcgccccacaccccccccccccccattttgtatagatacaaagggcgcccccacttgagtgagcggagatcaaatttatataacaggaaacgcgaagcgtcgcgccgcgctgattattatataaaccatagattaagtagagtgaagaaaaaacagtgatctgaagggggcgatcatttggtcgagggaagccaaacctaatttttgttggtgtgtggccatcacacatagtgaggcaacaactccccgctgtgaaagttattaagagcgactagggggagaactatcc

SEQ ID NO: 438509 - DNA, 807 bp, Homo sapiens
gcggccgcctactactactactaccactgctcgaattcaagcttctaacgatgtacggggccatggcctggtgaccagctccctctgcatcccttctccagcccggctgtcccaaaccccccattcacagcctcctcggcctggtacttgcaagacaagtgtggccacacaatgcgatccagaagagatcatcgtgctctcagactctgattagctgcctccccttctccctgcctccagaatgttctgggataacatttggaggaaggtgggaagcagatgactgaggaagggatggactaagctaatccccttttggtggtgtttctttaaaaaaaaaaaaaagcttaagttttacacagaaacattaataaacaataaagttcttttcttactgtaaaaaaaaaaaaaaaaaaaaaaaaaaaaaaaaaaaaaaaaaaaacaaaacaacaaaaaaaaaaaaaaaaaaaaaacaacagacgggccgcgcggcgcccccccaaaaacccccccccggcgcgccccacaccccccccccccccattttgtatagatacaaagggcgcccccacttgagtgagcggagatcaaatttatataacaggaaacgcgaagcgtcgcgccgcgctgattattatataaaccatagattaagtagagtgaagaaaaaacagtgatctgaagggggcgatcatttggtcgagggaagccaaacctaatttttgttggtgtgtggccatcacacatagtgaggcaacaactccccgctgtgaaagttattaagagcgactagggggagaactatcc

SEQ ID NO: 438510 - DNA, 3027 bp, Homo sapiens
ccgtacgacaatatggcggcgcttagttgcatgaaggcggaaactctgtgacttccggtccgtagtggggcctgcggtgggagtgggaaggaaggcggagggaaccatgcgaggttctgagaattgcggcgagggtcgcctcgagagacggtttctgagcaggaattctgaaatccccaccacttcctccctccgggggatttgatcccctatggccaccgctaacagcatcatcgtgctggatgatgatgacgaagatgaagcagctgctcagccagggccctcccacccactccccaatgcggcctcacctggggcagaagcccctagctcctctgagcctcatggggccagaggaagcagtagttcgggcggcaagaaatgctacaagctggagaatgagaagctgttcgaagagttccttgaactttgtaagatgcagacagcagaccaccctgaggtggtcccattcctctataaccggcagcaacgtgcccactctctgtttttggcctcggcggagttctgcaacatcctctctagggtcctgtctcgggcccggagccggccagccaagctctatgtctacatcaatgagctctgcactgttctcaaggcccactcagccaaaaagaagctgaacttggcccctgccgccaccacctccaatgagccctctgggaataaccctcccacacacctctccttggaccccacaaatgctgaaaacactgcctctcagtctccaaggacccgtggttcccggcggcagatccagcgtttggagcagctgctggcgctctatgtggcagagatccggcggctgcaggaaaaggagttggatctctcagaattggatgacccagactccgcatacctgcaggaggcacggttgaagcgtaagctgatccgcctctttgggcgactatgtgagctgaaagactgctcttcactgaccggccgtgtcatagagcagcgcatcccctaccgtggcacccgctacccagaggttaacaggcgcattgagcggctcatcaacaagccagggcctgataccttccctgactatggggatgtgcttcgggctgtagagaaggcagctgcccgacacagccttggcctcccccgacagcagctccagctcatggctcaggatgccttccgagatgtgggcatcaggttacaggagcgacgtcacctcgatctcatctacaactttggctgccacctcacagatgactataggccaggcgttgaccctgcactatcagatcctgtgttggcccggcgccttcgggaaaaccggagtttggccatgagtcggctggatgaggtcatctccaaatatgcaatgttgcaagacaaaagtgaggagggcgagagaaaaaagagaagagctcggctccaaggcacctcttcccactctgcagacacccccgaagcctccttggattctggtgagggccctagtggaatggcatcccaggggtgcccttctgcctccagagctgagacagatgacgaagacgatgaggagagtgatgaggaagaggaggaggaggaggaagaagaagaggaggaggccacagattctgaagaggaggaggatctggaacagatgcaggagggtcaggaggatgatgaagaggaggacgaagaggaagaagcagcagcaggtaaagatggagacaagagccccatgtcctcactacagatctccaatgaaaagaacctggaacctggcaaacagatcagcagatcttcaggggagcagcaaaacaaaggacgcatagtgtcaccatcgttactgtcagaagaacccctggccccctccagcatagatgctgaaagcaatggagaacagcctgaggagctgaccctggaggaagaaagccctgtgtctcagctctttgagctagagattgaagctttgcccctggataccccttcctctgtggagacggacatttcctcttccaggaagcaatcagaggagcccttcaccactgtcttagagaatggagcaggcatggtctcttctacttccttcaatggaggcgtctctcctcacaactggggagattctggtcccccctgcaaaaaatctcggaaggagaagaagcaaacaggatcagggccattaggaaacagctatgtggaaaggcaaaggtcagtgcatgagaagaatgggaaaaagatatgtaccctgcccagcccaccttcccccttggcttccttggccccagttgctgattcctccacgagggtggactctcccagccatggcctggtgaccagctccctctgcatcccttctccagcccggctgtcccaaaccccccattcacagcctcctcggcctggtacttgcaagacaagtgtggccacacaatgcgatccagaagagatcatcgtgctctcagactctgattagctgcctccccttctccctgcctccagaatgttctgggataacatttggaggaaggtgggaagcagatgactgaggaagggatggactaagctaatccccttttggtggtgtttctttaaaaaaaaaaaaaagcttaagttttacacagaaacattaataaacaataaagttcttttcttactgtaaaaaaaaaaaaaaaaaaaaaaaaaaaaaaaaaaaaaaaaaaaacaaaacaacaaaaaaaaaaaaaaaaaaaaaacaacagacgggccgcgcggcgcccccccaaaaacccccccccggcgcgccccacaccccccccccccccattttgtatagatacaaagggcgcccccacttgagtgagcggagatcaaatttatataacaggaaacgcgaagcgtcgcgccgcgctgattattatataaaccatagattaagtagagtgaagaaaaaacagtgatctgaagggggcgatcatttggtcgagggaagccaaacctaatttttgttggtgtgtggccatcacacatagtgaggcaacaactccccgctgtgaaagttattaagagcgactagggggagaactatcc

SEQ ID NO: 438511 - DNA, 3178 bp, Homo sapiens
ggatgtgttcctggcatttgcccagggtccctcccctcccaggggtcccgtgcgacgtgccttggacaaggctttctttatcttcctggccctcttcctgacactgctgatgctggaggctgcttataagctgctgtggttactactatgggcaaagttaggggactggctcctggggacacctcagaaggaggaggagctggaattgtgaccacctttcctataaacatcttctttccccaccaaggagctcacctctggacccagccttgcctccacgagtccctccagcctccctaaacacaacgagcaggaattctgaaatccccaccacttcctccctccgggggatttgatcccctatggccaccgctaacagcatcatcgtgctggatgatgatgacgaagatgaagcagctgctcagccagggccctcccacccactccccaatgcggcctcacctggggcagaagcccctagctcctctgagcctcatggggccagaggaagcagtagttcgggcggcaagaaatgctacaagctggagaatgagaagctgttcgaagagttccttgaactttgtaagatgcagacagcagaccaccctgaggtggtcccattcctctataaccggcagcaacgtgcccactctctgtttttggcctcggcggagttctgcaacatcctctctagggtcctgtctcgggcccggagccggccagccaagctctatgtctacatcaatgagctctgcactgttctcaaggcccactcagccaaaaagaagctgaacttggcccctgccgccaccacctccaatgagccctctgggaataaccctcccacacacctctccttggaccccacaaatgctgaaaacactgcctctcagtctccaaggacccgtggttcccggcggcagatccagcgtttggagcagctgctggcgctctatgtggcagagatccggcggctgcaggaaaaggagttggatctctcagaattggatgacccagactccgcatacctgcaggaggcacggttgaagcgtaagctgatccgcctctttgggcgactatgtgagctgaaagactgctcttcactgaccggccgtgtcatagagcagcgcatcccctaccgtggcacccgctacccagaggttaacaggcgcattgagcggctcatcaacaagccagggcctgataccttccctgactatggggatgtgcttcgggctgtagagaaggcagctgcccgacacagccttggcctcccccgacagcagctccagctcatggctcaggatgccttccgagatgtgggcatcaggttacaggagcgacgtcacctcgatctcatctacaactttggctgccacctcacagatgactataggccaggcgttgaccctgcactatcagatcctgtgttggcccggcgccttcgggaaaaccggagtttggccatgagtcggctggatgaggtcatctccaaatatgcaatgttgcaagacaaaagtgaggagggcgagagaaaaaagagaagagctcggctccaaggcacctcttcccactctgcagacacccccgaagcctccttggattctggtgagggccctagtggaatggcatcccaggggtgcccttctgcctccagagctgagacagatgacgaagacgatgaggagagtgatgaggaagaggaggaggaggaggaagaagaagaggaggaggccacagattctgaagaggaggaggatctggaacagatgcaggagggtcaggaggatgatgaagaggaggacgaagaggaagaagcagcagcaggtaaagatggagacaagagccccatgtcctcactacagatctccaatgaaaagaacctggaacctggcaaacagatcagcagatcttcaggggagcagcaaaacaaaggacgcatagtgtcaccatcgttactgtcagaagaacccctggccccctccagcatagatgctgaaagcaatggagaacagcctgaggagctgaccctggaggaagaaagccctgtgtctcagctctttgagctagagattgaagctttgcccctggataccccttcctctgtggagacggacatttcctcttccaggaagcaatcagaggagcccttcaccactgtcttagagaatggagcaggcatggtctcttctacttccttcaatggaggcgtctctcctcacaactggggagattctggtcccccctgcaaaaaatctcggaaggagaagaagcaaacaggatcagggccattaggaaacagctatgtggaaaggcaaaggtcagtgcatgagaagaatgggaaaaagatatgtaccctgcccagcccaccttcccccttggcttccttggccccagttgctgattcctccacgagggtggactctcccagccatggcctggtgaccagctccctctgcatcccttctccagcccggctgtcccaaaccccccattcacagcctcctcggcctggtacttgcaagacaagtgtggccacacaatgcgatccagaagagatcatcgtgctctcagactctgattagctgcctccccttctccctgcctccagaatgttctgggataacatttggaggaaggtgggaagcagatgactgaggaagggatggactaagctaatccccttttggtggtgtttctttaaaaaaaaaaaaaagcttaagttttacacagaaacattaataaacaataaagttcttttcttactgtaaaaaaaaaaaaaaaaaaaaaaaaaaaaaaaaaaaaaaaaaaaacaaaacaacaaaaaaaaaaaaaaaaaaaaaacaacagacgggccgcgcggcgcccccccaaaaacccccccccggcgcgccccacaccccccccccccccattttgtatagatacaaagggcgcccccacttgagtgagcggagatcaaatttatataacaggaaacgcgaagcgtcgcgccgcgctgattattatataaaccatagattaagtagagtgaagaaaaaacagtgatctgaagggggcgatcatttggtcgagggaagccaaacctaatttttgttggtgtgtggccatcacacatagtgaggcaacaactccccgctgtgaaagttattaagagcgactagggggagaactatcc

SEQ ID NO: 438512 - DNA, 3043 bp, Homo sapiens
ttggggagagctgggcgctgagtctgaggggaaagctgtggtaccttcctgtccctgaaagggagtggagcggccgggggctgaactgggggagggggatttggcgggaagcgcatctagcggaccggccggacccacggttgggatctaagaggaatcgcgagagcgtagcgcgcaggaattctgaaatccccaccacttcctccctccgggggatttgatcccctatggccaccgctaacagcatcatcgtgctggatgatgatgacgaagatgaagcagctgctcagccagggccctcccacccactccccaatgcggcctcacctggggcagaagcccctagctcctctgagcctcatggggccagaggaagcagtagttcgggcggcaagaaatgctacaagctggagaatgagaagctgttcgaagagttccttgaactttgtaagatgcagacagcagaccaccctgaggtggtcccattcctctataaccggcagcaacgtgcccactctctgtttttggcctcggcggagttctgcaacatcctctctagggtcctgtctcgggcccggagccggccagccaagctctatgtctacatcaatgagctctgcactgttctcaaggcccactcagccaaaaagaagctgaacttggcccctgccgccaccacctccaatgagccctctgggaataaccctcccacacacctctccttggaccccacaaatgctgaaaacactgcctctcagtctccaaggacccgtggttcccggcggcagatccagcgtttggagcagctgctggcgctctatgtggcagagatccggcggctgcaggaaaaggagttggatctctcagaattggatgacccagactccgcatacctgcaggaggcacggttgaagcgtaagctgatccgcctctttgggcgactatgtgagctgaaagactgctcttcactgaccggccgtgtcatagagcagcgcatcccctaccgtggcacccgctacccagaggttaacaggcgcattgagcggctcatcaacaagccagggcctgataccttccctgactatggggatgtgcttcgggctgtagagaaggcagctgcccgacacagccttggcctcccccgacagcagctccagctcatggctcaggatgccttccgagatgtgggcatcaggttacaggagcgacgtcacctcgatctcatctacaactttggctgccacctcacagatgactataggccaggcgttgaccctgcactatcagatcctgtgttggcccggcgccttcgggaaaaccggagtttggccatgagtcggctggatgaggtcatctccaaatatgcaatgttgcaagacaaaagtgaggagggcgagagaaaaaagagaagagctcggctccaaggcacctcttcccactctgcagacacccccgaagcctccttggattctggtgagggccctagtggaatggcatcccaggggtgcccttctgcctccagagctgagacagatgacgaagacgatgaggagagtgatgaggaagaggaggaggaggaggaagaagaagaggaggaggccacagattctgaagaggaggaggatctggaacagatgcaggagggtcaggaggatgatgaagaggaggacgaagaggaagaagcagcagcaggtaaagatggagacaagagccccatgtcctcactacagatctccaatgaaaagaacctggaacctggcaaacagatcagcagatcttcaggggagcagcaaaacaaaggacgcatagtgtcaccatcgttactgtcagaagaacccctggccccctccagcatagatgctgaaagcaatggagaacagcctgaggagctgaccctggaggaagaaagccctgtgtctcagctctttgagctagagattgaagctttgcccctggataccccttcctctgtggagacggacatttcctcttccaggaagcaatcagaggagcccttcaccactgtcttagagaatggagcaggcatggtctcttctacttccttcaatggaggcgtctctcctcacaactggggagattctggtcccccctgcaaaaaatctcggaaggagaagaagcaaacaggatcagggccattaggaaacagctatgtggaaaggcaaaggtcagtgcatgagaagaatgggaaaaagatatgtaccctgcccagcccaccttcccccttggcttccttggccccagttgctgattcctccacgagggtggactctcccagccatggcctggtgaccagctccctctgcatcccttctccagcccggctgtcccaaaccccccattcacagcctcctcggcctggtacttgcaagacaagtgtggccacacaatgcgatccagaagagatcatcgtgctctcagactctgattagctgcctccccttctccctgcctccagaatgttctgggataacatttggaggaaggtgggaagcagatgactgaggaagggatggactaagctaatccccttttggtggtgtttctttaaaaaaaaaaaaaagcttaagttttacacagaaacattaataaacaataaagttcttttcttactgtaaaaaaaaaaaaaaaaaaaaaaaaaaaaaaaaaaaaaaaaaaaacaaaacaacaaaaaaaaaaaaaaaaaaaaaacaacagacgggccgcgcggcgcccccccaaaaacccccccccggcgcgccccacaccccccccccccccattttgtatagatacaaagggcgcccccacttgagtgagcggagatcaaatttatataacaggaaacgcgaagcgtcgcgccgcgctgattattatataaaccatagattaagtagagtgaagaaaaaacagtgatctgaagggggcgatcatttggtcgagggaagccaaacctaatttttgttggtgtgtggccatcacacatagtgaggcaacaactccccgctgtgaaagttattaagagcgactagggggagaactatcc

SEQ ID NO: 438513 - DNA, 2802 bp, Homo sapiens
ccgtacgacaatatggcggcgcttagttgcatgaaggcggaaactctgtgacttccggtccgtagtggggcctgcggtgggagtgggaaggaaggcggagggaaccatgcgaggttctgagaattgcggcgagggtcgcctcgagagacggtttctgagcaggaattctgaaatccccaccacttcctccctccgggggatttgatcccctatggccaccgctaacagcatcatcgtgctggatgatgatgacgaagatgaacaacgtgcccactctctgtttttggcctcggcggagttctgcaacatcctctctagggtcctgtctcgggcccggagccggccagccaagctctatgtctacatcaatgagctctgcactgttctcaaggcccactcagccaaaaagaagctgaacttggcccctgccgccaccacctccaatgagccctctgggaataaccctcccacacacctctccttggaccccacaaatgctgaaaacactgcctctcagtctccaaggacccgtggttcccggcggcagatccagcgtttggagcagctgctggcgctctatgtggcagagatccggcggctgcaggaaaaggagttggatctctcagaattggatgacccagactccgcatacctgcaggaggcacggttgaagcgtaagctgatccgcctctttgggcgactatgtgagctgaaagactgctcttcactgaccggccgtgtcatagagcagcgcatcccctaccgtggcacccgctacccagaggttaacaggcgcattgagcggctcatcaacaagccagggcctgataccttccctgactatggggatgtgcttcgggctgtagagaaggcagctgcccgacacagccttggcctcccccgacagcagctccagctcatggctcaggatgccttccgagatgtgggcatcaggttacaggagcgacgtcacctcgatctcatctacaactttggctgccacctcacagatgactataggccaggcgttgaccctgcactatcagatcctgtgttggcccggcgccttcgggaaaaccggagtttggccatgagtcggctggatgaggtcatctccaaatatgcaatgttgcaagacaaaagtgaggagggcgagagaaaaaagagaagagctcggctccaaggcacctcttcccactctgcagacacccccgaagcctccttggattctggtgagggccctagtggaatggcatcccaggggtgcccttctgcctccagagctgagacagatgacgaagacgatgaggagagtgatgaggaagaggaggaggaggaggaagaagaagaggaggaggccacagattctgaagaggaggaggatctggaacagatgcaggagggtcaggaggatgatgaagaggaggacgaagaggaagaagcagcagcaggtaaagatggagacaagagccccatgtcctcactacagatctccaatgaaaagaacctggaacctggcaaacagatcagcagatcttcaggggagcagcaaaacaaaggacgcatagtgtcaccatcgttactgtcagaagaacccctggccccctccagcatagatgctgaaagcaatggagaacagcctgaggagctgaccctggaggaagaaagccctgtgtctcagctctttgagctagagattgaagctttgcccctggataccccttcctctgtggagacggacatttcctcttccaggaagcaatcagaggagcccttcaccactgtcttagagaatggagcaggcatggtctcttctacttccttcaatggaggcgtctctcctcacaactggggagattctggtcccccctgcaaaaaatctcggaaggagaagaagcaaacaggatcagggccattaggaaacagctatgtggaaaggcaaaggtcagtgcatgagaagaatgggaaaaagatatgtaccctgcccagcccaccttcccccttggcttccttggccccagttgctgattcctccacgagggtggactctcccagccatggcctggtgaccagctccctctgcatcccttctccagcccggctgtcccaaaccccccattcacagcctcctcggcctggtacttgcaagacaagtgtggccacacaatgcgatccagaagagatcatcgtgctctcagactctgattagctgcctccccttctccctgcctccagaatgttctgggataacatttggaggaaggtgggaagcagatgactgaggaagggatggactaagctaatccccttttggtggtgtttctttaaaaaaaaaaaaaagcttaagttttacacagaaacattaataaacaataaagttcttttcttactgtaaaaaaaaaaaaaaaaaaaaaaaaaaaaaaaaaaaaaaaaaaaacaaaacaacaaaaaaaaaaaaaaaaaaaaaacaacagacgggccgcgcggcgcccccccaaaaacccccccccggcgcgccccacaccccccccccccccattttgtatagatacaaagggcgcccccacttgagtgagcggagatcaaatttatataacaggaaacgcgaagcgtcgcgccgcgctgattattatataaaccatagattaagtagagtgaagaaaaaacagtgatctgaagggggcgatcatttggtcgagggaagccaaacctaatttttgttggtgtgtggccatcacacatagtgaggcaacaactccccgctgtgaaagttattaagagcgactagggggagaactatcc

SEQ ID NO: 438514 - DNA, 3062 bp, Homo sapiens
ccgtacgacaatatggcggcgcttagttgcatgaaggcggaaactctgtgacttccggtccgtagtggggcctgcggtgggagtgggaaggaaggcggagggaaccatgcgaggttctgagaattgcggcgagggtcgcctcgagagacggtttctgagcaggaattctgaaatccccaccacttcctccctccgggggatttgatcccctatggccaccgctaacagcatcatcgtgctggatgatgatgacgaagatgaagcagctgctcagccagggccctcccacccactccccaatgcggcctcacctggggcagaagcccctagctcctctgagcctcatggggccagaggaagcagtagttcgggcggcaagaaatgctacaagctggagaatgagaagctgttcgaagagttccttgaactttgtaagatgcagacagcagaccaccctgaggtggtcccattcctctataaccggcagcaacgtgcccactctctgtttttggcctcggcggagttctgcaacatcctctctagggtcctgtctcgggcccggagccggccagccaagctctatgtctacatcaatgagctctgcactgttctcaaggcccactcagccaaaaagaagctgaacttggcccctgccgccaccacctccaatgagccctctgggaataaccctcccacacacctctccttggaccccacaaatgctgaaaacactgcctctcagtctccaaggacccgtggttcccggcggcagatccagcgtttggagcagctgctggcgctctatgtggcagagatccggcggctgcaggaaaaggagttggatctctcagaattggatgacccagactccgcatacctgcaggaggcacggttgaagcgtaagctgatccgcctctttgggcgactatgtgagctgaaagactgctcttcactgaccggccgtgtcatagagcagcgcatcccctaccgtggcacccgctacccagaggttaacaggcgcattgagcggctcatcaacaagccagggcctgataccttccctgactatggggatgtgcttcgggctgtagagaaggcagctgcccgacacagccttggcctcccccgacagcagctccagctcatggctcaggatgccttccgagatgtgggcatcaggttacaggagcgacgtcacctcgatctcatctacaactttggctgccacctcacagatgactataggccaggcgttgaccctgcactatcagatcctgtgttggcccggcgccttcgggaaaaccggagtttggccatgagtcggctggatgaggtcatctccaaatatgcaatgttgcaagacaaaagtgaggagggcgagagaaaaaagagaagagctcggctccaaggcacctcttcccactctgcagacacccccgaagcctccttggattctggtgagggccctagtggaatggcatcccaggggtgcccttctgcctccagagctgagacagatgacgaagacgatgaggagagtgatgaggaagaggaggaggaggaggaagaagaagaggaggaggccacagattctgaagaggaggaggatctggaacagatgcaggagggtcaggaggatgatgaagaggaggacgaagaggaagaagcagcagcaggtaaagatggagacaagagccccatgtcctcactacagatctccaatgaaaagaacctggaacctggcaaacagatcagcagatcttcaggggagcagcaaaacaaaggacgcatagtgtcaccatcgttactgtcagaagaacccctggccccctccagcatagatgctgaaagcaatggagaacagcctgaggagctgaccctggaggaagaaagccctgtgtctcagctctttgagctagagattgaagctttgcccctggataccccttcctctgtggagacggacatttcctcttccaggaagcaatcagaggagcccttcaccactgtcttagagaatggagcaggcatggtctcttctacttccttcaatggaggcgtctctcctcacaactggggagattctggtcccccctgcaaaaaatctcggaaggagaagaagcaaacaggatcagggccattaggaaacagctatgtggaaaggcaaaggtcagtgcatgagaagaatgggaaaaagatatgtaccctgcccagcccaccttcccccttggcttccttggccccagttgctgattcctccacgagggtggactctcccagccatggcctggtgaccagctccctctgcatcccttctccagcccggctgtcccaaaccccccattcacagcctcctcggcctggtacttgcaagatctctttgactctttgtctctcacttccctgcagacaagtgtggccacacaatgcgatccagaagagatcatcgtgctctcagactctgattagctgcctccccttctccctgcctccagaatgttctgggataacatttggaggaaggtgggaagcagatgactgaggaagggatggactaagctaatccccttttggtggtgtttctttaaaaaaaaaaaaaagcttaagttttacacagaaacattaataaacaataaagttcttttcttactgtaaaaaaaaaaaaaaaaaaaaaaaaaaaaaaaaaaaaaaaaaaaacaaaacaacaaaaaaaaaaaaaaaaaaaaaacaacagacgggccgcgcggcgcccccccaaaaacccccccccggcgcgccccacaccccccccccccccattttgtatagatacaaagggcgcccccacttgagtgagcggagatcaaatttatataacaggaaacgcgaagcgtcgcgccgcgctgattattatataaaccatagattaagtagagtgaagaaaaaacagtgatctgaagggggcgatcatttggtcgagggaagccaaacctaatttttgttggtgtgtggccatcacacatagtgaggcaacaactccccgctgtgaaagttattaagagcgactagggggagaactatcc

SEQ ID NO: 438515 - DNA, 1936 bp, Homo sapiens
ccgtacgacaatatggcggcgcttagttgcatgaaggcggaaactctgtgacttccggtccgtagtggggcctgcggtgggagtgggaaggaaggcggagggaaccatgcgaggttctgagaattgcggcgagggtcgcctcgagagacggtttctgaggcgttgaccctgcactatcagatcctgtgttggcccggcgccttcgggaaaaccggagtttggccatgagtcggctggatgaggtcatctccaaatatgcaatgttgcaagacaaaagtgaggagggcgagagaaaaaagagaagagctcggctccaaggcacctcttcccactctgcagacacccccgaagcctccttggattctggtgagggccctagtggaatggcatcccaggggtgcccttctgcctccagagctgagacagatgacgaagacgatgaggagagtgatgaggaagaggaggaggaggaggaagaagaagaggaggaggccacagattctgaagaggaggaggatctggaacagatgcaggagggtcaggaggatgatgaagaggaggacgaagaggaagaagcagcagcaggtaaagatggagacaagagccccatgtcctcactacagatctccaatgaaaagaacctggaacctggcaaacagatcagcagatcttcaggggagcagcaaaacaaaggacgcatagtgtcaccatcgttactgtcagaagaacccctggccccctccagcatagatgctgaaagcaatggagaacagcctgaggagctgaccctggaggaagaaagccctgtgtctcagctctttgagctagagattgaagctttgcccctggataccccttcctctgtggagacggacatttcctcttccaggaagcaatcagaggagcccttcaccactgtcttagagaatggagcaggcatggtctcttctacttccttcaatggaggcgtctctcctcacaactggggagattctggtcccccctgcaaaaaatctcggaaggagaagaagcaaacaggatcagggccattaggaaacagctatgtggaaaggcaaaggtcagtgcatgagaagaatgggaaaaagatatgtaccctgcccagcccaccttcccccttggcttccttggccccagttgctgattcctccacgagggtggactctcccagccatggcctggtgaccagctccctctgcatcccttctccagcccggctgtcccaaaccccccattcacagcctcctcggcctggtacttgcaagacaagtgtggccacacaatgcgatccagaagagatcatcgtgctctcagactctgattagctgcctccccttctccctgcctccagaatgttctgggataacatttggaggaaggtgggaagcagatgactgaggaagggatggactaagctaatccccttttggtggtgtttctttaaaaaaaaaaaaaagcttaagttttacacagaaacattaataaacaataaagttcttttcttactgtaaaaaaaaaaaaaaaaaaaaaaaaaaaaaaaaaaaaaaaaaaaacaaaacaacaaaaaaaaaaaaaaaaaaaaaacaacagacgggccgcgcggcgcccccccaaaaacccccccccggcgcgccccacaccccccccccccccattttgtatagatacaaagggcgcccccacttgagtgagcggagatcaaatttatataacaggaaacgcgaagcgtcgcgccgcgctgattattatataaaccatagattaagtagagtgaagaaaaaacagtgatctgaagggggcgatcatttggtcgagggaagccaaacctaatttttgttggtgtgtggccatcacacatagtgaggcaacaactccccgctgtgaaagttattaagagcgactagggggagaactatcc

SEQ ID NO: 438516 - DNA, 2715 bp, Homo sapiens
ccgtacgacaatatggcggcgcttagttgcatgaaggcggaaactctgtgacttccggtccgtagtggggcctgcggtgggagtgggaaggaaggcggagggaaccatgcgaggttctgagaattgcggcgagggtcgcctcgagagacggtttctgagcaggaattctgaaatccccaccacttcctccctccgggggatttgatcccctatggccaccgctaacagcatcatcgtgctggatgatgatgacgaagatgaagcagctgctcagccagggccctcccacccactccccaatgcggcctcacctggggcagaagcccctagctcctctgagcctcatggggccagaggaagcagtagttcgggcggcaagaaatgctacaagctggagaatgagaagctgttcgaagagttccttgaactttgtaagatgcagacagcagaccaccctgaggtggtcccattcctctataaccggcagcaacgtgcccactctctgtttttggcctcggcggagttctgcaacatcctctctagggtcctgtctcgggcccggagccggccagccaagctctatgtctacatcaatgagctctgcactgttctcaaggcccactcagccaaaaagaagctgaacttggcccctgccgccaccacctccaatgagccctctgggaataaccctcccacacacctctccttggaccccacaaatgctgaaaacactgcctctcagtctccaaggacccgtggttcccggcggcagatccagcgtttggagcagctgctggcgctctatgtggcagagatccggcggctgcaggaaaaggagttggatctctcagaattggatgacccagactccgcatacctgcaggaggcacggttgaagcgtaagctgatccgcctctttgggcgactatgtgagctgaaagactgctcttcactgaccggccgtgtcatagagcagcgcatcccctaccgtggcacccgctacccagaggttaacaggcgcattgagcggctcatcaacaagccagggcctgataccttccctgactatggggatgtgcttcgggctgtagagaaggcagctgcccgacacagccttggcctcccccgacagcagctccagctcatggctcaggatgccttccgagatgtgggcatcaggttacaggagcgacgtcacctcgatctcatctacaactttggctgccacctcacagatgactataggccaggcgttgaccctgcactatcagatcctgtgttggcccggcgccttcgggaaaaccggagtttggccatgagtcggctggatgaggtcatctccaaatatgcaatgttgcaagacaaaagtgaggagggcgagagaaaaaagagaagagctcggctccaaggcacctcttcccactctgcagacacccccgaagcctccttggattctggtgagggccctagtggaatggcatcccaggggtgcccttctgcctccagagctgagacagatgacgaagacgatgaggagagtgatgaggaagaggaggaggaggaggaagaagaagaggaggaggccacagattctgaagaggaggaggatctggaacagatgcaggagggtcaggaggatgatgaagaggaggacgaagaggaagaagcagcagcaggtaaagatggagacaagagccccatgtcctcactacagatctccaatgaaaagaacctggaacctggcaaacagatcagcagatcttcaggggagcagcaaaacaaaggacgcatagtgtcaccatcgttactgtcagaagaacccctggccccctccagcatagatgctgaaagcaatggagaacagcctgaggagctgaccctggaggaagaaagccctgtgtctcagctctttgagctagagattgaagctttgcccctggataccccttcctctgtggagacggacatttcctcttccaggaagcaatcagaggagcccttcaccactgtcttagagaatggagcaggcatggtctcttctacttccttcaatggaggcgtctctcctcacaactggggagattctggtcccccctgcaaaaaatctcggaaggagaagaagcaaacaggatcagggccattaggaaacagctatgtggaaaggcaaaggtcagtgcatgagaagagatgactgaggaagggatggactaagctaatccccttttggtggtgtttctttaaaaaaaaaaaaaagcttaagttttacacagaaacattaataaacaataaagttcttttcttactgtaaaaaaaaaaaaaaaaaaaaaaaaaaaaaaaaaaaaaaaaaaaacaaaacaacaaaaaaaaaaaaaaaaaaaaaacaacagacgggccgcgcggcgcccccccaaaaacccccccccggcgcgccccacaccccccccccccccattttgtatagatacaaagggcgcccccacttgagtgagcggagatcaaatttatataacaggaaacgcgaagcgtcgcgccgcgctgattattatataaaccatagattaagtagagtgaagaaaaaacagtgatctgaagggggcgatcatttggtcgagggaagccaaacctaatttttgttggtgtgtggccatcacacatagtgaggcaacaactccccgctgtgaaagttattaagagcgactagggggagaactatcc

SEQ ID NO: 438517 - DNA, 2613 bp, Homo sapiens
ccgtacgacaatatggcggcgcttagttgcatgaaggcggaaactctgtgacttccggtccgtagtggggcctgcggtgggagtgggaaggaaggcggagggaaccatgcgaggttctgagaattgcggcgagggtcgcctcgagagacggtttctgagcaggaattctgaaatccccaccacttcctccctccgggggatttgatcccctatggccaccgctaacagcatcatcgtgctggatgatgatgacgaagatgaagcagctgctcagccagggccctcccacccactccccaatgcggcctcacctggggcagaagcccctagctcctctgagcctcatggggccagaggaagcagtagttcgggcggcaagaaatgctacaagctggagaatgagaagctgttcgaagagttccttgaactttgtaagatgcagacagcagaccaccctgaggtggtcccattcctctataaccggcagcaacgtgcccactctctgtttttggcctcggcggagttctgcaacatcctctctagggtcctgtctcgggcccggagccggccagccaagctctatgtctacatcaatgagctctgcactgttctcaaggcccactcagccaaaaagaagctgaacttggcccctgccgccaccacctccaatgagccctctgggaataaccctcccacacacctctccttggaccccacaaatgctgaaaacactgcctctcagtctccaaggacccgtggttcccggcggcagatccagcgtttggagcagctgctggcgctctatgtggcagagatccggcggctgcaggaaaaggagttggatctctcagaattggatgacccagactccgcatacctgcaggaggcacggttgaagcgtaagctgatccgcctctttgggcgactatgtgagctgaaagactgctcttcactgaccggccgtgtcatagagcagcgcatcccctaccgtggcacccgctacccagaggttaacaggcgcattgagcggctcatcaacaagccagggcctgataccttccctgactatggggatgtgcttcgggctgtagagaaggcagctgcccgacacagccttggcctcccccgacagcagctccagctcatggctcaggatgccttccgagatgtgggcatcaggttacaggagcgacgtcacctcgatctcatctacaactttggctgccacctcacagatgactataggccaggcgttgaccctgcactatcagatcctgtgttggcccggcgccttcgggaaaaccggagtttggccatgagtcggctggatgaggtcatctccaaatatgcaatgttgcaagacaaaagtgaggagggcgagagaaaaaagagaagagctcggctccaaggcacctcttcccactctgcagacacccccgaagcctccttggattctggtgagggccctagtggaatggcatcccaggggtgcccttctgcctccagagctgagacagatgacgaagacgatgaggagagtgatgaggaagaggaggaggaggaggaagaagaagaggaggaggccacagattctgaagaggaggaggatctggaacagatgcaggagggtcaggaggatgatgaagaggaggacgaagaggaagaagcagcagcaggtaaagatggagacaagagccccatgtcctcactacagatctccaatgaaaagaacctggaacctggcaaacagatcagcagatcttcaggggagcagcaaaacaaaggacgcatagtgtcaccatcgttactgtcagaagaacccctggccccctccagcatagatgctgaaagcaatggagaacagcctgaggagctgaccctggaggaagaaagccctgtgtctcagctctttgagctagagattgaagctttgcccctggataccccttcctctgtggagacaagtgtggccacacaatgcgatccagaagagatcatcgtgctctcagactctgattagctgcctccccttctccctgcctccagaatgttctgggataacatttggaggaaggtgggaagcagatgactgaggaagggatggactaagctaatccccttttggtggtgtttctttaaaaaaaaaaaaaagcttaagttttacacagaaacattaataaacaataaagttcttttcttactgtaaaaaaaaaaaaaaaaaaaaaaaaaaaaaaaaaaaaaaaaaaaacaaaacaacaaaaaaaaaaaaaaaaaaaaaacaacagacgggccgcgcggcgcccccccaaaaacccccccccggcgcgccccacaccccccccccccccattttgtatagatacaaagggcgcccccacttgagtgagcggagatcaaatttatataacaggaaacgcgaagcgtcgcgccgcgctgattattatataaaccatagattaagtagagtgaagaaaaaacagtgatctgaagggggcgatcatttggtcgagggaagccaaacctaatttttgttggtgtgtggccatcacacatagtgaggcaacaactccccgctgtgaaagttattaagagcgactagggggagaactatcc

SEQ ID NO: 438518 - DNA, 2624 bp, Homo sapiens
ccgtacgacaatatggcggcgcttagttgcatgaaggcggaaactctgtgacttccggtccgtagtggggcctgcggtgggagtgggaaggaaggcggagggaaccatgcgaggttctgagaattgcggcgagggtcgcctcgagagacggtttctgagcaggaattctgaaatccccaccacttcctccctccgggggatttgatcccctatggccaccgctaacagcatcatcgtgctggatgatgatgacgaagatgaagcagctgctcagccagggccctcccacccactccccaatgcggcctcacctggggcagaagcccctagctcctctgagcctcatggggccagaggaagcagtagttcgggcggcaagaaatgctacaagctggagaatgagaagctgttcgaagagttccttgaactttgtaagatgcagacagcagaccaccctgaggtggtcccattcctctataaccggcagcaacgtgcccactctctgtttttggcctcggcggagttctgcaacatcctctctagggtcctgtctcgggcccggagccggccagccaagctctatgtctacatcaatgagctctgcactgttctcaaggcccactcagccaaaaagaagctgaacttggcccctgccgccaccacctccaatgagccctctgggaataaccctcccacacacctctccttggaccccacaaatgctgaaaacactgcctctcagtctccaaggacccgtggttcccggcggcagatccagcgtttggagcagctgctggcgctctatgtggcagagatccggcggctgcaggaaaaggagttggatctctcagaattggatgacccagactccgcatacctgcaggaggcacggttgaagcgtaagctgatccgcctctttgggcgactatgtgagctgaaagactgctcttcactgaccggccgtgtcatagagcagcgcatcccctaccgtggcacccgctacccagaggttaacaggcgcattgagcggctcatcaacaagccagggcctgataccttccctgactatggggatgtgcttcgggctgtagagaaggcagctgcccgacacagccttggcctcccccgacagcagctccagctcatggctcaggatgccttccgagatgtgggcatcaggttacaggagcgacgtcacctcgatctcatctacaactttggctgccacctcacagatgactataggccaggcgttgaccctgcactatcagatcctgtgttggcccggcgccttcgggaaaaccggagtttggccatgagtcggctggatgaggtcatctccaaatatgcaatgttgcaagacaaaagtgaggagggcgagagaaaaaagagaagagctcggctccaaggcacctcttcccactctgcagacacccccgaagcctccttggattctggtgagggccctagtggaatggcatcccaggggtgcccttctgcctccagagctgagacagatgacgaagacgatgaggagagtgatgaggaagaggaggaggaggaggaagaagaagaggaggaggccacagattctgaagaggaggaggatctggaacagatgcaggagggtcaggaggatgatgaagaggaggacgaagaggaagaagcagcagcaggtaaagatggagacaagagccccatgtcctcactacagatctccaatgaaaagaacctggaacctggcaaacagatcagcagatcttcaggggagcagcaaaacaaaggacgcatagtgtcaccatcgttactgtcagaagaacccctggccccctccagcatagatgctgaaagcaatggagaacagcctatgtggaaaggcaaaggtcagtgcatgagaagaatgggaaaaagatatgtaccctgcccagcccaccttcccccttggcttccttggccccagttgctgattcctccacgagggtggactctcccagccatggcctggtgaccagctccctctgcatcccttctccagccccccttctccctgcctccagaatgttctgggataacatttggaggaaggtgggaagcagatgactgaggaagggatggactaagctaatccccttttggtggtgtttctttaaaaaaaaaaaaaagcttaagttttacacagaaacattaataaacaataaagttcttttcttactgtaaaaaaaaaaaaaaaaaaaaaaaaaaaaaaaaaaaaaaaaaaaacaaaacaacaaaaaaaaaaaaaaaaaaaaaacaacagacgggccgcgcggcgcccccccaaaaacccccccccggcgcgccccacaccccccccccccccattttgtatagatacaaagggcgcccccacttgagtgagcggagatcaaatttatataacaggaaacgcgaagcgtcgcgccgcgctgattattatataaaccatagattaagtagagtgaagaaaaaacagtgatctgaagggggcgatcatttggtcgagggaagccaaacctaatttttgttggtgtgtggccatcacacatagtgaggcaacaactccccgctgtgaaagttattaagagcgactagggggagaactatcc

SEQ ID NO: 438519 - DNA, 2014 bp, Homo sapiens
ccgtacgacaatatggcggcgcttagttgcatgaaggcggaaactctgtgacttccggtccgtagtggggcctgcggtgggagtgggaaggaaggcggagggaaccatgcgaggttctgagaattgcggcgagggtcgcctcgagagacggtttctgagcaggaattctgaaatccccaccacttcctccctccgggggatttgatcccctatggccaccgctaacagcatcatcgtgctggatgatgatgacgaagatgaagcagctgctcagccagggccctcccacccactccccaatgcggcctcacctggggcagaagcccctagctcctctgagcctcatggggccagaggaagcagtagttcgggcggcaagaaatgctacaagctggagaatgagaagctgttcgaagagttccttgaactttgtaagatgcagacagcagaccaccctgaggtggtcccattcctctataaccggcagcaacgtgcccactctctgtttttggcctcggcggagttctgcaacatcctctctagggtcctgtctcgggcccggagccggccagccaagctctatgtctacatcaatgagctctgcactgttctcaaggcccactcagccaaaaagaagctgaacttggcccctgccgccaccacctccaatgagccctctgggaataaccctcccacacacctctccttggaccccacaaatgctgaaaacactgcctctcagtctccaaggacccgtggttcccggcggcagatccagcgtttggagcagctgctggcgctctatgtggcagagatccggcggctgcaggaaaaggagttggatctctcagaattggatgacccagactccgcatacctgcaggaggcacggttgaagcgtaagctgatccgcctctttgggcgactatgtgagctgaaagactgctcttcactgaccggccgtgtcatagagcagcgcatcccctaccgtggcacccgctacccagaggttaacaggcgcattgagcggctcatcaacaagccagggcctgataccttccctgactatggggatgtgcttcgggctgtagagaaggcagctgcccgacacagccttggcctcccccgacagcagctccagctcatggctcaggatgccttccgagatgtgggcatcaggttacaggagcgacgtcacctcgatctcatctacaactttggctgccacctcacagatgactataggccaggcgttgaccctgcactatcagatcctgtgttggcccggcgccttcgggaaaaccggagtttggccatgagtcggctggatgaggtcatctccaaatatgcaatgttgcaagacaagtgtggccacacaatgcgatccagaagagatcatcgtgctctcagactctgattagctgcctccccttctccctgcctccagaatgttctgggataacatttggaggaaggtgggaagcagatgactgaggaagggatggactaagctaatccccttttggtggtgtttctttaaaaaaaaaaaaaagcttaagttttacacagaaacattaataaacaataaagttcttttcttactgtaaaaaaaaaaaaaaaaaaaaaaaaaaaaaaaaaaaaaaaaaaaacaaaacaacaaaaaaaaaaaaaaaaaaaaaacaacagacgggccgcgcggcgcccccccaaaaacccccccccggcgcgccccacaccccccccccccccattttgtatagatacaaagggcgcccccacttgagtgagcggagatcaaatttatataacaggaaacgcgaagcgtcgcgccgcgctgattattatataaaccatagattaagtagagtgaagaaaaaacagtgatctgaagggggcgatcatttggtcgagggaagccaaacctaatttttgttggtgtgtggccatcacacatagtgaggcaacaactccccgctgtgaaagttattaagagcgactagggggagaactatcc

SEQ ID NO: 438520 - DNA, 334 bp, Homo sapiens
agagagacattgtccttcccctgcactggccaccagggagtccaggttgactgatgggggagcatgagaaggaaagcaagaaccaaaccctctggggcaagggattccttagagaaacttctttgtctcccagggccctagtggaatggcatcccaggggtgcccttctgcctccagagctgagacagatgacgaagacgatgaggagagtgatgaggaagaggaggaggaggaggaagaagaagaggaggaggccacagattctgaagaggaggaggatctggaacagatgcaggagggtcaggaggatgatgaagaggaggacgaagaggaa

SEQ ID NO: 438521 - DNA, 3470 bp, Homo sapiens
  misc_feature (2146)..(2146): n is a, c, g, or t
gtagctggaaggggaggtggggcaagggaggggacccccagcctgtcacctgggttgcctgcatggtactgagtgagctggtggcttctgtgtgggcctctggctgtggggatggtcagacaggaatagacacaatgctgcccaccctctgcatgcatgtgtgtgctggcatgcacacacacgtgtgcacacacatctacatgcacatacccacacgtgcatacatacatgtatagacatacacctttgtgcatacacacaggtatagacatacacctttgtgcatacacatacattatacacacatgtacatagacacacatacacatgtgcacacacctataggcagagcccactccttttcccctgatgaggttgtggtggtattaataatcataatggtagatgatatttactgaatgcttactgtgcatgatatgttccactgacagttttacatccattatcttaatcttcacagccccttgtgggataggaagttggccacattgcccacatccagtagccagtgaatagttgtgcttggagtttgccctgtaggctgacttatgagccatagcccaagccacatcccgagaacacacaatacggggagcccctccttaggggaaaatttctttccaaaatatcacctcataccttgctcagggaatactctttcggttataagtaataggcgtctaattcacaccagctagaggcccaaggcagcctcaggcggggctggaggtatgagcagcagctggcactctcccttcccaccagcccacaccagccatgcttgcctgtctctgcaaacgcagtctctgcttctctcatagcaccagccgagcgcagggtagtcacacctgtccctcaacccctccagattcttgggagggagagctggggtgtgtccagcattgtttcttgagtctgaggtcgggggttcttctggagatgcaggtcagtttatgcctgcaacaattctcctccctcaccaaagggccctgcctctggaggggcacctgtcttctccccatggtgcctacttccccttctgtctcattctccagagccaacatcagtctccctctctggaccttctacttggggtctgatcttggggctgctcagacatcagaatccctgagctcctcaggggttgcccctcttggctaagccctgcagcagcccctcctctcagtggcctgggggcaactttaagatctctcctcctgtaagtcagaaggcaggttctcctcccatagaatccagtccgtcgacagagttagatgcctcttcctctttgtcctattgtgcttaccacattacgttgtcctgtgctagtttgtttttctgtctcctctgaagttcccaaaggatggcttattattcagctaagtggtacacaacctggggccagtccatggtaggcacttaataaagtcttgtcaggaaggtggatgaatgaacgcttaacacacaggtgtgtgtgtatctgctgtgctccttgctagggggatctccagctggttgtctctggtttgtgtcagatgcagccctgccttgacagaagctgtttctgactccctgtgtaacactaacaggactttcttttacctcctgtagccaaacaaagtcaggaatgaaactaaagagctgaggttgctctgtgcagaggacgagcaaaccaggacgtgctggatgacagcgttcagactcctcaaggtatgtgacatcttgcggtttgtgttgagtgcacatctcttcgtggaaaattggcctctggacttgatgtctattctggcaggaaaatgctcgtaacttttccgctgttctgtcacaatattttatttatcaaatgtagttaagcatctttctaaacaagatctcaggagcttttaacagagggcctaatattaaacagggtagagctaggttttccggactcagtactactgacattttgggtagaataattctttgtcgggggtctgggggacatccaagcattgcaggccacttagatgtgtggcatacctggtctctgcctgctagatgccagtcgcacgcccggccagttgagacaaccaaaaatgtctctaaatgttgccaaatgtgccctgaagccagaggatggggnattgcccctggttgagaccactagattagaagaataggattcgaaaaatcaggaccagggagaaaggaaatagtacatgaggtgttaattattttcacgactgaaccaactctcaggttcccaaaaagccagggccatgaagtaaacatgatgaattatacagttgactgaagctcctcagcagagacagtacctcctgactgtaagttctaaaggaaatttatcacgtggtactgcatatagagtaatgcccttgacagcaatttcatgccagttgccagagtgatttcatagggctgtttactgtagtcactttggatttcccacagtgtttctgtgcacatataccatatcccacatgtctggaattaagtctacagagtccttgtgagttgtaagttagctggcccaggtgagcttggctaaagtccaggggtctccataggagatgttcgtttagtcaactggagccaatggatacaatggtctagggatttctttacaaaaactcccagccttcgttgaactgtagtggcctttgagctggtccagagactcaaggtgaagtcaattaaggagatggaggaactgaaggaagcatagctcaaaactttcctggaggtgctgcagatccaattctgaatgtagtcctgttgtcccatccacttggcaggtagcattttgcacccagtaatccacagattccagagacattaaggatacatcctagtgccatttttataggatgctggggcccaaaccaaaagttccacagattggcttcctgtatctctctcccagaaccttattttatgttttcactgattaaaaaaagaattatggaaatcaaaactttacaaattcataatggaagaggaaatgtccatgttaatacatcatagatcatagaccactcctgtgtaagccggttttcagtgtaagggtcatcagtgggaactggtcacataggtgacatccattgagggcagtattctgcatggacctccagaaagaatgagattgctctttgtgtcctgttgcggaaaaattactaacaattaaaaagcaaagtacagaacagtatatagagagaaggctacatttgtgtgaagggaacaggaaaaattggaatatttgtatttgatggtatgctcatgaacattgtgtgagctgcaggagagaagaaagaggttgcttagtagggagaggagatgggagaggcagctgtgcagataggggcagcggccaggggtgatcttttgaagctgtctgtatatggttgaaattttaatctgcaaatgaatcatctgttttggaaaaggca

SEQ ID NO: 438522 - DNA, 4795 bp, Homo sapiens
  misc_feature (13)..(13): n is a, c, g, or t
ggcgcaactttgnctcccagggaacaaacatcctccttctaagtggtagatgtgggtgagctgaccctgctggagtctgtcccctgggctaccctctgcttccccccattgtgagtggtccgtgaagcacagcgttgaccagacctaaacctgtttgctcccaggacaaggtggagcagacacctcgcagtcaacaagacccggcaggaccaggactccccgcacagtctgaccgacttgcgaatcaccaggaggatgatgtggacctggaagccctggtgaacgatatgaatgcatccctggagagcctgtactcggcctgcagcatgcagtcagacacggtgcccctcctgcagaatggccagcatgcccgcagccagcctcgggcttcaggccctcctcggtccatccagccacaggtgtccccgaggcagagggtgcagcgctcccagcctgtgcacatcctcgctgtcaggcgccttcaggaggaagaccagcagtttagaacctcatctctgccggccatccccaatccttttcctgaactctgtggccctgggagcccccctgtgctcacgccgggttctttacctccgagccaggccgccgcaaagcaggatgttaaagtctttagtgaagatgggacaagcaaagtggtggagattctagcagacatgacagccagagacctgtgccaattgctggtttacaaaagtcactgtgtggatgacaacagctggacactagtggagcaccacccgcacctaggattagagaggtgcttggaagaccatgagctggtggtccaggtggagagtaccatggccagtgagagtaaatttctattcaggaagaattacgcaaaatacgagttctttaaaaatcccatgaatttcttcccagaacagatggttacttggtgccagcagtcaaatggcagtcaaacccagcttttgcagaattttctgaactccagtagttgtcctgaaattcaagggtttttgcatgtgaaagagctgggaaagaaatcatggaaaaagctgtatgtgtgtttgcggagatctggcctttattgctccaccaagggaacttcaaaggaacccagacacctgcagctgctggccgacctggaggacagcaacatcttctccctgatcgctggcaggaagcagtacaacgcccctacagaccacgggctctgcataaagccaaacaaagtcaggaatgaaactaaagagctgaggttgctctgtgcagaggacgagcaaaccaggacgtgctggatgacagcgttcagactcctcaagtatggaatgctcctttaccagaattaccgaatccctcagcagaggaaggccttgctgtccccgttctcgacgccagtgcgcagtgtctccgagaactccctcgtggcaatggatttttctgggcaaacaggacgcgtgatagagaatccggcggaggcccagagcgcagccctggaggagggccacgcctggaggaagcgaagcacacggatgaacatcctaggtagccaaagtcccctccacccttctaccctaagtacagtgattcacaggacacagcactggtttcacgggaggatctccagggaggaatcccacaggatcattaaacagcaagggctcgtggatgggctttttctcctccgtgacagccagagtaatccaaaggcatttgtactcacactgtgtcatcaccagaaaattaaaaatttccagatcttaccttgcgaggacgacgggcagacgttcttcagcctagatgacgggaacaccaaattctctgacctgatccagctggttgacttttaccagctgaacaaaggagtcctgccttgcaaactcaagcaccactgcatccgagtggccttatgaccgcagatgtcctctcggctgaagactggaggaagtgaacactggagtgaagaagcggtctgtgcgttggtgaagaacacacatcgattctgcacctggggacccagagcgagatgggtttgttcggtgccagccgaccaagattgactagtttgttggacttaaacgacgatttgctgctgtgaacccagcagggtcgcctccctctgcgtcggccaaattggggagggcatggaagatccagcggaaagttgaaaataaactggaatgatcatcttggcttgggccgcttaggaacaagaaccggagagaagtgattggaaatgaactcttgccctggaataatcttgacaattaaaactgatatgtttactttttttgtattgatcacttttttgcactccttctttgttttcaatattgtattcagcctattgtaggagggggatgtggcgtttcaactcatataatacagaaagagttttgaatgggcagatttcaaactgaatatgggtccccaaatgttcccagagggtcctccacaccctctgccgactaccacggtgtggattcagctcccaaatgacaaacccagcccttcccagtatacttgaaaagctttcttgttaaaataaaaggtgtcactgtggtaggcatttggcatattttgtggactcagtcaagcaaccacagtctgttaatcatttctctatgctcagatgtcagatcctcttgttattagtgtgtcttgttctgcacagtgcaggagactttattcctttggaaaattcactgttccacaaacagcaggctgaatggcctcgcctctagattgacgtgggccagcctccttgagacacacctggcacccgtcatcggccagcggtggatgctgcataatccacctgggtacttcagccttgcgtttccacagccttcagcctgttctagaacgatcactgccttacccctgctgctgcagtggtgtgagtcgtttcacggctgatgtccctcgggggattaaaggatctaaagagaaaatggcacctggttgtcttcgtgctgtgtctcatgggtttccatagtgataaagacaaggaaacgctgcaggggccacaggcacaggctgatatttaaagatctttgcttgcagccctccgtcctgctgaaaacccccataagccagtgaacacagagcagctagaggctcctcctctgctggcttagggtcagaagtacctcacagtggttgtggacatggaagagttttgtcaacacaacactttgtccccgctccgggagatgagtcagatggtggcttgagttgtcacttggtcccctccgcccctcgggtggccccctttgccacgtccccttagcttagtgatcaggtgtgagagtggccatttccttacctttgatccctgtaaagcagaaaggactcctttgacaggcgacaaactactgtggtgagcagaatgatttcctttttcaagacaacacctgcctggcttctattaatgtgtgctggccatgatattgccccaaatccgccccactgaagtgttccctaaggaacagcatttctctgctcctcagtcaacccccgtagcctagagcagtgtcacaagcttcagtaaggccagtcagctggaagtcagtctaccgtatagtaacactgtatttcagtctacagaccacactctagttgttttccatgaaaggtatacaaatgaagaattttctagcaaaacatgtttttaaccatcagtgctcaattgcattttcttcctttcgcagccagtcagtctttcaaactattgacagtaagataattctcacgttcacacctggtggcaggcttcactgtagggacggacattgcagttacaccacgattccttcctcttcactggctcgaggtaaacccttttcaaggaaaaacaactctaggatttcttttttctgtgtacgtagaccagtcccatcagtgtataatctctctctcacacgcctctctccaatagacagcttgtatttgcagtatttcatatttataaatatgcgtttatttaaaaggagaacaaaagcttgactctgattcacagttttgtatgtagctggtttgacgtagtcttttgtattttccctgccgaagtgaattgttggagaatgtaaaccgcctccacgtggcggcagacttcctaaggccccagctcgctggcctcgcgctgggcggctgggaattccacctgagaacaagtcccgcaaaccggggacggaaggacatttgacttttatttttgtatttaattgacatgaatgtaaaggggacagctcagggttgttttggagcctgttgactttgtatctctgcctgtgattttcttttctaaatgaaactccatgtagcaaccaggacgaagttgagaaggaaaacgccaaatgctttggttattagagtttaataggtaagctctgttacactaggtgttagagttccagaatgttcttttgtttgctaaaccttgaagaaacatgtgcctcagcctagatgttttgtcttctcttttctgcacttaatacctgacagtatgaccgatctctgcgcctttctgggggcgggcaagctggcggtagatttgtgatgtcacagtgcaaactgcagtgactgtaaattggcctggcgtgtataaacgttttcagggaatgcagaaggtattaatgaagagacaaaacctttattccatgtgctttgcttcattctgtacatagctctttggctcgtgaacctaattgtaaactttcaggtatttttgtacaaataagggactgatgttctgtttcttgtaattagaaataaacattaatacagtgttcttcattttcaaaaaaaa

SEQ ID NO: 438523 - DNA, 5453 bp, Homo sapiens
gcggccgcgatgtcccccgcctgtctgcgaatgcggcgtagcgggtagacatggagggctttcggcatcgtcagagtggccagtgtgcgcgtccttgcccatcaggcgggggggctgtgggggaggagaggaggcagtggagggaacaaggggttcttcagggttgccatgagaaccagggatccggggattgggcagcagagggcccccgccgggcgttggggcgtggccgcgtcacatgggtttggtcctgggattcctgttgtgctccaggaccgggcgctgctccgtcgtcctcccgctcctcaggagcgcccagtccctcggaggctgagtattgcagccgggcggcagccggctccgcggaggggcccccgggcacctgcgtggtgatggcgctgggagcccccgggcacgctcgggcggtggcgcggcatcccaccctcgcccggatggcgtccccagaggcggcgttggcccgcttttcgtgctagcgcgttcgcctggcgcgcggtggccccgaggccccgggtcggttttctgcgccgcaggcccctggccggggcggagccgtggaggaccagcccggcccggctccgagcgctgtccatgcggagcgctgtccacgcgccgggcactgcgggggccgggccccgaagccctacccgggccggcggcgcacacgcagcgaccccgtgcggccagtgctgccgcccgctctccaggtgctgcagcgcagtaaatgtaatttgaagaaggcagaaggaacccatggctttagccggctgcccagattcctttttgcaccatccgtactaccaggacaaggtggagcagacacctcgcagtcaacaagacccggcaggaccaggactccccgcacagtctgaccgacttgcgaatcaccaggaggatgatgtggacctggaagccctggtgaacgatatgaatgcatccctggagagcctgtactcggcctgcagcatgcagtcagacacggtgcccctcctgcagaatggccagcatgcccgcagccagcctcgggcttcaggccctcctcggtccatccagccacaggtgtccccgaggcagagggtgcagcgctcccagcctgtgcacatcctcgctgtcaggcgccttcaggaggaagaccagcagtttagaacctcatctctgccggccatccccaatccttttcctgaactctgtggccctgggagcccccctgtgctcacgccgggttctttacctccgagccaggccgccgcaaagcaggatgttaaagtctttagtgaagatgggacaagcaaagtggtggagattctagcagacatgacagccagagacctgtgccaattgctggtttacaaaagtcactgtgtggatgacaacagctggacactagtggagcaccacccgcacctaggattagagaggtgcttggaagaccatgagctggtggtccaggtggagagtaccatggccagtgagagtaaatttctattcaggaagaattacgcaaaatacgagttctttaaaaatcccatgaatttcttcccagaacagatggttacttggtgccagcagtcaaatggcagtcaaacccagcttttgcagaattttctgaactccagtagttgtcctgaaattcaagggtttttgcatgtgaaagagctgggaaagaaatcatggaaaaagctgtatgtgtgtttgcggagatctggcctttattgctccaccaagggaacttcaaaggaacccagacacctgcagctgctggccgacctggaggacagcaacatcttctccctgatcgctggcaggaagcagtacaacgcccctacagaccacgggctctgcataaagccaaacaaagtcaggaatgaaactaaagagctgaggttgctctgtgcagaggacgagcaaaccaggacgtgctggatgacagcgttcagactcctcaagtatggaatgctcctttaccagaattaccgaatccctcagcagaggaaggccttgctgtccccgttctcgacgccagtgcgcagtgtctccgagaactccctcgtggcaatggatttttctgggcaaacaggacgcgtgatagagaatccggcggaggcccagagcgcagccctggaggagggccacgcctggaggaagcgaagcacacggatgaacatcctaggtagccaaagtcccctccacccttctaccctaagtacagtgattcacaggacacagcactggtttcacgggaggatctccagggaggaatcccacaggatcattaaacagcaagggctcgtggatgggctttttctcctccgtgacagccagagtaatccaaaggcatttgtactcacactgtgtcatcaccagaaaattaaaaatttccagatcttaccttgcgaggacgacgggcagacgttcttcagcctagatgacgggaacaccaaattctctgacctgatccagctggttgacttttaccagctgaacaaaggagtcctgccttgcaaactcaagcaccactgcatccgagtggccttatgaccgcagatgtcctctcggctgaagactggaggaagtgaacactggagtgaagaagcggtctgtgcgttggtgaagaacacacatcgattctgcacctggggacccagagcgagatgggtttgttcggtgccagccgaccaagattgactagtttgttggacttaaacgacgatttgctgctgtgaacccagcagggtcgcctccctctgcgtcggccaaattggggagggcatggaagatccagcggaaagttgaaaataaactggaatgatcatcttggcttgggccgcttaggaacaagaaccggagagaagtgattggaaatgaactcttgccctggaataatcttgacaattaaaactgatatgtttactttttttgtattgatcacttttttgcactccttctttgttttcaatattgtattcagcctattgtaggagggggatgtggcgtttcaactcatataatacagaaagagttttgaatgggcagatttcaaactgaatatgggtccccaaatgttcccagagggtcctccacaccctctgccgactaccacggtgtggattcagctcccaaatgacaaacccagcccttcccagtatacttgaaaagctttcttgttaaaataaaaggtgtcactgtggtaggcatttggcatattttgtggactcagtcaagcaaccacagtctgttaatcatttctctatgctcagatgtcagatcctcttgttattagtgtgtcttgttctgcacagtgcaggagactttattcctttggaaaattcactgttccacaaacagcaggctgaatggcctcgcctctagattgacgtgggccagcctccttgagacacacctggcacccgtcatcggccagcggtggatgctgcataatccacctgggtacttcagccttgcgtttccacagccttcagcctgttctagaacgatcactgccttacccctgctgctgcagtggtgtgagtcgtttcacggctgatgtccctcgggggattaaaggatctaaagagaaaatggcacctggttgtcttcgtgctgtgtctcatgggtttccatagtgataaagacaaggaaacgctgcaggggccacaggcacaggctgatatttaaagatctttgcttgcagccctccgtcctgctgaaaacccccataagccagtgaacacagagcagctagaggctcctcctctgctggcttagggtcagaagtacctcacagtggttgtggacatggaagagttttgtcaacacaacactttgtccccgctccgggagatgagtcagatggtggcttgagttgtcacttggtcccctccgcccctcgggtggccccctttgccacgtccccttagcttagtgatcaggtgtgagagtggccatttccttacctttgatccctgtaaagcagaaaggactcctttgacaggcgacaaactactgtggtgagcagaatgatttcctttttcaagacaacacctgcctggcttctattaatgtgtgctggccatgatattgccccaaatccgccccactgaagtgttccctaaggaacagcatttctctgctcctcagtcaacccccgtagcctagagcagtgtcacaagcttcagtaaggccagtcagctggaagtcagtctaccgtatagtaacactgtatttcagtctacagaccacactctagttgttttccatgaaaggtatacaaatgaagaattttctagcaaaacatgtttttaaccatcagtgctcaattgcattttcttcctttcgcagccagtcagtctttcaaactattgacagtaagataattctcacgttcacacctggtggcaggcttcactgtagggacggacattgcagttacaccacgattccttcctcttcactggctcgaggtaaacccttttcaaggaaaaacaactctaggatttcttttttctgtgtacgtagaccagtcccatcagtgtataatctctctctcacacgcctctctccaatagacagcttgtatttgcagtatttcatatttataaatatgcgtttatttaaaaggagaacaaaagcttgactctgattcacagttttgtatgtagctggtttgacgtagtcttttgtattttccctgccgaagtgaattgttggagaatgtaaaccgcctccacgtggcggcagacttcctaaggccccagctcgctggcctcgcgctgggcggctgggaattccacctgagaacaagtcccgcaaaccggggacggaaggacatttgacttttatttttgtatttaattgacatgaatgtaaaggggacagctcagggttgttttggagcctgttgactttgtatctctgcctgtgattttcttttctaaatgaaactccatgtagcaaccaggacgaagttgagaaggaaaacgccaaatgctttggttattagagtttaataggtaagctctgttacactaggtgttagagttccagaatgttcttttgtttgctaaaccttgaagaaacatgtgcctcagcctagatgttttgtcttctcttttctgcacttaatacctgacagtatgaccgatctctgcgcctttctgggggcgggcaagctggcggtagatttgtgatgtcacagtgcaaactgcagtgactgtaaattggcctggcgtgtataaacgttttcagggaatgcagaaggtattaatgaagagacaaaacctttattccatgtgctttgcttcattctgtacatagctctttggctcgtgaacctaattgtaaactttcaggtatttttgtacaaataagggactgatgttctgtttcttgtaattagaaataaacattaatacagtgttcttcattttcaaaaaaaa

SEQ ID NO: 438524 - DNA, 4685 bp, Homo sapiens
  misc_feature (13)..(13): n is a, c, g, or t
  misc_feature (4685)..(4685): n is a, c, g, or t
ggcgcaactttgnctcccagggaacaaacatcctccttctaagtggtagatgtgggtgagctgaccctgctggagtctgtcccctgggctaccctctgcttccccccattgtgagtggtccgtgaagcacagcgttgaccagacctaaacctgtttgctcccaggacaaggtggagcagacacctcgcagtcaacaagacccggcaggaccaggactccccgcacagtctgaccgacttgcgaatcaccaggaggatgatgtggacctggaagccctggtgaacgatatgaatgcatccctggagagcctgtactcggcctgcagcatgcagtcagacacggtgcccctcctgcagaatggccagcatgcccgcagccagcctcgggcttcaggccctcctcggtccatccagccacaggtgtccccgaggcagagggtgcagcgctcccagcctgtgcacatcctcgctgtcaggcgccttcaggaggaagaccagcagtttagaacctcatctctgccggccatccccaatccttttcctgaactctgtggccctgggagcccccctgtgctcacgccgggttctttacctccgagccaggccgccgcaaagcaggatgttaaagtctttagtgaagatgggacaagcaaagtggtggagattctagcagacatgacagccagagacctgtgccaattgctggtttacaaaagtcactgtgtggatgacaacagctggacactagtggagcaccacccgcacctaggattagagaggtgcttggaagaccatgagctggtggtccaggtggagagtaccatggccagtgagagtaaatttctattcaggaagaattacgcaaaatacgagttctttaaaaatcccatgaatttcttcccagaacagatggttacttggtgccagcagtcaaatggcagtcaaacccagcttttgcagaattttctgaactccagtagttgtcctgaaattcaagggtttttgcatgtgaaagagctgggaaagaaatcatggaaaaagctgtatgtgtgtttgcggagatctggcctttattgctccaccaagggaacttcaaaggaacccagacacctgcagctgctggccgacctggaggacagcaacatcttctccctgatcgctggcaggaagcagtacaacgcccctacagaccacgggctctgcataaagccaaacaaagtcaggaatgaaactaaagagctgaggttgctctgtgcagaggacgagcaaaccaggacgtgctggatgacagcgttcagactcctcaagtatggaatgctcctttaccagaattaccgaatccctcagcagaggaaggccttgctgtccccgttctcgacgccagtgcgcagtgtctccgagaactccctcgtggcaatggatttttctgggcaaacaggacgcgtgatagagaatccggcggaggcccagagcgcagccctggaggagggccacgcctggaggaagcgaagcacacggatgaacatcctaggtagccaaagtcccctccacccttctaccctaagtacagtgattcacaggacacagcactggtttcacgggaggatctccagggaggaatcccacaggatcattaaacagcaagggctcgtggatgggctttttctcctccgtgacagccagagtaatccaaaggcatttgtactcacactgtgtcatcaccagaaaattaaaaatttccagatcttaccttgcgaggacgacgggcagacgttcttcagcctagatgacgggaacaccaaattctctgacctgatccagctggttgacttttaccagctgaacaaaggagtcctgccttgcaaactcaagcaccactgcatccgagtggccttatgaccgcagatgtcctctcggctgaagactggaggaagtgaacactggagtgaagaagcggtctgtgcgttggtgaagaacacacatcgattctgcacctggggacccagagcgagatgggtttgttcggtgccagccgaccaagattgactagtttgttggacttaaacgacgatttgctgctgtgaacccagcagggtcgcctccctctgcgtcggccaaattggggagggcatggaagatccagcggaaagttgaaaataaactggaatgatcatcttggcttgggccgcttaggaacaagaaccggagagaagtgattggaaatgaactcttgccctggaataatcttgacaattaaaactgatatgtttactttttttgtattgatcacttttttgcactccttctttgttttcaatattgtattcagcctattgtaggagggggatgtggcgtttcaactcatataatacagaaagagttttgaatgggcagatttcaaactgaatatgggtccccaaatgttcccagagggtcctccacaccctctgccgactaccacggtgtggattcagctcccaaatgacaaacccagcccttcccagtatacttgaaaagctttcttgttaaaataaaaggtgtcactgtggtaggcatttggcatattttgtggactcagtcaagcaaccacagtctgttaatcatttctctatgctcagatgtcagatcctcttgttattagtgtgtcttgttctgcacagtgcaggagactttattcctttggaaaattcactgttccacaaacagcaggctgaatggcctcgcctctagattgacgtgggccagcctccttgagacacacctggcacccgtcatcggccagcggtggatgctgcataatccacctgggtacttcagccttgcgtttccacagccttcagcctgttctagaacgatcactgccttacccctgctgctgcagtggtgtgagtcgtttcacggctgatgtccctcgggggattaaaggatctaaagagaaaatggcacctggttgtcttcgtgctgtgtctcatgggtttccatagtgataaagacaaggaaacgctgcaggggccacaggcacaggctgatatttaaagatctttgcttgcagccctccgtcctgctgaaaacccccataagccagtgaacacagagcagctagaggctcctcctctgctggcttagggtcagaagtacctcacagtggttgtggacatggaagagttttgtcaacacaacactttgtccccgctccgggagatgagtcagatggtggcttgagttgtcacttggtcccctccgcccctcgggtggccccctttgccacgtccccttagcttagtgatcaggtgtgagagtggccatttccttacctttgatccctgtaaagcagaaaggactcctttgacaggcgacaaactactgtggtgagcagaatgatttcctttttcaagacaacacctgcctggcttctattaatgtgtgctggccatgatattgccccaaatccgccccactgaagtgttccctaaggaacagcatttctctgctcctcagtcaacccccgtagcctagagcagtgtcacaagcttcagtaaggccagtcagctggaagtcagtctaccgtatagtaacactgtatttcagtctacagaccacactctagttgttttccatgaaaggtatacaaatgaagaattttctagcaaaacatgtttttaaccatcagtgctcaattgcattttcttcctttcgcagccagtcagtctttcaaactattgacagtaagataattctcacgttcacacctggtggcaggcttcactgtagggacggacattgcagttacaccacgattccttcctcttcactggctcgaggtaaacccttttcaaggaaaaacaactctaggatttcttttttctgtgtacgtagaccagtcccatcagtgtataatctctctctcacacgcctctctccaatagacagcttgtatttgcagtatttcatatttataaatatgcgtttatttaaaaggagaacaaaagcttgactctgattcacagttttgtatgtagctggtttgacgtagtcttttgtattttccctgccgaagtgaattgttggagaatgtaaaccgcctccacgtggcggcagacttcctaaggccccagctcgctggcctcgcgctgggcggctgggaattccacctgagaacaagtcccgcaaaccggggacggaaggacatttgacttttatttttgtatttaattgacatgaatgtaaaggggacagctcagggttgttttggagcctgttgactttgtatctctgcctgtgattttcttttctaaatgaaactccatgtagcaaccaggacgaagttgagaaggaaaacgccaaatgctttggttattagagtttaataggtaagctctgttacactaggtgttagagttccagaatgttcttttgtttgctaaaccttgaagaaacatgtgcctcagcctagatgttttgtcttctcttttctgcacttaatacctgacagtatgaccgatctctgcgcctttctggggggagtggggcattgtgaggtccggactggggaggaatggcgggtataagtggaggaaggtttaaggaactttcgtgtggttctcaattgtgggcataaccaatgaagagggttgcgaacactcttgaaaaagggggctgggtgttgttgtactggtcgtaacttgn

SEQ ID NO: 438525 - DNA, 5315 bp, Homo sapiens
gcggccgcgatgtcccccgcctgtctgcgaatgcggcgtagcgggtagacatggagggctttcggcatcgtcagagtggccagtgtgcgcgtccttgcccatcaggcgggggggctgtgggggaggagaggaggcagtggagggaacaaggggttcttcagggttgccatgagaaccagggatccggggattgggcagcagagggcccccgccgggcgttggggcgtggccgcgtcacatgggtttggtcctgggattcctgttgtgctccaggaccgggcgctgctccgtcgtcctcccgctcctcaggagcgcccagtccctcggaggctgagtattgcagccgggcggcagccggctccgcggaggggcccccgggcacctgcgtggtgatggcgctgggagcccccgggcacgctcgggcggtggcgcggcatcccaccctcgcccggatggcgtccccagaggcggcgttggcccgcttttcgtgctagcgcgttcgcctggcgcgcggtggccccgaggccccgggtcggttttctgcgccgcaggcccctggccggggcggagccgtggaggaccagcccggcccggctccgagcgctgtccatgcggagcgctgtccacgcgccgggcactgcgggggccgggccccgaagccctacccgggccggcggcgcacacgcagcgaccccgtgcggccagtgctgccgcccgctctccaggtgctgcagcgcagtaaatgtaatttgaagaaggcagaaggaacccatggctttagccggctgcccagattcctttttgcaccatccgtactaccaggacaaggtggagcagacacctcgcagtcaacaagacccggcaggaccaggactccccgcacagtctgaccgacttgcgaatcaccaggaggatgatgtggacctggaagccctggtgaacgatatgaatgcatccctggagagcctgtactcggcctgcagcatgcagtcagacacggtgcccctcctgcagaatggccagcatgcccgcagccagcctcgggcttcaggccctcctcggtccatccagccacaggtgtccccgaggcagagggtgcagcgctcccagcctgtgcacatcctcgctgtcaggcgccttcaggaggaagaccagcagtttagaacctcatctctgccggccatccccaatccttttcctgaactctgtggccctgggagcccccctgtgctcacgccgggttctttacctccgagccaggccgccgcaaagcaggatgttaaagtctttagtgaagatgggacaagcaaagtggtggagattctagcagacatgacagccagagacctgtgccaattgctggtttacaaaagtcactgtgtggatgacaacagctggacactagtggagcaccacccgcacctaggattagagaggtgcttggaagaccatgagctggtggtccaggtggagagtaccatggccagtgagagtaaatttctattcaggaagaattacgcaaaatacgagttctttaaaaatcccatgaatttcttcccagaacagatggttacttggtgccagcagtcaaatggcagtcaaacccagcttttgcaggaacccagacacctgcagctgctggccgacctggaggacagcaacatcttctccctgatcgctggcaggaagcagtacaacgcccctacagaccacgggctctgcataaagccaaacaaagtcaggaatgaaactaaagagctgaggttgctctgtgcagaggacgagcaaaccaggacgtgctggatgacagcgttcagactcctcaagtatggaatgctcctttaccagaattaccgaatccctcagcagaggaaggccttgctgtccccgttctcgacgccagtgcgcagtgtctccgagaactccctcgtggcaatggatttttctgggcaaacaggacgcgtgatagagaatccggcggaggcccagagcgcagccctggaggagggccacgcctggaggaagcgaagcacacggatgaacatcctaggtagccaaagtcccctccacccttctaccctaagtacagtgattcacaggacacagcactggtttcacgggaggatctccagggaggaatcccacaggatcattaaacagcaagggctcgtggatgggctttttctcctccgtgacagccagagtaatccaaaggcatttgtactcacactgtgtcatcaccagaaaattaaaaatttccagatcttaccttgcgaggacgacgggcagacgttcttcagcctagatgacgggaacaccaaattctctgacctgatccagctggttgacttttaccagctgaacaaaggagtcctgccttgcaaactcaagcaccactgcatccgagtggccttatgaccgcagatgtcctctcggctgaagactggaggaagtgaacactggagtgaagaagcggtctgtgcgttggtgaagaacacacatcgattctgcacctggggacccagagcgagatgggtttgttcggtgccagccgaccaagattgactagtttgttggacttaaacgacgatttgctgctgtgaacccagcagggtcgcctccctctgcgtcggccaaattggggagggcatggaagatccagcggaaagttgaaaataaactggaatgatcatcttggcttgggccgcttaggaacaagaaccggagagaagtgattggaaatgaactcttgccctggaataatcttgacaattaaaactgatatgtttactttttttgtattgatcacttttttgcactccttctttgttttcaatattgtattcagcctattgtaggagggggatgtggcgtttcaactcatataatacagaaagagttttgaatgggcagatttcaaactgaatatgggtccccaaatgttcccagagggtcctccacaccctctgccgactaccacggtgtggattcagctcccaaatgacaaacccagcccttcccagtatacttgaaaagctttcttgttaaaataaaaggtgtcactgtggtaggcatttggcatattttgtggactcagtcaagcaaccacagtctgttaatcatttctctatgctcagatgtcagatcctcttgttattagtgtgtcttgttctgcacagtgcaggagactttattcctttggaaaattcactgttccacaaacagcaggctgaatggcctcgcctctagattgacgtgggccagcctccttgagacacacctggcacccgtcatcggccagcggtggatgctgcataatccacctgggtacttcagccttgcgtttccacagccttcagcctgttctagaacgatcactgccttacccctgctgctgcagtggtgtgagtcgtttcacggctgatgtccctcgggggattaaaggatctaaagagaaaatggcacctggttgtcttcgtgctgtgtctcatgggtttccatagtgataaagacaaggaaacgctgcaggggccacaggcacaggctgatatttaaagatctttgcttgcagccctccgtcctgctgaaaacccccataagccagtgaacacagagcagctagaggctcctcctctgctggcttagggtcagaagtacctcacagtggttgtggacatggaagagttttgtcaacacaacactttgtccccgctccgggagatgagtcagatggtggcttgagttgtcacttggtcccctccgcccctcgggtggccccctttgccacgtccccttagcttagtgatcaggtgtgagagtggccatttccttacctttgatccctgtaaagcagaaaggactcctttgacaggcgacaaactactgtggtgagcagaatgatttcctttttcaagacaacacctgcctggcttctattaatgtgtgctggccatgatattgccccaaatccgccccactgaagtgttccctaaggaacagcatttctctgctcctcagtcaacccccgtagcctagagcagtgtcacaagcttcagtaaggccagtcagctggaagtcagtctaccgtatagtaacactgtatttcagtctacagaccacactctagttgttttccatgaaaggtatacaaatgaagaattttctagcaaaacatgtttttaaccatcagtgctcaattgcattttcttcctttcgcagccagtcagtctttcaaactattgacagtaagataattctcacgttcacacctggtggcaggcttcactgtagggacggacattgcagttacaccacgattccttcctcttcactggctcgaggtaaacccttttcaaggaaaaacaactctaggatttcttttttctgtgtacgtagaccagtcccatcagtgtataatctctctctcacacgcctctctccaatagacagcttgtatttgcagtatttcatatttataaatatgcgtttatttaaaaggagaacaaaagcttgactctgattcacagttttgtatgtagctggtttgacgtagtcttttgtattttccctgccgaagtgaattgttggagaatgtaaaccgcctccacgtggcggcagacttcctaaggccccagctcgctggcctcgcgctgggcggctgggaattccacctgagaacaagtcccgcaaaccggggacggaaggacatttgacttttatttttgtatttaattgacatgaatgtaaaggggacagctcagggttgttttggagcctgttgactttgtatctctgcctgtgattttcttttctaaatgaaactccatgtagcaaccaggacgaagttgagaaggaaaacgccaaatgctttggttattagagtttaataggtaagctctgttacactaggtgttagagttccagaatgttcttttgtttgctaaaccttgaagaaacatgtgcctcagcctagatgttttgtcttctcttttctgcacttaatacctgacagtatgaccgatctctgcgcctttctgggggcgggcaagctggcggtagatttgtgatgtcacagtgcaaactgcagtgactgtaaattggcctggcgtgtataaacgttttcagggaatgcagaaggtattaatgaagagacaaaacctttattccatgtgctttgcttcattctgtacatagctctttggctcgtgaacctaattgtaaactttcaggtatttttgtacaaataagggactgatgttctgtttcttgtaattagaaataaacattaatacagtgttcttcattttcaaaaaaaa

SEQ ID NO: 438526 - DNA, 5219 bp, Homo sapiens
gtagctggaaggggaggtggggcaagggaggggacccccagcctgtcacctgggttgcctgcatggtactgagtgagctggtggcttctgtgtgggcctctggctgtggggatggtcagacaggaatagacacaatgctgcccaccctctgcatgcatgtgtgtgctggcatgcacacacacgtgtgcacacacatctacatgcacatacccacacgtgcatacatacatgtatagacatacacctttgtgcatacacacaggtatagacatacacctttgtgcatacacatacattatacacacatgtacatagacacacatacacatgtgcacacacctataggcagagcccactccttttcccctgatgaggttgtggtggtattaataatcataatggtagatgatatttactgaatgcttactgtgcatgatatgttccactgacagttttacatccattatcttaatcttcacagccccttgtgggataggaagttggccacattgcccacatccagtagccagtgaatagttgtgcttggagtttgccctgtaggctgacttatgagccatagcccaagccacatcccgagaacacacaatacggggagcccctccttaggggaaaatttctttccaaaatatcacctcataccttgctcagggaatactctttcggttataagtaataggcgtctaattcacaccagctagaggcccaaggcagcctcaggcggggctggaggtatgagcagcagctggcactctcccttcccaccagcccacaccagccatgcttgcctgtctctgcaaacgcagtctctgcttctctcatagcaccagccgagcgcagggtagtcacacctgtccctcaacccctccagattcttgggagggagagctggggtgtgtccagcattgtttcttgagtctgaggtcgggggttcttctggagatgcaggtcagtttatgcctgcaacaattctcctccctcaccaaagggccctgcctctggaggggcacctgtcttctccccatggtgcctacttccccttctgtctcattctccagagccaacatcagtctccctctctggaccttctacttggggtctgatcttggggctgctcagacatcagaatccctgagctcctcaggggttgcccctcttggctaagccctgcagcagcccctcctctcagtggcctgggggcaactttaagatctctcctcctgtaagtcagaaggcaggttctcctcccatagaatccagtccgtcgacagagttagatgcctcttcctctttgtcctattgtgcttaccacattacgttgtcctgtgctagtttgtttttctgtctcctctgaagttcccaaaggatggcttattattcagctaagtggtacacaacctggggccagtccatggtaggcacttaataaagtcttgtcaggaaggtggatgaatgaacgcttaacacacaggtgtgtgtgtatctgctgtgctccttgctagggggatctccagctggttgtctctggtttgtgtcagatgcagccctgccttgacagaagctgtttctgactccctgtgtaacactaacaggactttcttttacctcctgtagccaaacaaagtcaggaatgaaactaaagagctgaggttgctctgtgcagaggacgagcaaaccaggacgtgctggatgacagcgttcagactcctcaagtatggaatgctcctttaccagaattaccgaatccctcagcagaggaaggccttgctgtccccgttctcgacgccagtgcgcagtgtctccgagaactccctcgtggcaatggatttttctgggcaaacaggacgcgtgatagagaatccggcggaggcccagagcgcagccctggaggagggccacgcctggaggaagcgaagcacacggatgaacatcctaggtagccaaagtcccctccacccttctaccctaagtacagtgattcacaggacacagcactggtttcacgggaggatctccagggaggaatcccacaggatcattaaacagcaagggctcgtggatgggctttttctcctccgtgacagccagagtaatccaaaggcatttgtactcacactgtgtcatcaccagaaaattaaaaatttccagatcttaccttgcgaggacgacgggcagacgttcttcagcctagatgacgggaacaccaaattctctgacctgatccagctggttgacttttaccagctgaacaaaggagtcctgccttgcaaactcaagcaccactgcatccgagtggccttatgaccgcagatgtcctctcggctgaagactggaggaagtgaacactggagtgaagaagcggtctgtgcgttggtgaagaacacacatcgattctgcacctggggacccagagcgagatgggtttgttcggtgccagccgaccaagattgactagtttgttggacttaaacgacgatttgctgctgtgaacccagcagggtcgcctccctctgcgtcggccaaattggggagggcatggaagatccagcggaaagttgaaaataaactggaatgatcatcttggcttgggccgcttaggaacaagaaccggagagaagtgattggaaatgaactcttgccctggaataatcttgacaattaaaactgatatgtttactttttttgtattgatcacttttttgcactccttctttgttttcaatattgtattcagcctattgtaggagggggatgtggcgtttcaactcatataatacagaaagagttttgaatgggcagatttcaaactgaatatgggtccccaaatgttcccagagggtcctccacaccctctgccgactaccacggtgtggattcagctcccaaatgacaaacccagcccttcccagtatacttgaaaagctttcttgttaaaataaaaggtgtcactgtggtaggcatttggcatattttgtggactcagtcaagcaaccacagtctgttaatcatttctctatgctcagatgtcagatcctcttgttattagtgtgtcttgttctgcacagtgcaggagactttattcctttggaaaattcactgttccacaaacagcaggctgaatggcctcgcctctagattgacgtgggccagcctccttgagacacacctggcacccgtcatcggccagcggtggatgctgcataatccacctgggtacttcagccttgcgtttccacagccttcagcctgttctagaacgatcactgccttacccctgctgctgcagtggtgtgagtcgtttcacggctgatgtccctcgggggattaaaggatctaaagagaaaatggcacctggttgtcttcgtgctgtgtctcatgggtttccatagtgataaagacaaggaaacgctgcaggggccacaggcacaggctgatatttaaagatctttgcttgcagccctccgtcctgctgaaaacccccataagccagtgaacacagagcagctagaggctcctcctctgctggcttagggtcagaagtacctcacagtggttgtggacatggaagagttttgtcaacacaacactttgtccccgctccgggagatgagtcagatggtggcttgagttgtcacttggtcccctccgcccctcgggtggccccctttgccacgtccccttagcttagtgatcaggtgtgagagtggccatttccttacctttgatccctgtaaagcagaaaggactcctttgacaggcgacaaactactgtggtgagcagaatgatttcctttttcaagacaacacctgcctggcttctattaatgtgtgctggccatgatattgccccaaatccgccccactgaagtgttccctaaggaacagcatttctctgctcctcagtcaacccccgtagcctagagcagtgtcacaagcttcagtaaggccagtcagctggaagtcagtctaccgtatagtaacactgtatttcagtctacagaccacactctagttgttttccatgaaaggtatacaaatgaagaattttctagcaaaacatgtttttaaccatcagtgctcaattgcattttcttcctttcgcagccagtcagtctttcaaactattgacagtaagataattctcacgttcacacctggtggcaggcttcactgtagggacggacattgcagttacaccacgattccttcctcttcactggctcgaggtaaacccttttcaaggaaaaacaactctaggatttcttttttctgtgtacgtagaccagtcccatcagtgtataatctctctctcacacgcctctctccaatagacagcttgtatttgcagtatttcatatttataaatatgcgtttatttaaaaggagaacaaaagcttgactctgattcacagttttgtatgtagctggtttgacgtagtcttttgtattttccctgccgaagtgaattgttggagaatgtaaaccgcctccacgtggcggcagacttcctaaggccccagctcgctggcctcgcgctgggcggctgggaattccacctgagaacaagtcccgcaaaccggggacggaaggacatttgacttttatttttgtatttaattgacatgaatgtaaaggggacagctcagggttgttttggagcctgttgactttgtatctctgcctgtgattttcttttctaaatgaaactccatgtagcaaccaggacgaagttgagaaggaaaacgccaaatgctttggttattagagtttaataggtaagctctgttacactaggtgttagagttccagaatgttcttttgtttgctaaaccttgaagaaacatgtgcctcagcctagatgttttgtcttctcttttctgcacttaatacctgacagtatgaccgatctctgcgcctttctgggggcgggcaagctggcggtagatttgtgatgtcacagtgcaaactgcagtgactgtaaattggcctggcgtgtataaacgttttcagggaatgcagaaggtattaatgaagagacaaaacctttattccatgtgctttgcttcattctgtacatagctctttggctcgtgaacctaattgtaaactttcaggtatttttgtacaaataagggactgatgttctgtttcttgtaattagaaataaacattaatacagtgttcttcattttcaaaaaaaa

SEQ ID NO: 438527 - DNA, 3277 bp, Homo sapiens
  misc_feature (3251)..(3251): n is a, c, g, or t
  misc_feature (3262)..(3263): n is a, c, g, or t
gcggccgcgatgtcccccgcctgtctgcgaatgcggcgtagcgggtagacatggagggctttcggcatcgtcagagtggccagtgtgcgcgtccttgcccatcaggcgggggggctgtgggggaggagaggaggcagtggagggaacaaggggttcttcagggttgccatgagaaccagggatccggggattgggcagcagagggcccccgccgggcgttggggcgtggccgcgtcacatgggtttggtcctgggattcctgttgtgctccaggaccgggcgctgctccgtcgtcctcccgctcctcaggagcgcccagtccctcggaggctgagtattgcagccgggcggcagccggctccgcggaggggcccccgggcacctgcgtggtgatggcgctgggagcccccgggcacgctcgggcggtggcgcggcatcccaccctcgcccggatggcgtccccagaggcggcgttggcccgcttttcgtgctagcgcgttcgcctggcgcgcggtggccccgaggccccgggtcggttttctgcgccgcaggcccctggccggggcggagccgtggaggaccagcccggcccggctccgagcgctgtccatgcggagcgctgtccacgcgccgggcactgcgggggccgggccccgaagccctacccgggccggcggcgcacacgcagcgaccccgtgcggccagtgctgccgcccgctctccagacttgggaggctgcattctgataattctcaggaggaagaatgtataggagagaccagggtttttaaggtgtgacctctgaaccacctacatcagagctgactgcctctcgctttggcgctgaccacaatgctgagcaggaagcagcagctgcaggcccagtgactggtagctcagtgaccagcagcccagtgaccggcagccaggtcctcacctgggtcctctcagtgaagccagggtggccgccccagcagacagtgctacagagccaactcctgacaggtgctgcagcgcagtaaatgtaatttgaagaaggcagaaggaacccatggctttagccggctgcccagattcctttttgcaccatccgtactaccaggacaaggtggagcagacacctcgcagtcaacaagacccggcaggaccaggactccccgcacagtctgaccgacttgcgaatcaccaggaggatgatgtggacctggaagccctggtgaacgatatgaatgcatccctggagagcctgtactcggcctgcagcatgcagtcagacacggtgcccctcctgcagaatggccagcatgcccgcagccagcctcgggcttcaggccctcctcggtccatccagccacaggtgtccccgaggcagagggtgcagcgctcccagcctgtgcacatcctcgctgtcaggcgccttcaggaggaagaccagcagtttagaacctcatctctgccggccatccccaatccttttcctgaactctgtggccctgggagcccccctgtgctcacgccgggttctttacctccgagccaggccgccgcaaagcaggatgttaaagtctttagtgaagatgggacaagcaaagtggtggagattctagcagacatgacagccagagacctgtgccaattgctggtttacaaaagtcactgtgtggatgacaacagctggacactagtggagcaccacccgcacctaggattagagaggtgcttggaagaccatgagctggtggtccaggtggagagtaccatggccagtgagagtaaatttctattcaggaagaattacgcaaaatacgagttctttaaaaatcccatgaatttcttcccagaacagatggttacttggtgccagcagtcaaatggcagtcaaacccagcttttgcagaattttctgaactccagtagttgtcctgaaattcaagggtttttgcatgtgaaagagctgggaaagaaatcatggaaaaagctgtatgtgtgtttgcggagatctggcctttattgctccaccaagggaacttcaaaggaacccagacacctgcagctgctggccgacctggaggacagcaacatcttctccctgatcgctggcaggaagcagtacaacgcccctacagaccacgggctctgcataaagccaaacaaagtcaggaatgaaactaaagagctgaggttgctctgtgcagaggacgagcaaaccaggacgtgctggatgacagcgttcagactcctcaagtatggaatgctcctttaccagaattaccgaatccctcagcagaggaaggccttgctgtccccgttctcgacgccagtgcgcagtgtctccgagaactccctcgtggcaatggatttttctgggcaaacaggacgcgtgatagagaatccggcggaggcccagagcgcagccctggaggagggccacgcctggaggaagcgaagcacacggatgaacatcctaggtagccaaagtcccctccacccttctaccctaagtacagtgattcacaggacacagcactggtttcacgggaggatctccagggaggaatcccacaggatcattaaacagcaagggctcgtggatgggctttttctcctccgtgacagccagagtaatccaaaggcatttgtactcacactgtgtcatcaccagaaaattaaaaatttccagatcttaccttgcgaggacgacgggcagacgttcttcagcctagatgacgggaacaccaaattctctgacctgatccagctggttgacttttaccagctgaacaaaggagtcctgccttgcaaactcaagcaccactgcatccgagtggccttatgaccgcagatgtcctctcggctgaagactggaggaagtgaacactggagtgaagaagcggtctgtgcgttggtgaagaacacacatcgattctgcacctggggacccagagcgagatgggtttgttcggtgccagccgaccaagattgactagtttgttggacttaaacgacgatttgctgctgtgaacccagcagggtcgcctccctctgcgtcggccaaattggggagggcatggaagatccagcggaaagttgaaaataaactggaatgatcatcttggcttgggccgcttaggaacaagaaccggagagaagtgattggaaatgaactcttgccctggaataatcttgacaattaaaactgataactgtcaaaaaaaaaaaaaaaaaaaaaaaaaaaaaaaaaaaaaaaaaanaaaaaaaaaanngcagaaaaaaaaaa

SEQ ID NO: 438528 - DNA, 2085 bp, Homo sapiens
gcggccgcgatgtcccccgcctgtctgcgaatgcggcgtagcgggtagacatggagggctttcggcatcgtcagagtggccagtgtgcgcgtccttgcccatcaggcgggggggctgtgggggaggagaggaggcagtggagggaacaaggggttcttcagggttgccatgagaaccagggatccggggattgggcagcagagggcccccgccgggcgttggggcgtggccgcgtcacatgggtttggtcctgggattcctgttgtgctccaggaccgggcgctgctccgtcgtcctcccgctcctcaggagcgcccagtccctcggaggctgagtattgcagccgggcggcagccggctccgcggaggggcccccgggcacctgcgtggtgatggcgctgggagcccccgggcacgctcgggcggtggcgcggcatcccaccctcgcccggatggcgtccccagaggcggcgttggcccgcttttcgtgctagcgcgttcgcctggcgcgcggtggccccgaggccccgggtcggttttctgcgccgcaggcccctggccggggcggagccgtggaggaccagcccggcccggctccgagcgctgtccatgcggagcgctgtccacgcgccgggcactgcgggggccgggccccgaagccctacccgggccggcggcgcacacgcagcgaccccgtgcggccagtgctgccgcccgctctccagctttggcgctgaccacaatgctgagcaggaagcagcagctgcaggcccagtgactggtagctcagtgaccagcagcccagtgaccggcagccaggtcctcacctgggtcctctcagtgaagccagggtggccgccccagcagacagtgctacagagccaactcctgacaggacaaggtggagcagacacctcgcagtcaacaagacccggcaggaccaggactccccgcacagtctgaccgacttgcgaatcaccaggaggatgatgtggacctggaagccctggtgaacgatatgaatgcatccctggagagcctgtactcggcctgcagcatgcagtcagacacggtgcccctcctgcagaatggccagcatgcccgcagccagcctcgggcttcaggccctcctcggtccatccagccacaggtgtccccgaggcagagggtgcagcgctcccagcctgtgcacatcctcgctgtcaggcgccttcaggaggaagaccagcagtttagaacctcatctctgccggccatccccaatccttttcctgaactctgtggccctgggagcccccctgtgctcacgccgggttctttacctccgagccaggccgccgcaaagcaggatgttaaagtctttagtgaagatgggacaagcaaagtggtggagattctagcagacatgacagccagagacctgtgccaattgctggtttacaaaagtcactgtgtggatgacaacagctggacactagtggagcaccacccgcacctaggattagagaggtgcttggaagaccatgagctggtggtccaggtggagagtaccatggccagtgagagtaaatttctattcaggaagaattacgcaaaatacgagttctttaaaaatcccatgaatttcttcccagaacagatggttacttggtgccagcagtcaaatggcagtcaaacccagcttttgcagaattttctgaactccagtagttgtcctgaaattcaagggtttttgcatgtgaaagagctgggaaagaaatcatggaaaaagctgtatgtgtgtttgcggagatctggcctttattgctccaccaagggaacttcaaaggaacccagacacctgcagctgctggccgacctggaggacagcaacatcttctccctgatcgctggcaggaagcagtacaacgcccctacagaccacgggctctgcataaagccaaacaaagtcaggaatgaaactaaagagctgaggttgctctgtgcagaggacgagcaaaccaggacgtgctggatgacagcgttcagactcctcaagtatggaatgctcctttaccacacaagaaccacagggtaccgagctcg

SEQ ID NO: 438529 - DNA, 1714 bp, Homo sapiens
gcggccgcgatgtcccccgcctgtctgcgaatgcggcgtagcgggtagacatggagggctttcggcatcgtcagagtggccagtgtgcgcgtccttgcccatcaggcgggggggctgtgggggaggagaggaggcagtggagggaacaaggggttcttcagggttgccatgagaaccagggatccggggattgggcagcagagggcccccgccgggcgttggggcgtggccgcgtcacatgggtttggtcctgggattcctgttgtgctccaggaccgggcgctgctccgtcgtcctcccgctcctcaggagcgcccagtccctcggaggctgagtattgcagccgggcggcagccggctccgcggaggggcccccgggcacctgcgtggtgatggcgctgggagcccccgggcacgctcgggcggtggcgcggcatcccaccctcgcccggatggcgtccccagaggcggcgttggcccgcttttcgtgctagcgcgttcgcctggcgcgcggtggccccgaggccccgggtcggttttctgcgccgcaggcccctggccggggcggagccgtggaggaccagcccggcccggctccgagcgctgtccatgcggagcgctgtccacgcgccgggcactgcgggggccgggccccgaagccctacccgggccggcggcgcacacgcagcgaccccgtgcggccagtgctgccgcccgctctccagctttggcgctgaccacaatgctgagcaggaagcagcagctgcaggcccagtgactggtagctcagtgaccagcagcccagtgaccggcagccaggtcctcacctgggtcctctcagtgaagccagggtggccgccccagcagacagtgctacagagccaactcctgacaggacaaggtggagcagacacctcgcagtcaacaagacccggcaggaccaggactccccgcacagtctgaccgacttgcgaatcaccaggaggatgatgtggacctggaagccctggtgaacgatatgaatgcatccctggagagcctgtactcggcctgcagcatgcagtcagacacggtgcccctcctgcagaatggccagcatgcccgcagccagcctcgggcttcaggccctcctcggtccatccagccacaggtgtccccgaggcagagggtgcagcgctcccagcctgtgcacatcctcgctgtcaggcgccttcaggaggaagaccagcagtttagaacctcatctctgccggccatccccaatccttttcctgaactctgtggccctgggagcccccctgtgctcacgccgggttctttacctccgagccaggccgccgcaaagcaggatgttaaagtctttagtgaagatgggacaagcaaagtggtggagattctagcagacatgacagccagagacctgtgccaattgctggtttacaaaagtcactgtgtggatgacaacagctggacactagtggagcaccacccgcacctaggattaggtagggaaccatcagaacaggattggcacctggggatgcttatgtgcaattgaatgaagactgctgctgccaaatgccaaatgtgtgaccgcagtgtcccctgcgaaattagcaggcagtctctgggttcccctcgactctcctgtttctcctaaaatttcactctcctccctccagcccctttcccctagtactttgggaatcttgcc

SEQ ID NO: 438530 - DNA, 543 bp, Homo sapiens
tctccagggaggaatcccacaggatcattaaacagcaagggctcgtggatgggtaaggaaccaccactgataagagctgtcatctgctaaggttttattgtgctggggatctgttctgtttaattcctcagacatccttgctggacaggcagcagttttgtcctcattttaaagaggagaaaaggtaggctagaggtataagtggtacgcagggcttgcccagctagtaaggggcagaaagggatctaatccatgtctgcccagagtgtatctgtaattatccttcacctctgtatgaaatctgaagagatggacaacacaagttgttttatcttcataaggtagtgggcagatggaaaaaaaatgcttttgcctacgctttttgattgtgtactacatgaggttggttttgctgagaacaaatagccccaaaccttagtggcttaaaacaacaaaaataaattacgtatcattgttggttgagtggcctttctcacctgggccagcttggctggggctggacagtccaggataggttcactc

SEQ ID NO: 438531 - DNA, 5445 bp, Homo sapiens
ggcagccgggcgccccgcggggctctccgcgctgcgttcccgacccctggggggaggtgtggagtccaagcggtgcattcttgaaccatcttgtcagacgccggcggctcgcgggctgtggcgggggctgcggtcaaggccgcgctcctgggggccgccgcctgggagggtgggcgcccaggcgtccctgcagccccgggtgctccgactgcgcggcggggccgcggcgcgcgcgcccgggcgtccgggcgtccgggacagtggtgccagacactcccaaatcccgagccggcccagcctcgtacggaggaccttttttttggttctgttggtgacccgttagccgccgctggggcctaacaccaagttgagggctcgcggattagccgcccgccagccgtggaaatgtgataagagcggtaccgtttgcagaaggaaatttctgatgcaactcttcgcctttgctgattgcctctccaaacgcctgcctgacgactgccttggagcatgtgcgttatggaaattaggctttggcgctgaccacaatgctgagcaggaagcagcagctgcaggcccagtgactggtagctcagtgaccagcagcccagtgaccggcagccaggtcctcacctgggtcctctcagtgaagccagggtggccgccccagcagacagtgctacagagccaactcctgacaggttctgaaaatattgtgcacagggcaggctgaggacacagccacgtgatacccactgtagagagagggagagagagacctcctatgcaagctgccggccctctgttccgtagtaaggacaaggtggagcagacacctcgcagtcaacaagacccggcaggaccaggactccccgcacagtctgaccgacttgcgaatcaccaggaggatgatgtggacctggaagccctggtgaacgatatgaatgcatccctggagagcctgtactcggcctgcagcatgcagtcagacacggtgcccctcctgcagaatggccagcatgcccgcagccagcctcgggcttcaggccctcctcggtccatccagccacaggtgtccccgaggcagagggtgcagcgctcccagcctgtgcacatcctcgctgtcaggcgccttcaggaggaagaccagcagtttagaacctcatctctgccggccatccccaatccttttcctgaactctgtggccctgggagcccccctgtgctcacgccgggttctttacctccgagccaggccgccgcaaagcaggatgttaaagtctttagtgaagatgggacaagcaaagtggtggagattctagcagacatgacagccagagacctgtgccaattgctggtttacaaaagtcactgtgtggatgacaacagctggacactagtggagcaccacccgcacctaggattagagaggtgcttggaagaccatgagctggtggtccaggtggagagtaccatggccagtgagagtaaatttctattcaggaagaattacgcaaaatacgagttctttaaaaatcccatgaatttcttcccagaacagatggttacttggtgccagcagtcaaatggcagtcaaacccagcttttgcagaattttctgaactccagtagttgtcctgaaattcaagggtttttgcatgtgaaagagctgggaaagaaatcatggaaaaagctgtatgtgtgtttgcggagatctggcctttattgctccaccaagggaacttcaaaggaacccagacacctgcagctgctggccgacctggaggacagcaacatcttctccctgatcgctggcaggaagcagtacaacgcccctacagaccacgggctctgcataaagccaaacaaagtcaggaatgaaactaaagagctgaggttgctctgtgcagaggacgagcaaaccaggacgtgctggatgacagcgttcagactcctcaagtatggaatgctcctttaccagaattaccgaatccctcagcagaggaaggccttgctgtccccgttctcgacgccagtgcgcagtgtctccgagaactccctcgtggcaatggatttttctgggcaaacaggacgcgtgatagagaatccggcggaggcccagagcgcagccctggaggagggccacgcctggaggaagcgaagcacacggatgaacatcctaggtagccaaagtcccctccacccttctaccctaagtacagtgattcacaggacacagcactggtttcacgggaggatctccagggaggaatcccacaggatcattaaacagcaagggctcgtggatgggctttttctcctccgtgacagccagagtaatccaaaggcatttgtactcacactgtgtcatcaccagaaaattaaaaatttccagatcttaccttgcgaggacgacgggcagacgttcttcagcctagatgacgggaacaccaaattctctgacctgatccagctggttgacttttaccagctgaacaaaggagtcctgccttgcaaactcaagcaccactgcatccgagtggccttatgaccgcagatgtcctctcggctgaagactggaggaagtgaacactggagtgaagaagcggtctgtgcgttggtgaagaacacacatcgattctgcacctggggacccagagcgagatgggtttgttcggtgccagccgaccaagattgactagtttgttggacttaaacgacgatttgctgctgtgaacccagcagggtcgcctccctctgcgtcggccaaattggggagggcatggaagatccagcggaaagttgaaaataaactggaatgatcatcttggcttgggccgcttaggaacaagaaccggagagaagtgattggaaatgaactcttgccctggaataatcttgacaattaaaactgatatgtttactttttttgtattgatcacttttttgcactccttctttgttttcaatattgtattcagcctattgtaggagggggatgtggcgtttcaactcatataatacagaaagagttttgaatgggcagatttcaaactgaatatgggtccccaaatgttcccagagggtcctccacaccctctgccgactaccacggtgtggattcagctcccaaatgacaaacccagcccttcccagtatacttgaaaagctttcttgttaaaataaaaggtgtcactgtggtaggcatttggcatattttgtggactcagtcaagcaaccacagtctgttaatcatttctctatgctcagatgtcagatcctcttgttattagtgtgtcttgttctgcacagtgcaggagactttattcctttggaaaattcactgttccacaaacagcaggctgaatggcctcgcctctagattgacgtgggccagcctccttgagacacacctggcacccgtcatcggccagcggtggatgctgcataatccacctgggtacttcagccttgcgtttccacagccttcagcctgttctagaacgatcactgccttacccctgctgctgcagtggtgtgagtcgtttcacggctgatgtccctcgggggattaaaggatctaaagagaaaatggcacctggttgtcttcgtgctgtgtctcatgggtttccatagtgataaagacaaggaaacgctgcaggggccacaggcacaggctgatatttaaagatctttgcttgcagccctccgtcctgctgaaaacccccataagccagtgaacacagagcagctagaggctcctcctctgctggcttagggtcagaagtacctcacagtggttgtggacatggaagagttttgtcaacacaacactttgtccccgctccgggagatgagtcagatggtggcttgagttgtcacttggtcccctccgcccctcgggtggccccctttgccacgtccccttagcttagtgatcaggtgtgagagtggccatttccttacctttgatccctgtaaagcagaaaggactcctttgacaggcgacaaactactgtggtgagcagaatgatttcctttttcaagacaacacctgcctggcttctattaatgtgtgctggccatgatattgccccaaatccgccccactgaagtgttccctaaggaacagcatttctctgctcctcagtcaacccccgtagcctagagcagtgtcacaagcttcagtaaggccagtcagctggaagtcagtctaccgtatagtaacactgtatttcagtctacagaccacactctagttgttttccatgaaaggtatacaaatgaagaattttctagcaaaacatgtttttaaccatcagtgctcaattgcattttcttcctttcgcagccagtcagtctttcaaactattgacagtaagataattctcacgttcacacctggtggcaggcttcactgtagggacggacattgcagttacaccacgattccttcctcttcactggctcgaggtaaacccttttcaaggaaaaacaactctaggatttcttttttctgtgtacgtagaccagtcccatcagtgtataatctctctctcacacgcctctctccaatagacagcttgtatttgcagtatttcatatttataaatatgcgtttatttaaaaggagaacaaaagcttgactctgattcacagttttgtatgtagctggtttgacgtagtcttttgtattttccctgccgaagtgaattgttggagaatgtaaaccgcctccacgtggcggcagacttcctaaggccccagctcgctggcctcgcgctgggcggctgggaattccacctgagaacaagtcccgcaaaccggggacggaaggacatttgacttttatttttgtatttaattgacatgaatgtaaaggggacagctcagggttgttttggagcctgttgactttgtatctctgcctgtgattttcttttctaaatgaaactccatgtagcaaccaggacgaagttgagaaggaaaacgccaaatgctttggttattagagtttaataggtaagctctgttacactaggtgttagagttccagaatgttcttttgtttgctaaaccttgaagaaacatgtgcctcagcctagatgttttgtcttctcttttctgcacttaatacctgacagtatgaccgatctctgcgcctttctgggggcgggcaagctggcggtagatttgtgatgtcacagtgcaaactgcagtgactgtaaattggcctggcgtgtataaacgttttcagggaatgcagaaggtattaatgaagagacaaaacctttattccatgtgctttgcttcattctgtacatagctctttggctcgtgaacctaattgtaaactttcaggtatttttgtacaaataagggactgatgttctgtttcttgtaattagaaataaacattaatacagtgttcttcattttcaaaaaaaa

SEQ ID NO: 438532 - DNA, 5733 bp, Homo sapiens
gcggccgcgatgtcccccgcctgtctgcgaatgcggcgtagcgggtagacatggagggctttcggcatcgtcagagtggccagtgtgcgcgtccttgcccatcaggcgggggggctgtgggggaggagaggaggcagtggagggaacaaggggttcttcagggttgccatgagaaccagggatccggggattgggcagcagagggcccccgccgggcgttggggcgtggccgcgtcacatgggtttggtcctgggattcctgttgtgctccaggaccgggcgctgctccgtcgtcctcccgctcctcaggagcgcccagtccctcggaggctgagtattgcagccgggcggcagccggctccgcggaggggcccccgggcacctgcgtggtgatggcgctgggagcccccgggcacgctcgggcggtggcgcggcatcccaccctcgcccggatggcgtccccagaggcggcgttggcccgcttttcgtgctagcgcgttcgcctggcgcgcggtggccccgaggccccgggtcggttttctgcgccgcaggcccctggccggggcggagccgtggaggaccagcccggcccggctccgagcgctgtccatgcggagcgctgtccacgcgccgggcactgcgggggccgggccccgaagccctacccgggccggcggcgcacacgcagcgaccccgtgcggccagtgctgccgcccgctctccagacttgggaggctgcattctgataattctcaggaggaagaatgtataggagagaccagggtttttaaggtgtgacctctgaaccacctacatcagagctgactgcctctcgctttggcgctgaccacaatgctgagcaggaagcagcagctgcaggcccagtgactggtagctcagtgaccagcagcccagtgaccggcagccaggtcctcacctgggtcctctcagtgaagccagggtggccgccccagcagacagtgctacagagccaactcctgacaggtgctgcagcgcagtaaatgtaatttgaagaaggcagaaggaacccatggctttagccggctgcccagattcctttttgcaccatccgtactaccaggacaaggtggagcagacacctcgcagtcaacaagacccggcaggaccaggactccccgcacagtctgaccgacttgcgaatcaccaggaggatgatgtggacctggaagccctggtgaacgatatgaatgcatccctggagagcctgtactcggcctgcagcatgcagtcagacacggtgcccctcctgcagaatggccagcatgcccgcagccagcctcgggcttcaggccctcctcggtccatccagccacaggtgtccccgaggcagagggtgcagcgctcccagcctgtgcacatcctcgctgtcaggcgccttcaggaggaagaccagcagtttagaacctcatctctgccggccatccccaatccttttcctgaactctgtggccctgggagcccccctgtgctcacgccgggttctttacctccgagccaggccgccgcaaagcaggatgttaaagtctttagtgaagatgggacaagcaaagtggtggagattctagcagacatgacagccagagacctgtgccaattgctggtttacaaaagtcactgtgtggatgacaacagctggacactagtggagcaccacccgcacctaggattagagaggtgcttggaagaccatgagctggtggtccaggtggagagtaccatggccagtgagagtaaatttctattcaggaagaattacgcaaaatacgagttctttaaaaatcccatgaatttcttcccagaacagatggttacttggtgccagcagtcaaatggcagtcaaacccagcttttgcagaattttctgaactccagtagttgtcctgaaattcaagggtttttgcatgtgaaagagctgggaaagaaatcatggaaaaagctgtatgtgtgtttgcggagatctggcctttattgctccaccaagggaacttcaaaggaacccagacacctgcagctgctggccgacctggaggacagcaacatcttctccctgatcgctggcaggaagcagtacaacgcccctacagaccacgggctctgcataaagccaaacaaagtcaggaatgaaactaaagagctgaggttgctctgtgcagaggacgagcaaaccaggacgtgctggatgacagcgttcagactcctcaagtatggaatgctcctttaccagaattaccgaatccctcagcagaggaaggccttgctgtccccgttctcgacgccagtgcgcagtgtctccgagaactccctcgtggcaatggatttttctgggcaaacaggacgcgtgatagagaatccggcggaggcccagagcgcagccctggaggagggccacgcctggaggaagcgaagcacacggatgaacatcctaggtagccaaagtcccctccacccttctaccctaagtacagtgattcacaggacacagcactggtttcacgggaggatctccagggaggaatcccacaggatcattaaacagcaagggctcgtggatgggctttttctcctccgtgacagccagagtaatccaaaggcatttgtactcacactgtgtcatcaccagaaaattaaaaatttccagatcttaccttgcgaggacgacgggcagacgttcttcagcctagatgacgggaacaccaaattctctgacctgatccagctggttgacttttaccagctgaacaaaggagtcctgccttgcaaactcaagcaccactgcatccgagtggccttatgaccgcagatgtcctctcggctgaagactggaggaagtgaacactggagtgaagaagcggtctgtgcgttggtgaagaacacacatcgattctgcacctggggacccagagcgagatgggtttgttcggtgccagccgaccaagattgactagtttgttggacttaaacgacgatttgctgctgtgaacccagcagggtcgcctccctctgcgtcggccaaattggggagggcatggaagatccagcggaaagttgaaaataaactggaatgatcatcttggcttgggccgcttaggaacaagaaccggagagaagtgattggaaatgaactcttgccctggaataatcttgacaattaaaactgatatgtttactttttttgtattgatcacttttttgcactccttctttgttttcaatattgtattcagcctattgtaggagggggatgtggcgtttcaactcatataatacagaaagagttttgaatgggcagatttcaaactgaatatgggtccccaaatgttcccagagggtcctccacaccctctgccgactaccacggtgtggattcagctcccaaatgacaaacccagcccttcccagtatacttgaaaagctttcttgttaaaataaaaggtgtcactgtggtaggcatttggcatattttgtggactcagtcaagcaaccacagtctgttaatcatttctctatgctcagatgtcagatcctcttgttattagtgtgtcttgttctgcacagtgcaggagactttattcctttggaaaattcactgttccacaaacagcaggctgaatggcctcgcctctagattgacgtgggccagcctccttgagacacacctggcacccgtcatcggccagcggtggatgctgcataatccacctgggtacttcagccttgcgtttccacagccttcagcctgttctagaacgatcactgccttacccctgctgctgcagtggtgtgagtcgtttcacggctgatgtccctcgggggattaaaggatctaaagagaaaatggcacctggttgtcttcgtgctgtgtctcatgggtttccatagtgataaagacaaggaaacgctgcaggggccacaggcacaggctgatatttaaagatctttgcttgcagccctccgtcctgctgaaaacccccataagccagtgaacacagagcagctagaggctcctcctctgctggcttagggtcagaagtacctcacagtggttgtggacatggaagagttttgtcaacacaacactttgtccccgctccgggagatgagtcagatggtggcttgagttgtcacttggtcccctccgcccctcgggtggccccctttgccacgtccccttagcttagtgatcaggtgtgagagtggccatttccttacctttgatccctgtaaagcagaaaggactcctttgacaggcgacaaactactgtggtgagcagaatgatttcctttttcaagacaacacctgcctggcttctattaatgtgtgctggccatgatattgccccaaatccgccccactgaagtgttccctaaggaacagcatttctctgctcctcagtcaacccccgtagcctagagcagtgtcacaagcttcagtaaggccagtcagctggaagtcagtctaccgtatagtaacactgtatttcagtctacagaccacactctagttgttttccatgaaaggtatacaaatgaagaattttctagcaaaacatgtttttaaccatcagtgctcaattgcattttcttcctttcgcagccagtcagtctttcaaactattgacagtaagataattctcacgttcacacctggtggcaggcttcactgtagggacggacattgcagttacaccacgattccttcctcttcactggctcgaggtaaacccttttcaaggaaaaacaactctaggatttcttttttctgtgtacgtagaccagtcccatcagtgtataatctctctctcacacgcctctctccaatagacagcttgtatttgcagtatttcatatttataaatatgcgtttatttaaaaggagaacaaaagcttgactctgattcacagttttgtatgtagctggtttgacgtagtcttttgtattttccctgccgaagtgaattgttggagaatgtaaaccgcctccacgtggcggcagacttcctaaggccccagctcgctggcctcgcgctgggcggctgggaattccacctgagaacaagtcccgcaaaccggggacggaaggacatttgacttttatttttgtatttaattgacatgaatgtaaaggggacagctcagggttgttttggagcctgttgactttgtatctctgcctgtgattttcttttctaaatgaaactccatgtagcaaccaggacgaagttgagaaggaaaacgccaaatgctttggttattagagtttaataggtaagctctgttacactaggtgttagagttccagaatgttcttttgtttgctaaaccttgaagaaacatgtgcctcagcctagatgttttgtcttctcttttctgcacttaatacctgacagtatgaccgatctctgcgcctttctgggggcgggcaagctggcggtagatttgtgatgtcacagtgcaaactgcagtgactgtaaattggcctggcgtgtataaacgttttcagggaatgcagaaggtattaatgaagagacaaaacctttattccatgtgctttgcttcattctgtacatagctctttggctcgtgaacctaattgtaaactttcaggtatttttgtacaaataagggactgatgttctgtttcttgtaattagaaataaacattaatacagtgttcttcattttcaaaaaaaa

SEQ ID NO: 438533 - DNA, 5623 bp, Homo sapiens
gcggccgcgatgtcccccgcctgtctgcgaatgcggcgtagcgggtagacatggagggctttcggcatcgtcagagtggccagtgtgcgcgtccttgcccatcaggcgggggggctgtgggggaggagaggaggcagtggagggaacaaggggttcttcagggttgccatgagaaccagggatccggggattgggcagcagagggcccccgccgggcgttggggcgtggccgcgtcacatgggtttggtcctgggattcctgttgtgctccaggaccgggcgctgctccgtcgtcctcccgctcctcaggagcgcccagtccctcggaggctgagtattgcagccgggcggcagccggctccgcggaggggcccccgggcacctgcgtggtgatggcgctgggagcccccgggcacgctcgggcggtggcgcggcatcccaccctcgcccggatggcgtccccagaggcggcgttggcccgcttttcgtgctagcgcgttcgcctggcgcgcggtggccccgaggccccgggtcggttttctgcgccgcaggcccctggccggggcggagccgtggaggaccagcccggcccggctccgagcgctgtccatgcggagcgctgtccacgcgccgggcactgcgggggccgggccccgaagccctacccgggccggcggcgcacacgcagcgaccccgtgcggccagtgctgccgcccgctctccagctttggcgctgaccacaatgctgagcaggaagcagcagctgcaggcccagtgactggtagctcagtgaccagcagcccagtgaccggcagccaggtcctcacctgggtcctctcagtgaagccagggtggccgccccagcagacagtgctacagagccaactcctgacaggtgctgcagcgcagtaaatgtaatttgaagaaggcagaaggaacccatggctttagccggctgcccagattcctttttgcaccatccgtactaccaggacaaggtggagcagacacctcgcagtcaacaagacccggcaggaccaggactccccgcacagtctgaccgacttgcgaatcaccaggaggatgatgtggacctggaagccctggtgaacgatatgaatgcatccctggagagcctgtactcggcctgcagcatgcagtcagacacggtgcccctcctgcagaatggccagcatgcccgcagccagcctcgggcttcaggccctcctcggtccatccagccacaggtgtccccgaggcagagggtgcagcgctcccagcctgtgcacatcctcgctgtcaggcgccttcaggaggaagaccagcagtttagaacctcatctctgccggccatccccaatccttttcctgaactctgtggccctgggagcccccctgtgctcacgccgggttctttacctccgagccaggccgccgcaaagcaggatgttaaagtctttagtgaagatgggacaagcaaagtggtggagattctagcagacatgacagccagagacctgtgccaattgctggtttacaaaagtcactgtgtggatgacaacagctggacactagtggagcaccacccgcacctaggattagagaggtgcttggaagaccatgagctggtggtccaggtggagagtaccatggccagtgagagtaaatttctattcaggaagaattacgcaaaatacgagttctttaaaaatcccatgaatttcttcccagaacagatggttacttggtgccagcagtcaaatggcagtcaaacccagcttttgcagaattttctgaactccagtagttgtcctgaaattcaagggtttttgcatgtgaaagagctgggaaagaaatcatggaaaaagctgtatgtgtgtttgcggagatctggcctttattgctccaccaagggaacttcaaaggaacccagacacctgcagctgctggccgacctggaggacagcaacatcttctccctgatcgctggcaggaagcagtacaacgcccctacagaccacgggctctgcataaagccaaacaaagtcaggaatgaaactaaagagctgaggttgctctgtgcagaggacgagcaaaccaggacgtgctggatgacagcgttcagactcctcaagtatggaatgctcctttaccagaattaccgaatccctcagcagaggaaggccttgctgtccccgttctcgacgccagtgcgcagtgtctccgagaactccctcgtggcaatggatttttctgggcaaacaggacgcgtgatagagaatccggcggaggcccagagcgcagccctggaggagggccacgcctggaggaagcgaagcacacggatgaacatcctaggtagccaaagtcccctccacccttctaccctaagtacagtgattcacaggacacagcactggtttcacgggaggatctccagggaggaatcccacaggatcattaaacagcaagggctcgtggatgggctttttctcctccgtgacagccagagtaatccaaaggcatttgtactcacactgtgtcatcaccagaaaattaaaaatttccagatcttaccttgcgaggacgacgggcagacgttcttcagcctagatgacgggaacaccaaattctctgacctgatccagctggttgacttttaccagctgaacaaaggagtcctgccttgcaaactcaagcaccactgcatccgagtggccttatgaccgcagatgtcctctcggctgaagactggaggaagtgaacactggagtgaagaagcggtctgtgcgttggtgaagaacacacatcgattctgcacctggggacccagagcgagatgggtttgttcggtgccagccgaccaagattgactagtttgttggacttaaacgacgatttgctgctgtgaacccagcagggtcgcctccctctgcgtcggccaaattggggagggcatggaagatccagcggaaagttgaaaataaactggaatgatcatcttggcttgggccgcttaggaacaagaaccggagagaagtgattggaaatgaactcttgccctggaataatcttgacaattaaaactgatatgtttactttttttgtattgatcacttttttgcactccttctttgttttcaatattgtattcagcctattgtaggagggggatgtggcgtttcaactcatataatacagaaagagttttgaatgggcagatttcaaactgaatatgggtccccaaatgttcccagagggtcctccacaccctctgccgactaccacggtgtggattcagctcccaaatgacaaacccagcccttcccagtatacttgaaaagctttcttgttaaaataaaaggtgtcactgtggtaggcatttggcatattttgtggactcagtcaagcaaccacagtctgttaatcatttctctatgctcagatgtcagatcctcttgttattagtgtgtcttgttctgcacagtgcaggagactttattcctttggaaaattcactgttccacaaacagcaggctgaatggcctcgcctctagattgacgtgggccagcctccttgagacacacctggcacccgtcatcggccagcggtggatgctgcataatccacctgggtacttcagccttgcgtttccacagccttcagcctgttctagaacgatcactgccttacccctgctgctgcagtggtgtgagtcgtttcacggctgatgtccctcgggggattaaaggatctaaagagaaaatggcacctggttgtcttcgtgctgtgtctcatgggtttccatagtgataaagacaaggaaacgctgcaggggccacaggcacaggctgatatttaaagatctttgcttgcagccctccgtcctgctgaaaacccccataagccagtgaacacagagcagctagaggctcctcctctgctggcttagggtcagaagtacctcacagtggttgtggacatggaagagttttgtcaacacaacactttgtccccgctccgggagatgagtcagatggtggcttgagttgtcacttggtcccctccgcccctcgggtggccccctttgccacgtccccttagcttagtgatcaggtgtgagagtggccatttccttacctttgatccctgtaaagcagaaaggactcctttgacaggcgacaaactactgtggtgagcagaatgatttcctttttcaagacaacacctgcctggcttctattaatgtgtgctggccatgatattgccccaaatccgccccactgaagtgttccctaaggaacagcatttctctgctcctcagtcaacccccgtagcctagagcagtgtcacaagcttcagtaaggccagtcagctggaagtcagtctaccgtatagtaacactgtatttcagtctacagaccacactctagttgttttccatgaaaggtatacaaatgaagaattttctagcaaaacatgtttttaaccatcagtgctcaattgcattttcttcctttcgcagccagtcagtctttcaaactattgacagtaagataattctcacgttcacacctggtggcaggcttcactgtagggacggacattgcagttacaccacgattccttcctcttcactggctcgaggtaaacccttttcaaggaaaaacaactctaggatttcttttttctgtgtacgtagaccagtcccatcagtgtataatctctctctcacacgcctctctccaatagacagcttgtatttgcagtatttcatatttataaatatgcgtttatttaaaaggagaacaaaagcttgactctgattcacagttttgtatgtagctggtttgacgtagtcttttgtattttccctgccgaagtgaattgttggagaatgtaaaccgcctccacgtggcggcagacttcctaaggccccagctcgctggcctcgcgctgggcggctgggaattccacctgagaacaagtcccgcaaaccggggacggaaggacatttgacttttatttttgtatttaattgacatgaatgtaaaggggacagctcagggttgttttggagcctgttgactttgtatctctgcctgtgattttcttttctaaatgaaactccatgtagcaaccaggacgaagttgagaaggaaaacgccaaatgctttggttattagagtttaataggtaagctctgttacactaggtgttagagttccagaatgttcttttgtttgctaaaccttgaagaaacatgtgcctcagcctagatgttttgtcttctcttttctgcacttaatacctgacagtatgaccgatctctgcgcctttctgggggcgggcaagctggcggtagatttgtgatgtcacagtgcaaactgcagtgactgtaaattggcctggcgtgtataaacgttttcagggaatgcagaaggtattaatgaagagacaaaacctttattccatgtgctttgcttcattctgtacatagctctttggctcgtgaacctaattgtaaactttcaggtatttttgtacaaataagggactgatgttctgtttcttgtaattagaaataaacattaatacagtgttcttcattttcaaaaaaaa

SEQ ID NO: 438534 - DNA, 5526 bp, Homo sapiens
gcggccgcgatgtcccccgcctgtctgcgaatgcggcgtagcgggtagacatggagggctttcggcatcgtcagagtggccagtgtgcgcgtccttgcccatcaggcgggggggctgtgggggaggagaggaggcagtggagggaacaaggggttcttcagggttgccatgagaaccagggatccggggattgggcagcagagggcccccgccgggcgttggggcgtggccgcgtcacatgggtttggtcctgggattcctgttgtgctccaggaccgggcgctgctccgtcgtcctcccgctcctcaggagcgcccagtccctcggaggctgagtattgcagccgggcggcagccggctccgcggaggggcccccgggcacctgcgtggtgatggcgctgggagcccccgggcacgctcgggcggtggcgcggcatcccaccctcgcccggatggcgtccccagaggcggcgttggcccgcttttcgtgctagcgcgttcgcctggcgcgcggtggccccgaggccccgggtcggttttctgcgccgcaggcccctggccggggcggagccgtggaggaccagcccggcccggctccgagcgctgtccatgcggagcgctgtccacgcgccgggcactgcgggggccgggccccgaagccctacccgggccggcggcgcacacgcagcgaccccgtgcggccagtgctgccgcccgctctccagctttggcgctgaccacaatgctgagcaggaagcagcagctgcaggcccagtgactggtagctcagtgaccagcagcccagtgaccggcagccaggtcctcacctgggtcctctcagtgaagccagggtggccgccccagcagacagtgctacagagccaactcctgacaggacaaggtggagcagacacctcgcagtcaacaagacccggcaggaccaggactccccgcacagtctgaccgacttgcgaatcaccaggaggatgatgtggacctggaagccctggtgaacgatatgaatgcatccctggagagcctgtactcggcctgcagcatgcagtcagacacggtgcccctcctgcagaatggccagcatgcccgcagccagcctcgggcttcaggccctcctcggtccatccagccacaggtgtccccgaggcagagggtgcagcgctcccagcctgtgcacatcctcgctgtcaggcgccttcaggaggaagaccagcagtttagaacctcatctctgccggccatccccaatccttttcctgaactctgtggccctgggagcccccctgtgctcacgccgggttctttacctccgagccaggccgccgcaaagcaggatgttaaagtctttagtgaagatgggacaagcaaagtggtggagattctagcagacatgacagccagagacctgtgccaattgctggtttacaaaagtcactgtgtggatgacaacagctggacactagtggagcaccacccgcacctaggattagagaggtgcttggaagaccatgagctggtggtccaggtggagagtaccatggccagtgagagtaaatttctattcaggaagaattacgcaaaatacgagttctttaaaaatcccatgaatttcttcccagaacagatggttacttggtgccagcagtcaaatggcagtcaaacccagcttttgcagaattttctgaactccagtagttgtcctgaaattcaagggtttttgcatgtgaaagagctgggaaagaaatcatggaaaaagctgtatgtgtgtttgcggagatctggcctttattgctccaccaagggaacttcaaaggaacccagacacctgcagctgctggccgacctggaggacagcaacatcttctccctgatcgctggcaggaagcagtacaacgcccctacagaccacgggctctgcataaagccaaacaaagtcaggaatgaaactaaagagctgaggttgctctgtgcagaggacgagcaaaccaggacgtgctggatgacagcgttcagactcctcaagtatggaatgctcctttaccagaattaccgaatccctcagcagaggaaggccttgctgtccccgttctcgacgccagtgcgcagtgtctccgagaactccctcgtggcaatggatttttctgggcaaacaggacgcgtgatagagaatccggcggaggcccagagcgcagccctggaggagggccacgcctggaggaagcgaagcacacggatgaacatcctaggtagccaaagtcccctccacccttctaccctaagtacagtgattcacaggacacagcactggtttcacgggaggatctccagggaggaatcccacaggatcattaaacagcaagggctcgtggatgggctttttctcctccgtgacagccagagtaatccaaaggcatttgtactcacactgtgtcatcaccagaaaattaaaaatttccagatcttaccttgcgaggacgacgggcagacgttcttcagcctagatgacgggaacaccaaattctctgacctgatccagctggttgacttttaccagctgaacaaaggagtcctgccttgcaaactcaagcaccactgcatccgagtggccttatgaccgcagatgtcctctcggctgaagactggaggaagtgaacactggagtgaagaagcggtctgtgcgttggtgaagaacacacatcgattctgcacctggggacccagagcgagatgggtttgttcggtgccagccgaccaagattgactagtttgttggacttaaacgacgatttgctgctgtgaacccagcagggtcgcctccctctgcgtcggccaaattggggagggcatggaagatccagcggaaagttgaaaataaactggaatgatcatcttggcttgggccgcttaggaacaagaaccggagagaagtgattggaaatgaactcttgccctggaataatcttgacaattaaaactgatatgtttactttttttgtattgatcacttttttgcactccttctttgttttcaatattgtattcagcctattgtaggagggggatgtggcgtttcaactcatataatacagaaagagttttgaatgggcagatttcaaactgaatatgggtccccaaatgttcccagagggtcctccacaccctctgccgactaccacggtgtggattcagctcccaaatgacaaacccagcccttcccagtatacttgaaaagctttcttgttaaaataaaaggtgtcactgtggtaggcatttggcatattttgtggactcagtcaagcaaccacagtctgttaatcatttctctatgctcagatgtcagatcctcttgttattagtgtgtcttgttctgcacagtgcaggagactttattcctttggaaaattcactgttccacaaacagcaggctgaatggcctcgcctctagattgacgtgggccagcctccttgagacacacctggcacccgtcatcggccagcggtggatgctgcataatccacctgggtacttcagccttgcgtttccacagccttcagcctgttctagaacgatcactgccttacccctgctgctgcagtggtgtgagtcgtttcacggctgatgtccctcgggggattaaaggatctaaagagaaaatggcacctggttgtcttcgtgctgtgtctcatgggtttccatagtgataaagacaaggaaacgctgcaggggccacaggcacaggctgatatttaaagatctttgcttgcagccctccgtcctgctgaaaacccccataagccagtgaacacagagcagctagaggctcctcctctgctggcttagggtcagaagtacctcacagtggttgtggacatggaagagttttgtcaacacaacactttgtccccgctccgggagatgagtcagatggtggcttgagttgtcacttggtcccctccgcccctcgggtggccccctttgccacgtccccttagcttagtgatcaggtgtgagagtggccatttccttacctttgatccctgtaaagcagaaaggactcctttgacaggcgacaaactactgtggtgagcagaatgatttcctttttcaagacaacacctgcctggcttctattaatgtgtgctggccatgatattgccccaaatccgccccactgaagtgttccctaaggaacagcatttctctgctcctcagtcaacccccgtagcctagagcagtgtcacaagcttcagtaaggccagtcagctggaagtcagtctaccgtatagtaacactgtatttcagtctacagaccacactctagttgttttccatgaaaggtatacaaatgaagaattttctagcaaaacatgtttttaaccatcagtgctcaattgcattttcttcctttcgcagccagtcagtctttcaaactattgacagtaagataattctcacgttcacacctggtggcaggcttcactgtagggacggacattgcagttacaccacgattccttcctcttcactggctcgaggtaaacccttttcaaggaaaaacaactctaggatttcttttttctgtgtacgtagaccagtcccatcagtgtataatctctctctcacacgcctctctccaatagacagcttgtatttgcagtatttcatatttataaatatgcgtttatttaaaaggagaacaaaagcttgactctgattcacagttttgtatgtagctggtttgacgtagtcttttgtattttccctgccgaagtgaattgttggagaatgtaaaccgcctccacgtggcggcagacttcctaaggccccagctcgctggcctcgcgctgggcggctgggaattccacctgagaacaagtcccgcaaaccggggacggaaggacatttgacttttatttttgtatttaattgacatgaatgtaaaggggacagctcagggttgttttggagcctgttgactttgtatctctgcctgtgattttcttttctaaatgaaactccatgtagcaaccaggacgaagttgagaaggaaaacgccaaatgctttggttattagagtttaataggtaagctctgttacactaggtgttagagttccagaatgttcttttgtttgctaaaccttgaagaaacatgtgcctcagcctagatgttttgtcttctcttttctgcacttaatacctgacagtatgaccgatctctgcgcctttctgggggcgggcaagctggcggtagatttgtgatgtcacagtgcaaactgcagtgactgtaaattggcctggcgtgtataaacgttttcagggaatgcagaaggtattaatgaagagacaaaacctttattccatgtgctttgcttcattctgtacatagctctttggctcgtgaacctaattgtaaactttcaggtatttttgtacaaataagggactgatgttctgtttcttgtaattagaaataaacattaatacagtgttcttcattttcaaaaaaaa

SEQ ID NO: 438535 - DNA, 3242 bp, Homo sapiens
  misc_feature (3216)..(3216): n is a, c, g, or t
  misc_feature (3227)..(3228): n is a, c, g, or t
gcggccgcgatgtcccccgcctgtctgcgaatgcggcgtagcgggtagacatggagggctttcggcatcgtcagagtggccagtgtgcgcgtccttgcccatcaggcgggggggctgtgggggaggagaggaggcagtggagggaacaaggggttcttcagggttgccatgagaaccagggatccggggattgggcagcagagggcccccgccgggcgttggggcgtggccgcgtcacatgggtttggtcctgggattcctgttgtgctccaggaccgggcgctgctccgtcgtcctcccgctcctcaggagcgcccagtccctcggaggctgagtattgcagccgggcggcagccggctccgcggaggggcccccgggcacctgcgtggtgatggcgctgggagcccccgggcacgctcgggcggtggcgcggcatcccaccctcgcccggatggcgtccccagaggcggcgttggcccgcttttcgtgctagcgcgttcgcctggcgcgcggtggccccgaggccccgggtcggttttctgcgccgcaggcccctggccggggcggagccgtggaggaccagcccggcccggctccgagcgctgtccatgcggagcgctgtccacgcgccgggcactgcgggggccgggccccgaagccctacccgggccggcggcgcacacgcagcgaccccgtgcggccagtgctgccgcccgctctccagacttgggaggctgcattctgataattctcaggaggaagaatgtataggagagaccagggtttttaaggtgtgacctctgaaccacctacatcagagctgactgcctctcgctttggcgctgaccacaatgctgagcaggaagcagcagctgcaggcccagtgactggtagctcagtgaccagcagcccagtgaccggcagccaggtcctcacctgggtcctctcagtgaagccagggtggccgccccagcagacagtgctacagagccaactcctgacaggtgctgcagcgcagtaaatgtaatttgaagaaggcagaaggaacccatggctttagccggctgcccagattcctttttgcaccatccgtactaccaggacaaggtggagcagacacctcgcagtcaacaagacccggcaggaccaggactccccgcacagtctgaccgacttgcgaatcaccaggaggatgatgtggacctggaagccctggtgaacgatatgaatgcatccctggagagcctgtactcggcctgcagcatgcagtcagacacggtgcccctcctgcagaatggccagcatgcccgcagccagcctcgggcttcaggccctcctcggtccatccagccacaggtgtccccgaggcagagggtgcagcgctcccagcctgtgcacatcctcgctgtcaggcgccttcaggaggaagaccagcagtttagaacctcatctctgccggccatccccaatccttttcctgaactctgtggccctgggagcccccctgtgctcacgccgggttctttacctccgagccaggccgccgcaaagcaggatgttaaagtctttagtgaagatgggacaagcaaagtggtggagattctagcagacatgacagccagagacctgtgccaattgctggtttacaaaagtcactgtgtggatgacaacagctggacactagtggagcaccacccgcacctaggattagagaggtgcttggaagaccatgagctggtggtccaggtggagagtaccatggccagtgagagtaaatttctattcaggaagaattacgcaaaatacgagttctttaaaaatcccatgaatttcttcccagaacagatggttacttggtgccagcagtcaaatggcagtcaaacccagcttttgcagaattttctgaactccagtagttgtcctgaaattcaagggtttttgcatgtgaaagagctgggaaagaaatcatggaaaaagctgtatgtgtgtttgcggagatctggcctttattgctccaccaagggaacttcaaaggaacccagacacctgcagctgctggccgacctggaggacagcaacatcttctccctgatcgctggcaggaagcagtacaacgcccctacagaccacgggctctgcataaagccaaacaaagtcaggaatgaaactaaagagctgaggttgctctgtgcagaggacgagcaaaccaggacgtgctggatgacagcgttcagactcctcaagtatggaatgctcctttaccagaattaccgaatccctcagcagaggaaggccttgctgtccccgttctcgacgccagtgcgcagtgtctccgagaactccctcgtggcaatggatttttctgggcaaacaggacgcgtgatagagaatccggcggaggcccagagcgcagccctggaggagggccacgcctggaggaagcgaagcacacggatgaacatcctaggtagccaaagtcccctccacccttctaccctaagtacagtgattcacaggacacagcactggtttcacgggaggatctccagggaggaatcccacaggatcattaaacagcaagggctcgtggatgggctttttctcctccgtgacagccagagtaatccaaaggcatttgtactcacactgtgtcatcaccagaaaattaaaaatttccagatcttaccttgcgaggacgacgggcagacgttcttcagcctagatgacgggaacaccaaattctctgacctgatccagctggttgacttttaccagctgaacaaaggagtcctgccttgcaaactcaagcaccactgcatccgagtggccttatgaccgcagatgtcctctcggctgaagactggaggaagtgaacactggagtgaagaagcggtctgtgcgttggtgaagaacacacatcgattctgcacctggggacccagagcgagatgggtttgttcggtgccagccgaccaagattgactagtttgttggacttaaacgacgatttgctgctgtgaacccagcagggtcgcctccctctgcgtcggccaaattggggagggcatggaagatccagcggaaagttgaaaataaactggaatgatcatcttggcttgggccgcttaggaacaagaaccggagagaagtgattggaaatgaactcttgccctggaataatcttgacaattaaaactgataaaaaaaaaaaaaanaaaaaaaaaanngcagaaaaaaaaaa

SEQ ID NO: 438536 - DNA, 1877 bp, Homo sapiens
gcggccgcgatgtcccccgcctgtctgcgaatgcggcgtagcgggtagacatggagggctttcggcatcgtcagagtggccagtgtgcgcgtccttgcccatcaggcgggggggctgtgggggaggagaggaggcagtggagggaacaaggggttcttcagggttgccatgagaaccagggatccggggattgggcagcagagggcccccgccgggcgttggggcgtggccgcgtcacatgggtttggtcctgggattcctgttgtgctccaggaccgggcgctgctccgtcgtcctcccgctcctcaggagcgcccagtccctcggaggctgagtattgcagccgggcggcagccggctccgcggaggggcccccgggcacctgcgtggtgatggcgctgggagcccccgggcacgctcgggcggtggcgcggcatcccaccctcgcccggatggcgtccccagaggcggcgttggcccgcttttcgtgctagcgcgttcgcctggcgcgcggtggccccgaggccccgggtcggttttctgcgccgcaggcccctggccggggcggagccgtggaggaccagcccggcccggctccgagcgctgtccatgcggagcgctgtccacgcgccgggcactgcgggggccgggccccgaagccctacccgggccggcggcgcacacgcagcgaccccgtgcggccagtgctgccgcccgctctccagctttggcgctgaccacaatgctgagcaggaagcagcagctgcaggcccagtgactggtagctcagtgaccagcagcccagtgaccggcagccaggtcctcacctgggtcctctcagtgaagccagggtggccgccccagcagacagtgctacagagccaactcctgacaggacaaggtggagcagacacctcgcagtcaacaagacccggcaggaccaggactccccgcacagtctgaccgacttgcgaatcaccaggaggatgatgtggacctggaagccctggtgaacgatatgaatgcatccctggagagcctgtactcggcctgcagcatgcagtcagacacggtgcccctcctgcagaatggccagcatgcccgcagccagcctcgggcttcaggccctcctcggtccatccagccacaggtgtccccgaggcagagggtgcagcgctcccagcctgtgcacatcctcgctgtcaggcgccttcaggaggaagaccagcagtttagaacctcatctctgccggccatccccaatccttttcctgaactctgtggccctgggagcccccctgtgctcacgccgggttctttacctccgagccaggccgccgcaaagcaggatgttaaagtctttagtgaagatgggacaagcaaagtggtggagattctagcagacatgacagccagagacctgtgccaattgctggtttacaaaagtcactgtgtggatgacaacagctggacactagtggagcaccacccgcacctaggattagagaggtgcttggaagaccatgagctggtggtccaggtggagagtaccatggccagtgagagtaaatttctattcaggaagaattacgcaaaatacgagttctttaaaaatcccatgaatttcttcccagaacagatggttacttggtgccagcagtcaaatggcagtcaaacccagcttttgcaggtactgggccacaatagatctctgctgaaatagactttctgaatagaaatcctcttggaactgaatggcagcattgtaaaaaacctaaagagatcgcatctttcaccatttataaccttggctcttaagccggaggggtggttggggggagggtttagagtaaccagaaattaaaagtttccttgga

SEQ ID NO: 438537 - DNA, 5425 bp, Homo sapiens
  misc_feature (957)..(957): n is a, c, g, or t
  misc_feature (1002)..(1002): n is a, c, g, or t
ctccctgaccccttgcgcttcccgagtgaggcaatgcctcgccctgcttcggctcgcggacggtgcgcgcacccactgacctgcgcccactgtctggcactccctagtgagatgaacccggtacctcagatggaaatgcagaaatcacccgtcttctgcgtcgctcacgctgggagctgtagatcgcagctgttcctattcggccatcttggctcctccattctgcttttaagatacaagtgatgccttcaaatttgagctcagtttcttatggtcgtttaggagcatgagggtttctgcaataatctaccagtgaaatgatgatcaagatcttggaaagcactctactggtcaagcagaatagttcctgtcatctccattaagaatcagcttattggccgggcgcagtggctcatgcctgtaatcccagcactttgggaggctgaggcgggtggatcacgaggtcaggagatcgagaccatcctgtctaacaaggaatcctttctggcactcaagagttttcaattcaatcctgatgaatgaatcattatttgataccagcctaagtgaagactctgcctggtgacttttgcaaggtggtttctggctgcaacatgggaagatttgggatcagtgagatggaagagatttttctggctactagcgttcctaagaaagagctttagtgtttatccagctattggtatgcagacaactatacccttatgagaaacactagcagagaagaagagttcttgactgggtctgggccatgaaactgaccggataaaagtgggagaagaagagatgttgaaggaggagtttgctgttttctcagtctcctgagaaattccagatatcttctttctacacacatcctggagaggggaaagaaagcctctctctgtcacccaggctggaatgcactggtgccatctccactcactgcagcttcancctcctgggttcaagtgatcctcctgcctctcagccttccgagtngctgggactacagtttgctgcatctggaggagctcactggagaatctccaacatcggagcgggccttcaactaccatcccaccacctgctgaggagaaaaattcttcaagactcagagcacacagccagcaccagaggccccatgaccctggacagaccaggggagggggccaccatgctgaagacattcactgttttgctcttttgcattctgatggaccctcaaccggagttgtggatagagtccaactacccccaggccccttgggagaacatcacgctttggtgccgaagcccctctcggatatcaagcaagttcctgctgctgaaggataagacacagatgacctggatccgcccttcccacaagaccttccaagtttcattccttataggtgcccttactgagtccaatgcaggtctttaccggtgctgctactggaaggagacaggctggtcaaagcccagtaaagttctagagttggaggcaccaggccaactgcccaagcccatcttctggattcaggctgagacccccgctcttcctgggtgtaatgttaacatcctctgccatggctggctgcaggatttggtattcatgctgtttaaagagggatatgcagagcctgtggattaccaagtcccaactgggacaatggccatattctccattgacaacctgacacctgaggatgaaggggtttacatctgccgcactcatatccagatgctccccaccctgtggtcagagcccagcaaccccctgaagctggttgtagcaggactctaccccaaaccaactttgacagcccatcctgggcccatcatggcacctggagaaagcctgaatctcaggtgccaagggccaatctatggaatgacctttgctctaatgagggttgaagacttggagaagtccttttaccacaagaagacaataaaaaatgaggcaaatttcttcttccagtctttgaagatccaagatactggacattacctctgtttttactatgacgcatcatatagaggttcactccttagtgatgtcctgaaaatctgggtaactgacactttccccaagacctggctacttgctcggcccagtgctgtggtccaaatgggtcagaatgtgagcctacggtgtcgaggaccagtggatggagtgggtcttgcactctataagaaaggagaagacaaaccacttcaatttttggatgccaccagcatcgatgacaacacatcattcttcctcaacaatgtaacctacagtgatactggcatctatagctgccactatcttctcacctggaagacctccattaggatgccatcacacaacactgtggagcttatggttgtagataagccccccaaaccctccctgtcagcttggccaagcactgtgttcaagctaggaaaggccatcacccttcagtgccgagtatctcatccagtactggaattttctctggaatgggaagaaagagaaacattccaaaaattctcagtaaacggagacttcatcatcagtaatgttgacgggaaaggcacagggacctacagttgcagctatcgcgtagagacacatcctaacatctggtcacatcgcagtgagcccctgaagctgatggggccagcaggctatctcacctggaattacgttctgaatgaagctatcaggttgtctctaatcatgcagcttgttgccttgctgttggtagtgctgtggataaggtggaagtgtcggagactcagaatcagagaagcctggttgctgggaacagctcaaggggtcaccatgctcttcatagtcacggcccttctctgctgtggactgtgcaatggggtattgatagaagagactgaaatagtcatgccaacccctaagcctgagctgtgggcagagaccaactttcctctggccccgtggaagaacttaaccctctggtgcagaagcccttctggctcaactaaggagtttgtgttgctgaaggatgggaccgggtggatcgccactcgcccggcctcagagcaggtccgggctgccttcccccttggcgccctgacccagagccacaccgggagctaccactgccattcatgggaggagatggctgtatcggagcccagtgaggcacttgagctggtggggacagacatcctccccaaacctgtcatttctgcttcccccacaatccggggccaggaactacaactccggtgcaaaggatggctggcaggcatggggtttgctctgtataaggagggagagcaagaacctgtccagcaacttggtgctgttggaagagaagccttctttacaatccagagaatggaggataaagacgaaggcaattacagctgccgcactcacactgaaaaacgccccttcaagtggtctgagcccagtgagccgctggagcttgtcataaaagaaatgtaccctaagcccttcttcaagacatgggccagccctgtggtcacccctggtgcccgagtgactttcaattgctccaccccccaccagcatatgagctttattctttacaaagatggaagtgaaatagcatccagtgacaggtcctgggcaagtccgggggccagtgcagctcactttctaatcatttcggtgggcattggtgatggagggaattacagctgccgatattatgacttttctatctggtctgagcccagcgaccctgtggagctcgtggtgacagaattctaccccaaacccactctcctggcacagccaggtcctgtggtgtttcctgggaagagtgtgatcctgcgctgccaagggactttccagggcatgaggttcgccctcttgcaggagggagcccatgttcccttacagtttcggagtgtctcagggaactcagctgacttccttctccacactgttggagcagaggactctgggaactatagctgtatctactatgagacaaccatgtcaaacagggggtcatatctcagtatgccccttatgatctgggtgactgacacattccctaagccatggttgtttgctgagcccagttctgtggttcccatggggcagaatgttactctctggtgccgagggccggtccatggagtaggatacattctgcacaaagaaggagaagccacttcaatgcagctctggggatccaccagtaatgacggggcattccccatcaccaatatatctggtactagcatggggcgttacagctgctgctaccaccctgactggaccagttctatcaagatacaacctagcaacaccctggaactcctagtcacaggcttactccccaaacccagcctattagcccagcctggtcccatggtggcccctggcgaaaatatgactcttcagtgtcaaggggaactgccagactcaacatttgtcctgttgaaggagggggctcaggagcctttagagcaacagaggccaagtgggtacagggctgacttctggatgccagcagtgagaggtgaagactctgggatctatagctgtgtttattatttggactctactccctttgcagcttcaaatcacagtgactccctggagatctgggtgactgataagccccctaaaccctctctgtcagcctggcccagcaccatgttcaagttagggaaggacatcacccttcagtgccgaggacccctgccaggtgttgaatttgttctagaacatgatggagaagaagcacctcagcagttttcagaggatggagactttgtcatcaacaacgtagaaggaaaaggcattggaaactacagctgcagctaccgcctccaggcctaccctgatatctggtcagagcctagtgatcccctggagctggtgggggcagcagggcctgttgctcaggagtgcactgtagggaacattgtccgaagtagcctaatcgtggtggttgttgtagccttgggggtagtgctagccatagagtggaagaagtggcctcgactgcgaaccagaggctcagagacagacggaagagaccagaccattgcccttgaagagtgtaaccaagaaggagaaccaggcacccctgccaattctccttcatcaacctctcagagaatctctgtggaactgcccgttccaatataataatctcctcctttacaagagctttcctctcctctctcttgctctcagagacctataaatccaaccagttaccctgcaagtcagccccatctgctgttccttggtctctaatcacctgagctgggtaaaggggattctgggagttgagagctctgccagggtgagatgtttcctgaagagaggttccccacccctgtaactcctcactgtactgatttactggcgcatgaaattctattaaaaatgcattcttctgaataaaaagagtattcactatttaacttcaaaaaaaaaaac

SEQ ID NO: 438538 - DNA, 243 bp, Homo sapiens
cctctgattctggtcttctctggccacaggctatctcacctggaattacgttctgaatgaagctatcaggttgtctctaatcatgcagcttgttgccttgctgttggtagtgctgtggataaggtggaagtgtcggagactcagaatcagaggggtcagcactcaagccagcgggtggagaaatgcatagttctcagaggcaagaggagtaatcagaactgcattcactgacatcccccccgg

SEQ ID NO: 438539 - DNA, 4414 bp, Homo sapiens
gcctttctcctttccttcccggatcccagacctgcctcgatcccaccacctgctgaggagaaaaattcttcaagactcagagcacacagccagcaccagaggccccatgaccctggacagaccaggggagggggccaccatgctgaagacattcactgttttgctcttttgcattcggatgagtctgggtatgacatcgatagtgatggaccctcaaccggagttgtggatagagtccaactacccccaggccccttgggagaacatcacgctttggtgccgaagcccctctcggatatcaagcaagttcctgctgctgaaggataagacacagatgacctggatccgcccttcccacaagaccttccaagtttcattccttataggtgcccttactgagtccaatgcaggtctttaccggtgctgctactggaaggagacaggctggtcaaagcccagtaaagttctagagttggaggcaccaggccaactgcccaagcccatcttctggattcaggctgagacccccgctcttcctgggtgtaatgttaacatcctctgccatggctggctgcaggatttggtattcatgctgtttaaagagggatatgcagagcctgtggattaccaagtcccaactgggacaatggccatattctccattgacaacctgacacctgaggatgaaggggtttacatctgccgcactcatatccagatgctccccaccctgtggtcagagcccagcaaccccctgaagctggttgtagcaggactctaccccaaaccaactttgacagcccatcctgggcccatcatggcacctggagaaagcctgaatctcaggtgccaagggccaatctatggaatgacctttgctctaatgagggttgaagacttggagaagtccttttaccacaagaagacaataaaaaatgaggcaaatttcttcttccagtctttgaagatccaagatactggacattacctctgtttttactatgacgcatcatatagaggttcactccttagtgatgtcctgaaaatctgggtaactgacactttccccaagacctggctacttgctcggcccagtgctgtggtccaaatgggtcagaatgtgagcctacggtgtcgaggaccagtggatggagtgggtcttgcactctataagaaaggagaagacaaaccacttcaatttttggatgccaccagcatcgatgacaacacatcattcttcctcaacaatgtaacctacagtgatactggcatctatagctgccactatcttctcacctggaagacctccattaggatgccatcacacaacactgtggagcttatggttgtagataagccccccaaaccctccctgtcagcttggccaagcactgtgttcaagctaggaaaggccatcacccttcagtgccgagtatctcatccagtactggaattttctctggaatgggaagaaagagaaacattccaaaaattctcagtaaacggagacttcatcatcagtaatgttgacgggaaaggcacagggacctacagttgcagctatcgcgtagagacacatcctaacatctggtcacatcgcagtgagcccctgaagctgatggggccagcaggctatctcacctggaattacgttctgaatgaagctatcaggttgtctctaatcatgcagcttgttgccttgctgttggtagtgctgtggataaggtggaagtgtcggagactcagaatcagagaagcctggttgctgggaacagctcaaggggtcaccatgctcttcatagtcacggcccttctctgctgtggactgtgcaatggggtattgatagaagagactgaaatagtcatgccaacccctaagcctgagctgtgggcagagaccaactttcctctggccccgtggaagaacttaaccctctggtgcagaagcccttctggctcaactaaggagtttgtgttgctgaaggatgggaccgggtggatcgccactcgcccggcctcagagcaggtccgggctgccttcccccttggcgccctgacccagagccacaccgggagctaccactgccattcatgggaggagatggctgtatcggagcccagtgaggcacttgagctggtggggacagacatcctccccaaacctgtcatttctgcttcccccacaatccggggccaggaactacaactccggtgcaaaggatggctggcaggcatggggtttgctctgtataaggagggagagcaagaacctgtccagcaacttggtgctgttggaagagaagccttctttacaatccagagaatggaggataaagacgaaggcaattacagctgccgcactcacactgaaaaacgccccttcaagtggtctgagcccagtgagccgctggagcttgtcataaaagaaatgtaccctaagcccttcttcaagacatgggccagccctgtggtcacccctggtgcccgagtgactttcaattgctccaccccccaccagcatatgagctttattctttacaaagatggaagtgaaatagcatccagtgacaggtcctgggcaagtccgggggccagtgcagctcactttctaatcatttcggtgggcattggtgatggagggaattacagctgccgatattatgacttttctatctggtctgagcccagcgaccctgtggagctcgtggtgacagaattctaccccaaacccactctcctggcacagccaggtcctgtggtgtttcctgggaagagtgtgatcctgcgctgccaagggactttccagggcatgaggttcgccctcttgcaggagggagcccatgttcccttacagtttcggagtgtctcagggaactcagctgacttccttctccacactgttggagcagaggactctgggaactatagctgtatctactatgagacaaccatgtcaaacagggggtcatatctcagtatgccccttatgatctgggtgactgacacattccctaagccatggttgtttgctgagcccagttctgtggttcccatggggcagaatgttactctctggtgccgagggccggtccatggagtaggatacattctgcacaaagaaggagaagccacttcaatgcagctctggggatccaccagtaatgacggggcattccccatcaccaatatatctggtactagcatggggcgttacagctgctgctaccaccctgactggaccagttctatcaagatacaacctagcaacaccctggaactcctagtcacaggcttactccccaaacccagcctattagcccagcctggtcccatggtggcccctggcgaaaatatgactcttcagtgtcaaggggaactgccagactcaacatttgtcctgttgaaggagggggctcaggagcctttagagcaacagaggccaagtgggtacagggctgacttctggatgccagcagtgagaggtgaagactctgggatctatagctgtgtttattatttggactctactccctttgcagcttcaaatcacagtgactccctggagatctgggtgactgataagccccctaaaccctctctgtcagcctggcccagcaccatgttcaagttagggaaggacatcacccttcagtgccgaggacccctgccaggtgttgaatttgttctagaacatgatggagaagaagcacctcagcagttttcagaggatggagactttgtcatcaacaacgtagaaggaaaaggcattggaaactacagctgcagctaccgcctccaggcctaccctgatatctggtcagagcctagtgatcccctggagctggtgggggcagcagggcctgttgctcaggagtgcactgtagggaacattgtccgaagtagcctaatcgtggtggttgttgtagccttgggggtagtgctagccatagagtggaagaagtggcctcgactgcgaaccagaggctcagagacagacggaagagaccagaccattgcccttgaagagtgtaaccaagaaggagaaccaggcacccctgccaattctccttcatcaacctctcagagaatctctgtggaactgcccgttccaatataataatctcctcctttacaagagctttcctctcctctctcttgctctcagagacctataaatccaaccagttaccctgcaagtcagccccatctgctgttccttggtctctaatcacctgagctgggtaaaggggattctgggagttgagagctctgccagggtgagatgtttcctgaagagaggttccccacccctgtaactcctcactgtactgatttactggcgcatgaaattctattaaaaatgcattcttctgaataaaaagagtattcactatttaacttcaaaaaaaaaaac

SEQ ID NO: 438540 - DNA, 2279 bp, Homo sapiens
gagaatcagcagaaccccaagaaaaattctacctttttactagcctccattgcctgccctgatcacactgaggactcatctggaggtagtgaggggtggggttgaagggtccctgtgtgagaagtccatctgcaaagtggatttaccttactttttaaatgcacttacttaaaagcaaagaagcctccgagaaccaatatttgctatatttgctttctctctttcttgttcttaatttggttttgtgttgtattttgttttttgtttttgtttttgttttttgccttctagaaatgtaccctaagcccttcttcaagacatgggccagccctgtggtcacccctggtgcccgagtgactttcaattgctccaccccccaccagcatatgagctttattctttacaaagatggaagtgaaatagcatccagtgacaggtcctgggcaagtccgggggccagtgcagctcactttctaatcatttcggtgggcattggtgatggagggaattacagctgccgatattatgacttttctatctggtctgagcccagcgaccctgtggagctcgtggtgacagaattctaccccaaacccactctcctggcacagccaggtcctgtggtgtttcctgggaagagtgtgatcctgcgctgccaagggactttccagggcatgaggttcgccctcttgcaggagggagcccatgttcccttacagtttcggagtgtctcagggaactcagctgacttccttctccacactgttggagcagaggactctgggaactatagctgtatctactatgagacaaccatgtcaaacagggggtcatatctcagtatgccccttatgatctgggtgactgacacattccctaagccatggttgtttgctgagcccagttctgtggttcccatggggcagaatgttactctctggtgccgagggccggtccatggagtaggatacattctgcacaaagaaggagaagccacttcaatgcagctctggggatccaccagtaatgacggggcattccccatcaccaatatatctggtactagcatggggcgttacagctgctgctaccaccctgactggaccagttctatcaagatacaacctagcaacaccctggaactcctagtcacaggcttactccccaaacccagcctattagcccagcctggtcccatggtggcccctggcgaaaatatgactcttcagtgtcaaggggaactgccagactcaacatttgtcctgttgaaggagggggctcaggagcctttagagcaacagaggccaagtgggtacagggctgacttctggatgccagcagtgagaggtgaagactctgggatctatagctgtgtttattatttggactctactccctttgcagcttcaaatcacagtgactccctggagatctgggtgactgataagccccctaaaccctctctgtcagcctggcccagcaccatgttcaagttagggaaggacatcacccttcagtgccgaggacccctgccaggtgttgaatttgttctagaacatgatggagaagaagcacctcagcagttttcagaggatggagactttgtcatcaacaacgtagaaggaaaaggcattggaaactacagctgcagctaccgcctccaggcctaccctgatatctggtcagagcctagtgatcccctggagctggtgggggcagcagggcctgttgctcaggagtgcactgtagggaacattgtccgaagtagcctaatcgtggtggttgttgtagccttgggggtagtgctagccatagagtggaagaagtggcctcgactgcgaaccagaggctcagagacagacggaagagaccagaccattgcccttgaagagtgtaaccaagaaggagaaccaggcacccctgccaattctccttcatcaacctctcagagaatctctgtggaactgcccgttccaatataataatctcctcctttacaagagctttcctctcctctctcttgctctcagagacctataaatccaaccagttaccctgcaagtcagccccatctgctgttccttggtctctaatcacctgagctgggtaaaggggattctgggagttgagagctctgccagggtgagatgtttcctgaagagaggttccccacccctgtaactcctcactgtactgatttactggcgcatgaaattctattaaaaatgcattcttctgaataaaaagagtattcactatttaacttcaaaaaaaaaaac

SEQ ID NO: 438541 - DNA, 2822 bp, Homo sapiens
  misc_feature (957)..(957): n is a, c, g, or t
  misc_feature (1002)..(1002): n is a, c, g, or t
ctccctgaccccttgcgcttcccgagtgaggcaatgcctcgccctgcttcggctcgcggacggtgcgcgcacccactgacctgcgcccactgtctggcactccctagtgagatgaacccggtacctcagatggaaatgcagaaatcacccgtcttctgcgtcgctcacgctgggagctgtagatcgcagctgttcctattcggccatcttggctcctccattctgcttttaagatacaagtgatgccttcaaatttgagctcagtttcttatggtcgtttaggagcatgagggtttctgcaataatctaccagtgaaatgatgatcaagatcttggaaagcactctactggtcaagcagaatagttcctgtcatctccattaagaatcagcttattggccgggcgcagtggctcatgcctgtaatcccagcactttgggaggctgaggcgggtggatcacgaggtcaggagatcgagaccatcctgtctaacaaggaatcctttctggcactcaagagttttcaattcaatcctgatgaatgaatcattatttgataccagcctaagtgaagactctgcctggtgacttttgcaaggtggtttctggctgcaacatgggaagatttgggatcagtgagatggaagagatttttctggctactagcgttcctaagaaagagctttagtgtttatccagctattggtatgcagacaactatacccttatgagaaacactagcagagaagaagagttcttgactgggtctgggccatgaaactgaccggataaaagtgggagaagaagagatgttgaaggaggagtttgctgttttctcagtctcctgagaaattccagatatcttctttctacacacatcctggagaggggaaagaaagcctctctctgtcacccaggctggaatgcactggtgccatctccactcactgcagcttcancctcctgggttcaagtgatcctcctgcctctcagccttccgagtngctgggactacagtttgctgcatctggaggagctcactggagaatctccaacatcggagcgggccttcaactaccatcccaccacctgctgaggagaaaaattcttcaagactcagagcacacagccagcaccagaggccccatgaccctggacagaccaggggagggggccaccatgctgaagacattcactgttttgctcttttgcattcggatgagtctgggtatgacatcgatagtgatggaccctcaaccggagttgtggatagagtccaactacccccaggccccttgggagaacatcacgctttggtgccgaagcccctctcggatatcaagcaagttcctgctgctgaaggataagacacagatgacctggatccgcccttcccacaagaccttccaagtttcattccttataggtgcccttactgagtccaatgcaggtctttaccggtgctgctactggaaggagacaggctggtcaaagcccagtaaagttctagagttggaggcaccaggccaactgcccaagcccatcttctggattcaggctgagacccccgctcttcctgggtgtaatgttaacatcctctgccatggctggctgcaggatttggtattcatgctgtttaaagagggatatgcagagcctgtggattaccaagtcccaactgggacaatggccatattctccattgacaacctgacacctgaggatgaaggggtttacatctgccgcactcatatccagatgctccccaccctgtggtcagagcccagcaaccccctgaagctggttgtagcaggtgggtgtggctatggctgctggcatctggcaattgttgtcccaggtatcatggctggctgagctagggtttctgattttactttcctcagccagtttctaggccctgcaaggccccatgagctacagtcgtttgaagttttactgagatataaattagaatggcatgtgctgcaaggcagatgtatgggagccaatcatttggctagtaaaggagcccagccaactggccagcagcttcagctcatcacagctttgttgttctcaacttgttgaatatcatgcattcattcattaattcaaccagtatttattgagcacctaatatgtgccaggcactgccactgcaatcttataaatggagttttaaatttgcaaatgtattttatttgtaattgttatttttatgtgtggaaaacagaatggattgctagtgttggtgagtaaaaacaaaaaaaaacaaatgacaaagaatgtgatagctcatattttagaaatggctttataaatcaccttggttccctatcagtagagctagtaaggcagcaccaatctctaaatatagaagaaatttccccaaaatgtaaaatgccagacatgtcccagcccgaactcccccaccccatggcctggaggtttctagatggaattggccacatttgctttagtctctctatccagctaaataggcttggggaaagctgtggtgctacagaaagtaccctagacttagaagcagtaatactggtttctagttctatttctgacactgcctccctgtgtggtcttgagcaagtcacttcacttttctgtgctttggcttcctctactctaaaaatgggataacagtatctatctgatctactgtgtaatgcttctctctgtgcctcagcttcctgatctgcaaaattggtttaataataatgcctacctcacagggttgttgtgaggatttgcctaaatatatatgtacagtgcctggcatataagttctcaataaatggtagatatt

SEQ ID NO: 438542 - DNA, 5452 bp, Homo sapiens
  misc_feature (957)..(957): n is a, c, g, or t
  misc_feature (1002)..(1002): n is a, c, g, or t
ctccctgaccccttgcgcttcccgagtgaggcaatgcctcgccctgcttcggctcgcggacggtgcgcgcacccactgacctgcgcccactgtctggcactccctagtgagatgaacccggtacctcagatggaaatgcagaaatcacccgtcttctgcgtcgctcacgctgggagctgtagatcgcagctgttcctattcggccatcttggctcctccattctgcttttaagatacaagtgatgccttcaaatttgagctcagtttcttatggtcgtttaggagcatgagggtttctgcaataatctaccagtgaaatgatgatcaagatcttggaaagcactctactggtcaagcagaatagttcctgtcatctccattaagaatcagcttattggccgggcgcagtggctcatgcctgtaatcccagcactttgggaggctgaggcgggtggatcacgaggtcaggagatcgagaccatcctgtctaacaaggaatcctttctggcactcaagagttttcaattcaatcctgatgaatgaatcattatttgataccagcctaagtgaagactctgcctggtgacttttgcaaggtggtttctggctgcaacatgggaagatttgggatcagtgagatggaagagatttttctggctactagcgttcctaagaaagagctttagtgtttatccagctattggtatgcagacaactatacccttatgagaaacactagcagagaagaagagttcttgactgggtctgggccatgaaactgaccggataaaagtgggagaagaagagatgttgaaggaggagtttgctgttttctcagtctcctgagaaattccagatatcttctttctacacacatcctggagaggggaaagaaagcctctctctgtcacccaggctggaatgcactggtgccatctccactcactgcagcttcancctcctgggttcaagtgatcctcctgcctctcagccttccgagtngctgggactacagtttgctgcatctggaggagctcactggagaatctccaacatcggagcgggccttcaactaccatcccaccacctgctgaggagaaaaattcttcaagactcagagcacacagccagcaccagaggccccatgaccctggacagaccaggggagggggccaccatgctgaagacattcactgttttgctcttttgcattcggatgagtctgggtatgacatcgatagtgatggaccctcaaccggagttgtggatagagtccaactacccccaggccccttgggagaacatcacgctttggtgccgaagcccctctcggatatcaagcaagttcctgctgctgaaggataagacacagatgacctggatccgcccttcccacaagaccttccaagtttcattccttataggtgcccttactgagtccaatgcaggtctttaccggtgctgctactggaaggagacaggctggtcaaagcccagtaaagttctagagttggaggcaccaggccaactgcccaagcccatcttctggattcaggctgagacccccgctcttcctgggtgtaatgttaacatcctctgccatggctggctgcaggatttggtattcatgctgtttaaagagggatatgcagagcctgtggattaccaagtcccaactgggacaatggccatattctccattgacaacctgacacctgaggatgaaggggtttacatctgccgcactcatatccagatgctccccaccctgtggtcagagcccagcaaccccctgaagctggttgtagcaggactctaccccaaaccaactttgacagcccatcctgggcccatcatggcacctggagaaagcctgaatctcaggtgccaagggccaatctatggaatgacctttgctctaatgagggttgaagacttggagaagtccttttaccacaagaagacaataaaaaatgaggcaaatttcttcttccagtctttgaagatccaagatactggacattacctctgtttttactatgacgcatcatatagaggttcactccttagtgatgtcctgaaaatctgggtaactgacactttccccaagacctggctacttgctcggcccagtgctgtggtccaaatgggtcagaatgtgagcctacggtgtcgaggaccagtggatggagtgggtcttgcactctataagaaaggagaagacaaaccacttcaatttttggatgccaccagcatcgatgacaacacatcattcttcctcaacaatgtaacctacagtgatactggcatctatagctgccactatcttctcacctggaagacctccattaggatgccatcacacaacactgtggagcttatggttgtagataagccccccaaaccctccctgtcagcttggccaagcactgtgttcaagctaggaaaggccatcacccttcagtgccgagtatctcatccagtactggaattttctctggaatgggaagaaagagaaacattccaaaaattctcagtaaacggagacttcatcatcagtaatgttgacgggaaaggcacagggacctacagttgcagctatcgcgtagagacacatcctaacatctggtcacatcgcagtgagcccctgaagctgatggggccagcaggctatctcacctggaattacgttctgaatgaagctatcaggttgtctctaatcatgcagcttgttgccttgctgttggtagtgctgtggataaggtggaagtgtcggagactcagaatcagagaagcctggttgctgggaacagctcaaggggtcaccatgctcttcatagtcacggcccttctctgctgtggactgtgcaatggggtattgatagaagagactgaaatagtcatgccaacccctaagcctgagctgtgggcagagaccaactttcctctggccccgtggaagaacttaaccctctggtgcagaagcccttctggctcaactaaggagtttgtgttgctgaaggatgggaccgggtggatcgccactcgcccggcctcagagcaggtccgggctgccttcccccttggcgccctgacccagagccacaccgggagctaccactgccattcatgggaggagatggctgtatcggagcccagtgaggcacttgagctggtggggacagacatcctccccaaacctgtcatttctgcttcccccacaatccggggccaggaactacaactccggtgcaaaggatggctggcaggcatggggtttgctctgtataaggagggagagcaagaacctgtccagcaacttggtgctgttggaagagaagccttctttacaatccagagaatggaggataaagacgaaggcaattacagctgccgcactcacactgaaaaacgccccttcaagtggtctgagcccagtgagccgctggagcttgtcataaaagaaatgtaccctaagcccttcttcaagacatgggccagccctgtggtcacccctggtgcccgagtgactttcaattgctccaccccccaccagcatatgagctttattctttacaaagatggaagtgaaatagcatccagtgacaggtcctgggcaagtccgggggccagtgcagctcactttctaatcatttcggtgggcattggtgatggagggaattacagctgccgatattatgacttttctatctggtctgagcccagcgaccctgtggagctcgtggtgacagaattctaccccaaacccactctcctggcacagccaggtcctgtggtgtttcctgggaagagtgtgatcctgcgctgccaagggactttccagggcatgaggttcgccctcttgcaggagggagcccatgttcccttacagtttcggagtgtctcagggaactcagctgacttccttctccacactgttggagcagaggactctgggaactatagctgtatctactatgagacaaccatgtcaaacagggggtcatatctcagtatgccccttatgatctgggtgactgacacattccctaagccatggttgtttgctgagcccagttctgtggttcccatggggcagaatgttactctctggtgccgagggccggtccatggagtaggatacattctgcacaaagaaggagaagccacttcaatgcagctctggggatccaccagtaatgacggggcattccccatcaccaatatatctggtactagcatggggcgttacagctgctgctaccaccctgactggaccagttctatcaagatacaacctagcaacaccctggaactcctagtcacaggcttactccccaaacccagcctattagcccagcctggtcccatggtggcccctggcgaaaatatgactcttcagtgtcaaggggaactgccagactcaacatttgtcctgttgaaggagggggctcaggagcctttagagcaacagaggccaagtgggtacagggctgacttctggatgccagcagtgagaggtgaagactctgggatctatagctgtgtttattatttggactctactccctttgcagcttcaaatcacagtgactccctggagatctgggtgactgataagccccctaaaccctctctgtcagcctggcccagcaccatgttcaagttagggaaggacatcacccttcagtgccgaggacccctgccaggtgttgaatttgttctagaacatgatggagaagaagcacctcagcagttttcagaggatggagactttgtcatcaacaacgtagaaggaaaaggcattggaaactacagctgcagctaccgcctccaggcctaccctgatatctggtcagagcctagtgatcccctggagctggtgggggcagcagggcctgttgctcaggagtgcactgtagggaacattgtccgaagtagcctaatcgtggtggttgttgtagccttgggggtagtgctagccatagagtggaagaagtggcctcgactgcgaaccagaggctcagagacagacggaagagaccagaccattgcccttgaagagtgtaaccaagaaggagaaccaggcacccctgccaattctccttcatcaacctctcagagaatctctgtggaactgcccgttccaatataataatctcctcctttacaagagctttcctctcctctctcttgctctcagagacctataaatccaaccagttaccctgcaagtcagccccatctgctgttccttggtctctaatcacctgagctgggtaaaggggattctgggagttgagagctctgccagggtgagatgtttcctgaagagaggttccccacccctgtaactcctcactgtactgatttactggcgcatgaaattctattaaaaatgcattcttctgaataaaaagagtattcactatttaacttcaaaaaaaaaaac

SEQ ID NO: 438543 - DNA, 5223 bp, Homo sapiens
  misc_feature (957)..(957): n is a, c, g, or t
  misc_feature (1002)..(1002): n is a, c, g, or t
ctccctgaccccttgcgcttcccgagtgaggcaatgcctcgccctgcttcggctcgcggacggtgcgcgcacccactgacctgcgcccactgtctggcactccctagtgagatgaacccggtacctcagatggaaatgcagaaatcacccgtcttctgcgtcgctcacgctgggagctgtagatcgcagctgttcctattcggccatcttggctcctccattctgcttttaagatacaagtgatgccttcaaatttgagctcagtttcttatggtcgtttaggagcatgagggtttctgcaataatctaccagtgaaatgatgatcaagatcttggaaagcactctactggtcaagcagaatagttcctgtcatctccattaagaatcagcttattggccgggcgcagtggctcatgcctgtaatcccagcactttgggaggctgaggcgggtggatcacgaggtcaggagatcgagaccatcctgtctaacaaggaatcctttctggcactcaagagttttcaattcaatcctgatgaatgaatcattatttgataccagcctaagtgaagactctgcctggtgacttttgcaaggtggtttctggctgcaacatgggaagatttgggatcagtgagatggaagagatttttctggctactagcgttcctaagaaagagctttagtgtttatccagctattggtatgcagacaactatacccttatgagaaacactagcagagaagaagagttcttgactgggtctgggccatgaaactgaccggataaaagtgggagaagaagagatgttgaaggaggagtttgctgttttctcagtctcctgagaaattccagatatcttctttctacacacatcctggagaggggaaagaaagcctctctctgtcacccaggctggaatgcactggtgccatctccactcactgcagcttcancctcctgggttcaagtgatcctcctgcctctcagccttccgagtngctgggactacagtttgctgcatctggaggagctcactggagaatctccaacatcggagcgggccttcaactaccatcccaccacctgctgaggagaaaaattcttcaagactcagagcacacagccagcaccagaggccccatgaccctggacagaccaggggagggggccaccatgctgaagacattcactgttttgctcttttgcattcggatgagtctgggtatgacatcgatagtgatggaccctcaaccggagttgtggatagagtccaactacccccaggccccttgggagaacatcacgctttggtgccgaagcccctctcggatatcaagcaagttcctgctgctgaaggataagacacagatgacctggatccgcccttcccacaagaccttccaagtttcattccttataggtgcccttactgagtccaatgcaggtctttaccggtgctgctactggaaggagacaggctggtcaaagcccagtaaagttctagagttggaggcaccaggccaactgcccaagcccatcttctggattcaggctgagacccccgctcttcctgggtgtaatgttaacatcctctgccatggctggctgcaggatttggtattcatgctgtttaaagagggatatgcagagcctgtggattaccaagtcccaactgggacaatggccatattctccattgacaacctgacacctgaggatgaaggggtttacatctgccgcactcatatccagatgctccccaccctgtggtcagagcccagcaaccccctgaagctggttgtagcaggactctaccccaaaccaactttgacagcccatcctgggcccatcatggcacctggagaaagcctgaatctcaggtgccaagggccaatctatggaatgacctttgctctaatgagggttgaagacttggagaagtccttttaccacaagaagacaataaaaaatgaggcaaatttcttcttccagtctttgaagatccaagatactggacattacctctgtttttactatgacgcatcatatagaggttcactccttagtgatgtcctgaaaatctgggtaactgacactttccccaagacctggctacttgctcggcccagtgctgtggtccaaatgggtcagaatgtgagcctacggtgtcgaggaccagtggatggagtgggtcttgcactctataagaaaggagaagacaaaccacttcaatttttggatgccaccagcatcgatgacaacacatcattcttcctcaacaatgtaacctacagtgatactggcatctatagctgccactatcttctcacctggaagacctccattaggatgccatcacacaacactgtggagcttatggttgtagataagccccccaaaccctccctgtcagcttggccaagcactgtgttcaagctaggaaaggccatcacccttcagtgccgagtatctcatccagtactggaattttctctggaatgggaagaaagagaaacattccaaaaattctcagtaaacggagacttcatcatcagtaatgttgacgggaaaggcacagggacctacagttgcagctatcgcgtagagacacatcctaacatctggtcacatcgcagtgagcccctgaagctgatggggccagcaggctatctcacctggaattacgttctgaatgaagctatcaggttgtctctaatcatgcagcttgttgccttgctgttggtagtgctgtggataaggtggaagtgtcggagactcagaatcagagaagcctggttgctgggaacagctcaaggggtcaccatgctcttcatagtcacggcccttctctgctgtggactgtgcaatggggtattgatagaagagactgaaatagtcatgccaacccctaagcctgagctgtgggcagagaccaactttcctctggccccgtggaagaacttaaccctctggtgcagaagcccttctggctcaactaaggagtttgtgttgctgaaggatgggaccgggtggatcgccactcgcccggcctcagagcaggtccgggctgccttcccccttggcgccctgacccagagccacaccgggagctaccactgccattcatgggaggagatggctgtatcggagcccagtgaggcacttgagctggtggggacagacatcctccccaaacctgtcatttctgcttcccccacaatccggggccaggaactacaactccggtgcaaaggatggctggcaggcatggggtttgctctgtataaggagggagagcaagaacctgtccagcaacttggtgctgttggaagagaagccttctttacaatccagagaatggaggataaagacgaaggcaattacagctgccgcactcacactgaaaaacgccccttcaagtggtctgagcccagtgagccgctggagcttgtcataaaagaaatgtaccctaagcccttcttcaagacatgggccagccctgtggtcacccctggtgcccgagtgactttcaattgctccaccccccaccagcatatgagctttattctttacaaagatggaagtgaaatagcatccagtgacaggtcctgggcaagtccgggggccagtgcagctcactttctaatcatttcggtgggcattggtgatggagggaattacagctgccgatattatgacttttctatctggtctgagcccagcgaccctgtggagctcgtggtgacagaattctaccccaaacccactctcctggcacagccaggtcctgtggtgtttcctgggaagagtgtgatcctgcgctgccaagggactttccagggcatgaggttcgccctcttgcaggagggagcccatgttcccttacagtttcggagtgtctcagggaactcagctgacttccttctccacactgttggagcagaggactctgggaactatagctgtatctactatgagacaaccatgtcaaacagggggtcatatctcagtatgccccttatgatctgggtgactgacacattccctaagccatggttgtttgctgagcccagttctgtggttcccatggggcagaatgttactctctggtgccgagggccggtccatggagtaggatacattctgcacaaagaaggagaagccacttcaatgcagctctggggatccaccagtaatgacggggcattccccatcaccaatatatctggtactagcatggggcgttacagctgctgctaccaccctgactggaccagttctatcaagatacaacctagcaacaccctggaactcctagtcacaggcttactccccaaacccagcctattagcccagcctggtcccatggtggcccctggcgaaaatatgactcttcagtgtcaaggggaactgccagactcaacatttgtcctgttgaaggagggggctcaggagcctttagagcaacagaggccaagtgggtacagggctgacttctggatgccagcagtgagaggtgaagactctgggatctatagctgtgtttattatttggactctactccctttgcagcttcaaatcacagtgactccctggagatctgggtgactgataagccccctaaaccctctctgtcagcctggcccagcaccatgttcaagttagggaaggacatcacccttcagtgccgaggacccctgccaggtgttgaatttgttctagaacatgatggagaagaagcacctcagcagttttcagaggatggagactttgtcatcaacaacgtagaaggaaaaggcattggaaactacagctgcagctaccgcctccaggcctaccctgatatctggtcagagcctagtgatcccctggagctggtgggggcagcagggcctgttgctcaggagtgcactgtagggaacattgtccgaagtagcctaatcgtggtggttgttgtagccttgggggtagtgctagccatagagtggaagaagtggcctcgactgcgaaccagaggctcagagacagacggaagagaccagaccattgcccttgaagagtgtaaccaagaaggagaaccaggcacccctgccaattctccttcatcaacctctcagagaatctctgtggaactgcccgttccaatataataatctcctcctctgtgccctcctctatgctgcctcctctgtgctgtcgggatcctctagaacgccat

SEQ ID NO: 438544 - DNA, 3046 bp, Homo sapiens
  misc_feature (957)..(957): n is a, c, g, or t
  misc_feature (1002)..(1002): n is a, c, g, or t
ctccctgaccccttgcgcttcccgagtgaggcaatgcctcgccctgcttcggctcgcggacggtgcgcgcacccactgacctgcgcccactgtctggcactccctagtgagatgaacccggtacctcagatggaaatgcagaaatcacccgtcttctgcgtcgctcacgctgggagctgtagatcgcagctgttcctattcggccatcttggctcctccattctgcttttaagatacaagtgatgccttcaaatttgagctcagtttcttatggtcgtttaggagcatgagggtttctgcaataatctaccagtgaaatgatgatcaagatcttggaaagcactctactggtcaagcagaatagttcctgtcatctccattaagaatcagcttattggccgggcgcagtggctcatgcctgtaatcccagcactttgggaggctgaggcgggtggatcacgaggtcaggagatcgagaccatcctgtctaacaaggaatcctttctggcactcaagagttttcaattcaatcctgatgaatgaatcattatttgataccagcctaagtgaagactctgcctggtgacttttgcaaggtggtttctggctgcaacatgggaagatttgggatcagtgagatggaagagatttttctggctactagcgttcctaagaaagagctttagtgtttatccagctattggtatgcagacaactatacccttatgagaaacactagcagagaagaagagttcttgactgggtctgggccatgaaactgaccggataaaagtgggagaagaagagatgttgaaggaggagtttgctgttttctcagtctcctgagaaattccagatatcttctttctacacacatcctggagaggggaaagaaagcctctctctgtcacccaggctggaatgcactggtgccatctccactcactgcagcttcancctcctgggttcaagtgatcctcctgcctctcagccttccgagtngctgggactacagtttgctgcatctggaggagctcactggagaatctccaacatcggagcgggccttcaactaccatcccaccacctgctgaggagaaaaattcttcaagactcagagcacacagccagcaccagaggccccatgaccctggacagaccaggggagggggccaccatgctgaagacattcactgttttgctcttttgcattcggatgagtctgggtatgacatcgatagtgatggaccctcaaccggagttgtggatagagtccaactacccccaggccccttgggagaacatcacgctttggtgccgaagcccctctcggatatcaagcaagttcctgctgctgaaggataagacacagatgacctggatccgcccttcccacaagaccttccaagtttcattccttataggtgcccttactgagtccaatgcaggtctttaccggtgctgctactggaaggagacaggctggtcaaagcccagtaaagttctagagttggaggcaccaggccaactgcccaagcccatcttctggattcaggctgagacccccgctcttcctgggtgtaatgttaacatcctctgccatggctggctgcaggatttggtattcatgctgtttaaagagggatatgcagagcctgtggattaccaagtcccaactgggacaatggccatattctccattgacaacctgacacctgaggatgaaggggtttacatctgccgcactcatatccagatgctccccaccctgtggtcagagcccagcaaccccctgaagctggttgtagcaggactctaccccaaaccaactttgacagcccatcctgggcccatcatggcacctggagaaagcctgaatctcaggtgccaagggccaatctatggaatgacctttgctctaatgagggttgaagacttggagaagtccttttaccacaagaagacaataaaaaatgaggcaaatttcttcttccagtctttgaagatccaagatactggacattacctctgtttttactatgacgcatcatatagaggttcactccttagtgatgtcctgaaaatctgggtaactgacactttccccaagacctggctacttgctcggcccagtgctgtggtccaaatgggtcagaatgtgagcctacggtgtcgaggaccagtggatggagtgggtcttgcactctataagaaaggagaagacaaaccacttcaatttttggatgccaccagcatcgatgacaacacatcattcttcctcaacaatgtaacctacagtgatactggcatctatagctgccactatcttctcacctggaagacctccattaggatgccatcacacaacactgtggagcttatggttgtagataagccccccaaaccctccctgtcagcttggccaagcactgtgttcaagctaggaaaggccatcacccttcagtgccgagtatctcatccagtactggaattttctctggaatgggaagaaagagaaacattccaaaaattctcagtaaacggagacttcatcatcagtaatgttgacgggaaaggcacagggacctacagttgcagctatcgcgtagagacacatcctaacatctggtcacatcgcagtgagcccctgaagctgatggggccagcaggctatctcacctggaattacgttctgaatgaagctatcaggttgtctctaatcatgcagcttgttgccttgctgttggtagtgctgtggataaggtggaagtgtcggagactcagaatcaggtaactgtcttgtcccagccccctgttccccaacctaacagagtctgaagaatgagtcatgccctagttgagacaagccacagaggcaaaccctatagaacccctatcttctgggcttagggaacaagactttctcaccccacctgtctctttcgcctcacagaggggtcagcactcaagccagcgggtggagaaatgcatagttctcagaggcaagaggagtaatcagaactgcattcactgacatcccccccgg

SEQ ID NO: 438545 - DNA, 791 bp, Homo sapiens
ggtcgcatgtgccctcttccttgactacccagggactcctgtttctctttaacgtgtcaccccgagaagtttctgccccatcctcaggccatagccctagaagtcaattgtacccgtatccccctccccgcccccgcagtaattcatgtccctgtccgtgttgtactccctactccccccaggtttgaccccaggactcccctacccacaccagactccccagggcctgatgccctatggtcagccccggcccccgatcttgggctatggaggtaagtacaggagggagatgaaggggcttggtgagtgtgtggctttgggagaagaaaacagaggatggaattgaggacatagttttgcaactcaacactgatctctgtcatactggtgctgtccgccctgcagtccccacaggaggccctccatacccccatgccccgtatggtgctggtcgagggaactatgatgccttccgaggccagggaggttatcctgggaaacctcgcaacaggtgaggagggcagacgcccaagctttgttgccgcctgcagactcccttttgggagccctcagctctcatcctgtacctctcacctcacagatggttcgtggagacccaagggccattgtggaatatcgggacctggatgccccagacgatgttgatttcttttgagccgtcccccgttcctcagtcctgtatcatccatacttgtactaccttgtcctatgaagctctgagaattttttgtacgatcagccttactgctaataaaagcacttccacaggg

SEQ ID NO: 438546 - DNA, 449 bp, Homo sapiens
cctacctcttgttgaattttgggtagtatccaaaatgaatatctacagttaatctgaaaaggcctttccaactccttatcagtatgaggcctgattttctgttttttttttgagactgggcaacagagagataccctgtcaaaaaaaaaaaaaggaaattaaaattttggaaaacttctactaatgtgagcttgacagcttcccattaagtaaagactttcttggtgagataggcagtgatgctgatgagtacattttgatattgggtgagacataatccaggtccattgaaagggaaagatagaacagtggattttaatgcagcagagaaagaaatattcactgatactatttcagattgaaggttctaactagcctgtgagaaactacttcctctgagaattttttgtacgatcagccttactgctaataaaagcacttccacaggg

SEQ ID NO: 438547 - DNA, 3127 bp, Homo sapiens
gtagttcctaacgctcgagccgttatcgtctcgaaaagccgcgcgagacttgcgagatccccgcccctttcccatcacgccctgctctccccgcccttcgcgctcggtttgttagttccagttccggccgcgagggtggagctttgtgcctcggaggcgtgggtgacgcaggcgcagcgcgggctgcgcgcgctactgcccatccccggttgtcccacttttgttcgcctctcttcggccctctactcaagagctccgtctccgtctcgccctcctcgaagtcctcgtcgcgcgcccgcgacccaggtcgccctgaaatctagcccgtccgagcgcgagtccaacggccgcggccgcaccaaggccccctcagaccgtgccatgggtgacagtgatgacgagtacgatcgaaggcgcagggacaagttcagaagagagcgcagcgactacgaccgttcccgcgagagagatgaaagacgtcgaggggacgattggaatgacagagagtgggaccgtggccgtgagcgccgtagtcggggtgaatatcgggactatgaccggaatcggcgagagcgcttctcgccacctcgccacgaactcagcccgccacagaagcgcatgaggagagactgggatgagcacagctctgacccataccacagtggctatgagatgccctatgctggggggggtgggggcccaacttatggcccccctcagccctggggccaccctgacgtccacatcatgcagcaccatgtcctgcctatccaggccaggctgggcagcattgcagagattgacctgggtgtgccgccgcccgtgatgaagaccttcaaggagtttctcctctccctggatgactcggtggatgagacggaggccgtcaagcgctataatgactacaagctggatttccggaggcaacagatgcaggatttcttcctggcgcacaaagatgaggagtggtttcggtctaagtaccacccagatgaggtggggaagcgtcggcaggaggcccggggggccctgcaaaaccgactgagggtcttcctgtccctcatggagactggctggtttgataaccttctcctggacatagacaaagctgatgccattgtcaagatgctggatgcagccgtgattaagatggaaggaggcacggagaatgatcttcgcatcctggagcaggaggaggaggaggagcaggcaggaaagcctggggagcccagcaagaaagaagaaggacgggctggagcaggcctaggggacggggagcgcaaaaccaacgacaaggatgagaagaaggaagacggcaagcaggctgagaatgacagttctaatgatgacaaaacaaagaagtcggagggtgatggggacaaggaagagaagaaagaagactccgagaaggaagccaaaaagagtagcaagaagcggaaccggaagcacagtggtgacgacagctttgacgagggcagcgtgtcagagtctgagtcggagtcagagagcggccaggctgaggaggagaaggaggaggccgaagaagcgctcaaggagaaggagaagcccaaggaagaagaatgggagaagcccaaggacgccgcggggctggagtgcaagccgcggccgctgcataagacctgctccctcttcatgcgcaacatcgcgcccaacatctcccgggccgagatcatctccctttgtaaaaggtacccaggctttatgcgggtggcgctctcagagccccagccagagaggaggtttttccgtcgtggctgggtgaccttcgaccgcagtgttaacattaaagagatctgttggaacctgcagaacatccgtctccgggagtgtgagctgagccctggtgtgaacagggacctgacccggcgcgttcgcaacatcaacggcatcacccagcacaagcagattgtgcgcaacgacatcaagctggcggccaagctgatccacacgctggatgacaggacacagctttgggcctcagaaccagggacgcctcccctgcccacgagcctgccctcgcaaaacccgatcttgaagaatatcaccgactacctgatcgaggaagtaagcgccgaggaggaggagctgctggggagcagcgggggcgctcctcctgaggagcctcctaaggaagggaacccggcagagatcaacgtggagcgggatgagaagttgattaaggtcttggacaagctcctcctttacctgcgcatcgtgcattccttggattattacaacacctgtgagtaccccaacgaggacgagatgcccaatcgctgtgggatcatccacgttcgggggcccatgccacccaaccgcatcagtcacggggaagtgctggagtggcagaagacttttgaggagaagctcacgccgttgctgagtgtgcgggagtcactctcagaggaagaggcccagaagatggggcgcaaagacccagagcaggaagtggagaagttcgtcacctccaacacgcaggaactgggcaaggataagtggctgtgtcctctcagtggcaagaaattcaagggtcctgagtttgtgcgcaaacatatcttcaacaagcatgcagagaaaattgaggaagtgaaaaaggaagtcgcgttttttaacaacttcctcactgatgctaagcgcccagctctgcctgagatcaagccagcccagccacctggccccgcccagatactccccccaggtttgaccccaggactcccctacccacaccagactccccagggcctgatgccctatggtcagccccggcccccgatcttgggctatggagctggtgctgtccgccctgcagtccccacaggaggccctccatacccccatgccccgtatggtgctggtcgagggaactatgatgccttccgaggccagggaggttatcctgggaaacctcgcaacaggatggttcgtggagacccaagggccattgtggaatatcgggacctggatgccccagacgatgttgatttcttttgagccgtcccccgttcctcagtcctgtatcatccatacttgtactaccttgtcctatgaagctctgagaattttttgtacgatcagccttactgctaataaaagcacttccacaggg

SEQ ID NO: 438548 - DNA, 3000 bp, Homo sapiens
tatatgctaggtacgaggctgggctgaaatcggccgaggcgcaggcgcagcgcgggctgcgcgcgctactgcccatccccggttgtcccacttttgttcgcctctcttcggccctctactcaagagctccgtctccgtctcgccctcctcgaagtcctcgtcgcgcgcccgcgacccaggtcgccctgaaatctagcccgtccgagcgcgagtccaacggccgcggccgcaccaaggccccctcagaccgtgccatgggtgacagtgatgacgagtacgatcgaaggcgcagggacaagttcagaagagagcgcagcgactacgaccgttcccgcgagagagatgaaagacgtcgaggggacgattggaatgacagagagtgggaccgtggccgtgagcgccgtagtcggggtgaatatcgggactatgaccggaatcggcgagagcgcttctcgccacctcgccacgaactcagcccgccacagaagcgcatgaggagagactgggatgagcacagctctgacccataccacagtggctatgagatgccctatgctggggggggtgggggcccaacttatggcccccctcagccctggggccaccctgacgtccacatcatgcagcaccatgtcctgcctatccaggccaggctgggcagcattgcagagattgacctgggtgtgccgccgcccgtgatgaagaccttcaaggagtttctcctctccctggatgactcggtggatgagacggaggccgtcaagcgctataatgactacaagctggatttccggaggcaacagatgcaggatttcttcctggcgcacaaagatgaggagtggtttcggtctaagtaccacccagatgaggtggggaagcgtcggcaggaggcccggggggccctgcaaaaccgactgagggtcttcctgtccctcatggagactggctggtttgataaccttctcctggacatagacaaagctgatgccattgtcaagatgctggatgcagccgtgattaagatggaaggaggcacggagaatgatcttcgcatcctggagcaggaggaggaggaggagcaggcaggaaagcctggggagcccagcaagaaagaagaaggacgggctggagcaggcctaggggacggggagcgcaaaaccaacgacaaggatgagaagaaggaagacggcaagcaggctgagaatgacagttctaatgatgacaaaacaaagaagtcggagggtgatggggacaaggaagagaagaaagaagactccgagaaggaagccaaaaagagtagcaagaagcggaaccggaagcacagtggtgacgacagctttgacgagggcagcgtgtcagagtctgagtcggagtcagagagcggccaggctgaggaggagaaggaggaggccgaagaagcgctcaaggagaaggagaagcccaaggaagaagaatgggagaagcccaaggacgccgcggggctggagtgcaagccgcggccgctgcataagacctgctccctcttcatgcgcaacatcgcgcccaacatctcccgggccgagatcatctccctttgtaaaaggtacccaggctttatgcgggtggcgctctcagagccccagccagagaggaggtttttccgtcgtggctgggtgaccttcgaccgcagtgttaacattaaagagatctgttggaacctgcagaacatccgtctccgggagtgtgagctgagccctggtgtgaacagggacctgacccggcgcgttcgcaacatcaacggcatcacccagcacaagcagattgtgcgcaacgacatcaagctggcggccaagctgatccacacgctggatgacaggacacagctttgggcctcagaaccagggacgcctcccctgcccacgagcctgccctcgcaaaacccgatcttgaagaatatcaccgactacctgatcgaggaagtaagcgccgaggaggaggagctgctggggagcagcgggggcgctcctcctgaggagcctcctaaggaagggaacccggcagagatcaacgtggagcgggatgagaagttgattaaggtcttggacaagctcctcctttacctgcgcatcgtgcattccttggattattacaacacctgtgagtaccccaacgaggacgagatgcccaatcgctgtgggatcatccacgttcgggggcccatgccacccaaccgcatcagtcacggggaagtgctggagtggcagaagacttttgaggagaagctcacgccgttgctgagtgtgcgggagtcactctcagaggaagaggcccagaagatggggcgcaaagacccagagcaggaagtggagaagttcgtcacctccaacacgcaggaactgggcaaggataagtggctgtgtcctctcagtggcaagaaattcaagggtcctgagtttgtgcgcaaacatatcttcaacaagcatgcagagaaaattgaggaagtgaaaaaggaagtcgcgttttttaacaacttcctcactgatgctaagcgcccagctctgcctgagatcaagccagcccagccacctggccccgcccagatactccccccaggtttgaccccaggactcccctacccacaccagactccccagggcctgatgccctatggtcagccccggcccccgatcttgggctatggagctggtgctgtccgccctgcagtccccacaggaggccctccatacccccatgccccgtatggtgctggtcgagggaactatgatgccttccgaggccagggaggttatcctgggaaacctcgcaacaggatggttcgtggagacccaagggccattgtggaatatcgggacctggatgccccagacgatgttgatttcttttgagccgtcccccgttcctcagtcctgtatcatccatacttgtactaccttgtcctatgaagctctgagaattttttgtacgatcagccttactgctaataaaagcacttccacaggg

SEQ ID NO: 438549 - DNA, 2901 bp, Homo sapiens
tatatgctaggtacgaggctgggctgaaatcggccgaggcgcaggcgcagcgcgggctgcgcgcgctactgcccatccccggttgtcccacttttgttcgcctctcttcggccctctactcaagagctccgtctccgtctcgccctcctcgaagtcctcgtcgcgcgcccgcgacccaggtcgccctgaaatctagcccgtccgagcgcgagtccaacggccgcggccgcaccaaggccccctcagaccgtgccatgggtgacagtgatgacgagtacgatcgaaggcgcagggacaagttcagaagagagcgcagcgactacgaccgttcccgcgagagagatgaaagacgtcgaggggacgattggaatgacagagagtgggaccgtggccgtgagcgccgtagtcggggtgaatatcgggactatgaccggaatcggcgagagcgcttctcgccacctcgccacgaactcagcccgccacagaagcgcatgaggagagactgggatgagcacagctctgacccataccacagtggctatgagatgccctatgctggggggggtgggggcccaacttatggcccccctcagccctggggccaccctgacgtccacatcatgcagcaccatgtcctgcctatccaggccaggctgggcagcattgcagagattgacctgggtgtgccgccgcccgtgatgaagaccttcaaggagtttctcctctccctggatgactcggtggatgagacggaggccgtcaagcgctataatgactacaagctggatttccggaggcaacagatgcaggatttcttcctggcgcacaaagatgaggagtggtttcggtctaagtaccacccagatgaggtggggaagcgtcggcaggaggcccggggggccctgcaaaaccgactgagggtcttcctgtccctcatggagactggctggtttgataaccttctcctggacatagacaaagctgatgccattgtcaagatgctggatgcagccgtgattaagatggaaggaggcacggagaatgatcttcgcatcctggagcaggaggaggaggaggagcaggcaggaaagcctggggagcccagcaagaaagaagaaggacgggctggagcaggcctaggggacggggagcgcaaaaccaacgacaaggatgagaagaaggaagacggcaagcagagtagcaagaagcggaaccggaagcacagtggtgacgacagctttgacgagggcagcgtgtcagagtctgagtcggagtcagagagcggccaggctgaggaggagaaggaggaggccgaagaagcgctcaaggagaaggagaagcccaaggaagaagaatgggagaagcccaaggacgccgcggggctggagtgcaagccgcggccgctgcataagacctgctccctcttcatgcgcaacatcgcgcccaacatctcccgggccgagatcatctccctttgtaaaaggtacccaggctttatgcgggtggcgctctcagagccccagccagagaggaggtttttccgtcgtggctgggtgaccttcgaccgcagtgttaacattaaagagatctgttggaacctgcagaacatccgtctccgggagtgtgagctgagccctggtgtgaacagggacctgacccggcgcgttcgcaacatcaacggcatcacccagcacaagcagattgtgcgcaacgacatcaagctggcggccaagctgatccacacgctggatgacaggacacagctttgggcctcagaaccagggacgcctcccctgcccacgagcctgccctcgcaaaacccgatcttgaagaatatcaccgactacctgatcgaggaagtaagcgccgaggaggaggagctgctggggagcagcgggggcgctcctcctgaggagcctcctaaggaagggaacccggcagagatcaacgtggagcgggatgagaagttgattaaggtcttggacaagctcctcctttacctgcgcatcgtgcattccttggattattacaacacctgtgagtaccccaacgaggacgagatgcccaatcgctgtgggatcatccacgttcgggggcccatgccacccaaccgcatcagtcacggggaagtgctggagtggcagaagacttttgaggagaagctcacgccgttgctgagtgtgcgggagtcactctcagaggaagaggcccagaagatggggcgcaaagacccagagcaggaagtggagaagttcgtcacctccaacacgcaggaactgggcaaggataagtggctgtgtcctctcagtggcaagaaattcaagggtcctgagtttgtgcgcaaacatatcttcaacaagcatgcagagaaaattgaggaagtgaaaaaggaagtcgcgttttttaacaacttcctcactgatgctaagcgcccagctctgcctgagatcaagccagcccagccacctggccccgcccagatactccccccaggtttgaccccaggactcccctacccacaccagactccccagggcctgatgccctatggtcagccccggcccccgatcttgggctatggagctggtgctgtccgccctgcagtccccacaggaggccctccatacccccatgccccgtatggtgctggtcgagggaactatgatgccttccgaggccagggaggttatcctgggaaacctcgcaacaggatggttcgtggagacccaagggccattgtggaatatcgggacctggatgccccagacgatgttgatttcttttgagccgtcccccgttcctcagtcctgtatcatccatacttgtactaccttgtcctatgaagctctgagaattttttgtacgatcagccttactgctaataaaagcacttccacaggg

SEQ ID NO: 438550 - DNA, 3074 bp, Homo sapiens
tatatgctaggtacgaggctgggctgaaatcggccgaggcgcaggcgcagcgcgggctgcgcgcgctactgcccatccccggttgtcccacttttgttcgcctctcttcggccctctactcaagagctccgtctccgtctcgccctcctcgaagtcctcgtcgcgcgcccgcgacccaggtcgccctgaaatctagcccgtccgagcgcgagtccaacggccgcggccgcaccaaggccccctcagaccgtgccatgggtgacagtgatgacgagtacgatcgaaggcgcagggacaagttcagaagagagcgcagcgactacgaccgttcccgcgagagagatgaaagacgtcgaggggacgattggaatgacagagacagggtctccctctgtcacccgggctgagtgcactggtgcagtcgaagcttgctgcagccgcgacctgcccagagtgggaccgtggccgtgagcgccgtagtcggggtgaatatcgggactatgaccggaatcggcgagagcgcttctcgccacctcgccacgaactcagcccgccacagaagcgcatgaggagagactgggatgagcacagctctgacccataccacagtggctatgagatgccctatgctggggggggtgggggcccaacttatggcccccctcagccctggggccaccctgacgtccacatcatgcagcaccatgtcctgcctatccaggccaggctgggcagcattgcagagattgacctgggtgtgccgccgcccgtgatgaagaccttcaaggagtttctcctctccctggatgactcggtggatgagacggaggccgtcaagcgctataatgactacaagctggatttccggaggcaacagatgcaggatttcttcctggcgcacaaagatgaggagtggtttcggtctaagtaccacccagatgaggtggggaagcgtcggcaggaggcccggggggccctgcaaaaccgactgagggtcttcctgtccctcatggagactggctggtttgataaccttctcctggacatagacaaagctgatgccattgtcaagatgctggatgcagccgtgattaagatggaaggaggcacggagaatgatcttcgcatcctggagcaggaggaggaggaggagcaggcaggaaagcctggggagcccagcaagaaagaagaaggacgggctggagcaggcctaggggacggggagcgcaaaaccaacgacaaggatgagaagaaggaagacggcaagcaggctgagaatgacagttctaatgatgacaaaacaaagaagtcggagggtgatggggacaaggaagagaagaaagaagactccgagaaggaagccaaaaagagtagcaagaagcggaaccggaagcacagtggtgacgacagctttgacgagggcagcgtgtcagagtctgagtcggagtcagagagcggccaggctgaggaggagaaggaggaggccgaagaagcgctcaaggagaaggagaagcccaaggaagaagaatgggagaagcccaaggacgccgcggggctggagtgcaagccgcggccgctgcataagacctgctccctcttcatgcgcaacatcgcgcccaacatctcccgggccgagatcatctccctttgtaaaaggtacccaggctttatgcgggtggcgctctcagagccccagccagagaggaggtttttccgtcgtggctgggtgaccttcgaccgcagtgttaacattaaagagatctgttggaacctgcagaacatccgtctccgggagtgtgagctgagccctggtgtgaacagggacctgacccggcgcgttcgcaacatcaacggcatcacccagcacaagcagattgtgcgcaacgacatcaagctggcggccaagctgatccacacgctggatgacaggacacagctttgggcctcagaaccagggacgcctcccctgcccacgagcctgccctcgcaaaacccgatcttgaagaatatcaccgactacctgatcgaggaagtaagcgccgaggaggaggagctgctggggagcagcgggggcgctcctcctgaggagcctcctaaggaagggaacccggcagagatcaacgtggagcgggatgagaagttgattaaggtcttggacaagctcctcctttacctgcgcatcgtgcattccttggattattacaacacctgtgagtaccccaacgaggacgagatgcccaatcgctgtgggatcatccacgttcgggggcccatgccacccaaccgcatcagtcacggggaagtgctggagtggcagaagacttttgaggagaagctcacgccgttgctgagtgtgcgggagtcactctcagaggaagaggcccagaagatggggcgcaaagacccagagcaggaagtggagaagttcgtcacctccaacacgcaggaactgggcaaggataagtggctgtgtcctctcagtggcaagaaattcaagggtcctgagtttgtgcgcaaacatatcttcaacaagcatgcagagaaaattgaggaagtgaaaaaggaagtcgcgttttttaacaacttcctcactgatgctaagcgcccagctctgcctgagatcaagccagcccagccacctggccccgcccagatactccccccaggtttgaccccaggactcccctacccacaccagactccccagggcctgatgccctatggtcagccccggcccccgatcttgggctatggagctggtgctgtccgccctgcagtccccacaggaggccctccatacccccatgccccgtatggtgctggtcgagggaactatgatgccttccgaggccagggaggttatcctgggaaacctcgcaacaggatggttcgtggagacccaagggccattgtggaatatcgggacctggatgccccagacgatgttgatttcttttgagccgtcccccgttcctcagtcctgtatcatccatacttgtactaccttgtcctatgaagctctgagaattttttgtacgatcagccttactgctaataaaagcacttccacaggg

SEQ ID NO: 438551 - DNA, 2398 bp, Homo sapiens
cccggagggggcccgggtcccaggtcgctatcaggacccgagcaggccaggctgggcagcattgcagagattgacctgggtgtgccgccgcccgtgatgaagaccttcaaggagtttctcctctccctggatgactcggtggatgagacggaggccgtcaagcgctataatgactacaagctggatttccggaggcaacagatgcaggatttcttcctggcgcacaaagatgaggagtggtttcggtctaagtaccacccagatgaggtggggaagcgtcggcaggaggcccggggggccctgcaaaaccgactgagggtcttcctgtccctcatggagactggctggtttgataaccttctcctggacatagacaaagctgatgccattgtcaagatgctggatgcagccgtgattaagatggaaggaggcacggagaatgatcttcgcatcctggagcaggaggaggaggaggagcaggcaggaaagcctggggagcccagcaagaaagaagaaggacgggctggagcaggcctaggggacggggagcgcaaaaccaacgacaaggatgagaagaaggaagacggcaagcaggctgagaatgacagttctaatgatgacaaaacaaagaagtcggagggtgatggggacaaggaagagaagaaagaagactccgagaaggaagccaaaaagagtagcaagaagcggaaccggaagcacagtggtgacgacagctttgacgagggcagcgtgtcagagtctgagtcggagtcagagagcggccaggctgaggaggagaaggaggaggccgaagaagcgctcaaggagaaggagaagcccaaggaagaagaatgggagaagcccaaggacgccgcggggctggagtgcaagccgcggccgctgcataagacctgctccctcttcatgcgcaacatcgcgcccaacatctcccgggccgagatcatctccctttgtaaaaggtacccaggctttatgcgggtggcgctctcagagccccagccagagaggaggtttttccgtcgtggctgggtgaccttcgaccgcagtgttaacattaaagagatctgttggaacctgcagaacatccgtctccgggagtgtgagctgagccctggtgtgaacagggacctgacccggcgcgttcgcaacatcaacggcatcacccagcacaagcagattgtgcgcaacgacatcaagctggcggccaagctgatccacacgctggatgacaggacacagctttgggcctcagaaccagggacgcctcccctgcccacgagcctgccctcgcaaaacccgatcttgaagaatatcaccgactacctgatcgaggaagtaagcgccgaggaggaggagctgctggggagcagcgggggcgctcctcctgaggagcctcctaaggaagggaacccggcagagatcaacgtggagcgggatgagaagttgattaaggtcttggacaagctcctcctttacctgcgcatcgtgcattccttggattattacaacacctgtgagtaccccaacgaggacgagatgcccaatcgctgtgggatcatccacgttcgggggcccatgccacccaaccgcatcagtcacggggaagtgctggagtggcagaagacttttgaggagaagctcacgccgttgctgagtgtgcgggagtcactctcagaggaagaggcccagaagatggggcgcaaagacccagagcaggaagtggagaagttcgtcacctccaacacgcaggaactgggcaaggataagtggctgtgtcctctcagtggcaagaaattcaagggtcctgagtttgtgcgcaaacatatcttcaacaagcatgcagagaaaattgaggaagtgaaaaaggaagtcgcgttttttaacaacttcctcactgatgctaagcgcccagctctgcctgagatcaagccagcccagccacctggccccgcccagatactccccccaggtttgaccccaggactcccctacccacaccagactccccagggcctgatgccctatggtcagccccggcccccgatcttgggctatggagctggtgctgtccgccctgcagtccccacaggaggccctccatacccccatgccccgtatggtgctggtcgagggaactatgatgccttccgaggccagggaggttatcctgggaaacctcgcaacaggatggttcgtggagacccaagggccattgtggaatatcgggacctggatgccccagacgatgttgatttcttttgagccgtcccccgttcctcagtcctgtatcatccatacttgtactaccttgtcctatgaagctctgagaattttttgtacgatcagccttactgctaataaaagcacttccacaggg

SEQ ID NO: 438552 - DNA, 2254 bp, Homo sapiens
ttctccgtgcctccttccatcttaatcacggctgcatccagcatcttgacaatggcatctgttttgtctttccctcccccgcttcgttcccaggtgtttcggtctaagtaccacccagatgaggtggggaagcgtcggcaggaggcccggggggccctgcaaaaccgactgagggtcttcctgtccctcatggagactggctggtttgataaccttctcctggacatagacaaagctgatgccattgtcaagatgctggatgcagccgtgattaagatggaaggaggcacggagaatgatcttcgcatcctggagcaggaggaggaggaggagcaggcaggaaagcctggggagcccagcaagaaagaagaaggacgggctggagcaggcctaggggacggggagcgcaaaaccaacgacaaggatgagaagaaggaagacggcaagcaggctgagaatgacagttctaatgatgacaaaacaaagaagtcggagggtgatggggacaaggaagagaagaaagaagactccgagaaggaagccaaaaagagtagcaagaagcggaaccggaagcacagtggtgacgacagctttgacgagggcagcgtgtcagagtctgagtcggagtcagagagcggccaggctgaggaggagaaggaggaggccgaagaagcgctcaaggagaaggagaagcccaaggaagaagaatgggagaagcccaaggacgccgcggggctggagtgcaagccgcggccgctgcataagacctgctccctcttcatgcgcaacatcgcgcccaacatctcccgggccgagatcatctccctttgtaaaaggtacccaggctttatgcgggtggcgctctcagagccccagccagagaggaggtttttccgtcgtggctgggtgaccttcgaccgcagtgttaacattaaagagatctgttggaacctgcagaacatccgtctccgggagtgtgagctgagccctggtgtgaacagggacctgacccggcgcgttcgcaacatcaacggcatcacccagcacaagcagattgtgcgcaacgacatcaagctggcggccaagctgatccacacgctggatgacaggacacagctttgggcctcagaaccagggacgcctcccctgcccacgagcctgccctcgcaaaacccgatcttgaagaatatcaccgactacctgatcgaggaagtaagcgccgaggaggaggagctgctggggagcagcgggggcgctcctcctgaggagcctcctaaggaagggaacccggcagagatcaacgtggagcgggatgagaagttgattaaggtcttggacaagctcctcctttacctgcgcatcgtgcattccttggattattacaacacctgtgagtaccccaacgaggacgagatgcccaatcgctgtgggatcatccacgttcgggggcccatgccacccaaccgcatcagtcacggggaagtgctggagtggcagaagacttttgaggagaagctcacgccgttgctgagtgtgcgggagtcactctcagaggaagaggcccagaagatggggcgcaaagacccagagcaggaagtggagaagttcgtcacctccaacacgcaggaactgggcaaggataagtggctgtgtcctctcagtggcaagaaattcaagggtcctgagtttgtgcgcaaacatatcttcaacaagcatgcagagaaaattgaggaagtgaaaaaggaagtcgcgttttttaacaacttcctcactgatgctaagcgcccagctctgcctgagatcaagccagcccagccacctggccccgcccagatactccccccaggtttgaccccaggactcccctacccacaccagactccccagggcctgatgccctatggtcagccccggcccccgatcttgggctatggagctggtgctgtccgccctgcagtccccacaggaggccctccatacccccatgccccgtatggtgctggtcgagggaactatgatgccttccgaggccagggaggttatcctgggaaacctcgcaacaggatggttcgtggagacccaagggccattgtggaatatcgggacctggatgccccagacgatgttgatttcttttgagccgtcccccgttcctcagtcctgtatcatccatacttgtactaccttgtcctatgaagctctgagaattttttgtacgatcagccttactgctaataaaagcacttccacaggg

SEQ ID NO: 438553 - DNA, 2196 bp, Homo sapiens
tgcgggtctcttccttgacggcacaagatgaggagtggtttcggtctaagtaccacccagatgaggtggggaagcgtcggcaggaggcccggggggccctgcaaaaccgactgagggtcttcctgtccctcatggagactggctggtttgataaccttctcctggacatagacaaagctgatgccattgtcaagatgctggatgcagccgtgattaagatggaaggaggcacggagaatgatcttcgcatcctggagcaggaggaggaggaggagcaggcaggaaagcctggggagcccagcaagaaagaagaaggacgggctggagcaggcctaggggacggggagcgcaaaaccaacgacaaggatgagaagaaggaagacggcaagcaggctgagaatgacagttctaatgatgacaaaacaaagaagtcggagggtgatggggacaaggaagagaagaaagaagactccgagaaggaagccaaaaagagtagcaagaagcggaaccggaagcacagtggtgacgacagctttgacgagggcagcgtgtcagagtctgagtcggagtcagagagcggccaggctgaggaggagaaggaggaggccgaagaagcgctcaaggagaaggagaagcccaaggaagaagaatgggagaagcccaaggacgccgcggggctggagtgcaagccgcggccgctgcataagacctgctccctcttcatgcgcaacatcgcgcccaacatctcccgggccgagatcatctccctttgtaaaaggtacccaggctttatgcgggtggcgctctcagagccccagccagagaggaggtttttccgtcgtggctgggtgaccttcgaccgcagtgttaacattaaagagatctgttggaacctgcagaacatccgtctccgggagtgtgagctgagccctggtgtgaacagggacctgacccggcgcgttcgcaacatcaacggcatcacccagcacaagcagattgtgcgcaacgacatcaagctggcggccaagctgatccacacgctggatgacaggacacagctttgggcctcagaaccagggacgcctcccctgcccacgagcctgccctcgcaaaacccgatcttgaagaatatcaccgactacctgatcgaggaagtaagcgccgaggaggaggagctgctggggagcagcgggggcgctcctcctgaggagcctcctaaggaagggaacccggcagagatcaacgtggagcgggatgagaagttgattaaggtcttggacaagctcctcctttacctgcgcatcgtgcattccttggattattacaacacctgtgagtaccccaacgaggacgagatgcccaatcgctgtgggatcatccacgttcgggggcccatgccacccaaccgcatcagtcacggggaagtgctggagtggcagaagacttttgaggagaagctcacgccgttgctgagtgtgcgggagtcactctcagaggaagaggcccagaagatggggcgcaaagacccagagcaggaagtggagaagttcgtcacctccaacacgcaggaactgggcaaggataagtggctgtgtcctctcagtggcaagaaattcaagggtcctgagtttgtgcgcaaacatatcttcaacaagcatgcagagaaaattgaggaagtgaaaaaggaagtcgcgttttttaacaacttcctcactgatgctaagcgcccagctctgcctgagatcaagccagcccagccacctggccccgcccagatactccccccaggtttgaccccaggactcccctacccacaccagactccccagggcctgatgccctatggtcagccccggcccccgatcttgggctatggagctggtgctgtccgccctgcagtccccacaggaggccctccatacccccatgccccgtatggtgctggtcgagggaactatgatgccttccgaggccagggaggttatcctgggaaacctcgcaacaggatggttcgtggagacccaagggccattgtggaatatcgggacctggatgccccagacgatgttgatttcttttgagccgtcccccgttcctcagtcctgtatcatccatacttgtactaccttgtcctatgaagctctgagaattttttgtacgatcagccttactgctaataaaagcacttccacaggg

SEQ ID NO: 438554 - DNA, 2020 bp, Homo sapiens
cagaaacagacctccagaccccatcaccacccagcaggaaatcccaaccacacgtcttagcctcaatcacccctcagagaaaacatgccccccagaccactggcccacatccttggcctcccagacctgagcaagccaggcctggcttgctcaggcctaggggacggggagcgcaaaaccaacgacaaggatgagaagaaggaagacggcaagcaggctgagaatgacagttctaatgatgacaaaacaaagaagtcggagggtgatggggacaaggaagagaagaaagaagactccgagaaggaagccaaaaagagtagcaagaagcggaaccggaagcacagtggtgacgacagctttgacgagggcagcgtgtcagagtctgagtcggagtcagagagcggccaggctgaggaggagaaggaggaggccgaagaagcgctcaaggagaaggagaagcccaaggaagaagaatgggagaagcccaaggacgccgcggggctggagtgcaagccgcggccgctgcataagacctgctccctcttcatgcgcaacatcgcgcccaacatctcccgggccgagatcatctccctttgtaaaaggtacccaggctttatgcgggtggcgctctcagagccccagccagagaggaggtttttccgtcgtggctgggtgaccttcgaccgcagtgttaacattaaagagatctgttggaacctgcagaacatccgtctccgggagtgtgagctgagccctggtgtgaacagggacctgacccggcgcgttcgcaacatcaacggcatcacccagcacaagcagattgtgcgcaacgacatcaagctggcggccaagctgatccacacgctggatgacaggacacagctttgggcctcagaaccagggacgcctcccctgcccacgagcctgccctcgcaaaacccgatcttgaagaatatcaccgactacctgatcgaggaagtaagcgccgaggaggaggagctgctggggagcagcgggggcgctcctcctgaggagcctcctaaggaagggaacccggcagagatcaacgtggagcgggatgagaagttgattaaggtcttggacaagctcctcctttacctgcgcatcgtgcattccttggattattacaacacctgtgagtaccccaacgaggacgagatgcccaatcgctgtgggatcatccacgttcgggggcccatgccacccaaccgcatcagtcacggggaagtgctggagtggcagaagacttttgaggagaagctcacgccgttgctgagtgtgcgggagtcactctcagaggaagaggcccagaagatggggcgcaaagacccagagcaggaagtggagaagttcgtcacctccaacacgcaggaactgggcaaggataagtggctgtgtcctctcagtggcaagaaattcaagggtcctgagtttgtgcgcaaacatatcttcaacaagcatgcagagaaaattgaggaagtgaaaaaggaagtcgcgttttttaacaacttcctcactgatgctaagcgcccagctctgcctgagatcaagccagcccagccacctggccccgcccagatactccccccaggtttgaccccaggactcccctacccacaccagactccccagggcctgatgccctatggtcagccccggcccccgatcttgggctatggagctggtgctgtccgccctgcagtccccacaggaggccctccatacccccatgccccgtatggtgctggtcgagggaactatgatgccttccgaggccagggaggttatcctgggaaacctcgcaacaggatggttcgtggagacccaagggccattgtggaatatcgggacctggatgccccagacgatgttgatttcttttgagccgtcccccgttcctcagtcctgtatcatccatacttgtactaccttgtcctatgaagctctgagaattttttgtacgatcagccttactgctaataaaagcacttccacaggg

SEQ ID NO: 438555 - DNA, 3514 bp, Homo sapiens
tatatgctaggtacgaggctgggctgaaatcggccgaggcgcaggcgcagcgcgggctgcgcgcgctactgcccatccccggttgtcccacttttgttcgcctctcttcggccctctactcaagagctccgtctccgtctcgccctcctcgaagtcctcgtcgcgcgcccgcgacccaggtcgccctgaaatctagcccgtccgagcgcgagtccaacggccgcggccgcaccaaggccccctcagaccgtgccatgggtgacagtgatgacgagtacgatcgaaggcgcagggacaagttcagaagagagcgcagcgactacgaccgttcccgcgagagagatgaaagacgtcgaggggacgattggaatgacagagagtgggaccgtggccgtgagcgccgtagtcggggtgaatatcgggactatgaccggaatcggcgagagcgcttctcgccacctcgccacgaactcagcccgccacagaagcgcatgaggagagactgggatgagcacagctctgacccataccacagtggctatgagatgccctatgctggggggggtgggggcccaacttatggcccccctcagccctggggccaccctgacgtccacatcatgcagcaccatgtcctgcctatccaggccaggctgggcagcattgcagagattgacctgggtgtgccgccgcccgtgatgaagaccttcaaggagtttctcctctccctggatgactcggtggatgagacggaggccgtcaagcgctataatgactacaagctggatttccggaggcaacagatgcaggatttcttcctggcgcacaaagatgaggagtggtttcggtctaagtaccacccagatgaggtggggaagcgtcggcaggaggcccggggggccctgcaaaaccgactgagggtcttcctgtccctcatggagactggctggtttgataaccttctcctggacatagacaaagctgatgccattgtcaagatgctggatgcagccgtgattaagatggaaggaggcacggagaatgatcttcgcatcctggagcaggaggaggaggaggagcaggcaggaaagcctggggagcccagcaagaaagaagaaggacgggctggagcaggcctaggggacggggagcgcaaaaccaacgacaaggatgagaagaaggaagacggcaagcaggctgagaatgacagttctaatgatgacaaaacaaagaagtcggagggtgatggggacaaggaagagaagaaagaagactccgagaaggaagccaaaaagagtagcaagaagcggaaccggaagcacagtggtgacgacagctttgacgagggcagcgtgtcagagtctgagtcggagtcagagagcggccaggctgaggaggagaaggaggaggccgaagaagcgctcaaggagaaggagaagcccaaggaagaagaatgggagaagcccaaggacgccgcggggctggagtgcaagccgcggccgctgcataagacctgctccctcttcatgcgcaacatcgcgcccaacatctcccgggccgagatcatctccctttgtaaaaggtacccaggctttatgcgggtggcgctctcagagccccagccagagaggaggtttttccgtcgtggctgggtgaccttcgaccgcagtgttaacattaaagagatctgttggaacctgcagaacatccgtctccgggagtgtgagctgagccctggtgtgaacagggacctgacccggcgcgttcgcaacatcaacggcatcacccagcacaagcagattgtgcgcaacgacatcaagctggcggccaagctgatccacacgctggatgacaggacacagctttgggcctcagaaccagggacgcctcccctgcccacgagcctgccctcgcaaaacccgatcttgaagaatatcaccgactacctgatcgaggaagtaagcgccgaggaggaggagctgctggggagcagcgggggcgctcctcctgaggagcctcctaaggaagggaacccggcagagatcaacgtggagcgggatgagaagttgattaaggtcttggacaagctcctcctttacctgcgcatcgtgcattccttggattattacaacacctgtgagtaccccaacgaggacgagatgcccaatcgctgtgggatcatccacgttcgggggcccatgccacccaaccgcatcagtcacggggaagtgctggagtggcagaagacttttgaggagaagctcacgccgttgctgagtgtgcgggagtcactctcagaggaagaggcccagaagatggggcgcaaagacccagagcaggaagtggagaagttcgtcacctccaacacgcaggaactgggcaaggataagtggctgtgtcctctcagtggcaagaaattcaagggtcctgagtttgtgcgcaaacatatcttcaacaagcatgcagagaaaattgaggaagtgaaaaaggaagtcgcgttttttaacaacttcctcactgatgctaagcgcccagctctgcctgagatcaagccagcccagccacctggccccgcccagatactccccccaggtttgaccccaggactcccctacccacaccagactccccagggcctgatgccctatggtcagccccggcccccgatcttgggctatggagctggtgctgtccgccctgcagtccccacaggaggccctccatacccccatgccccgtatggtgctggtcgagggaactatgatgccttccgaggccagggaggttatcctgggaaacctcgcaacaggatggttcgtggagacccaagggccattgtggaatatcgggacctggatgccccagacgatgttgatttcttttgagccgtcccccgttcctcagtcctgtatcatccatacttgtactaccttgtcctatgaagctctgagaattttttgtacgatcagccttactgctaataaaagcacttccacagggaaaaaaaaaaaaaaaaaaaaacaaaaaaaaaaaaaaaaaaaaaaaaaaaataaaaaaaaaaaaaataaaaggataaaaaaaaaaaaaataaaaaatccatgggccgtgttttaaaaacgtggtaatgggaaaacccttgggttaacccaattatatcgctttgaaacaaatcccctttttgcaattgggtttattacgaaaagggccctaaccgttgggcctttcacaaattttgcaacctgtaagggtaatgggcaaatttaagggttaatttttgtgtaaaatcccgttaaattttgtgaaaaaccttttttttaaccaatggcgcaaatgggcaatcctttttaaacaaaggattccccgaataggttaggttgtccttttgaaaaaggtccttttaaaacgggcctacactaaaggggaaaactttttagggatggccctttgaacatcccttagtttttgggcgggccctcttagtgaccctaaggcgcccttttaattttgggggccc

SEQ ID NO: 438556 - DNA, 1748 bp, Homo sapiens
gatagctggtcctacattagaagagacgagatggaagccaaaaagtagcaagaagcggaaccggaagcacagtggtgacgacagctttgacgagggcagcgtgtcagagtctgagtcggagtcagagagcggccaggctgaggaggagaaggaggaggccgaagaagcgctcaaggagaaggagaagcccaaggaagaagaatgggagaagcccaaggacgccgcggggctggagtgcaagccgcggccgctgcataagacctgctccctcttcatgcgcaacatcgcgcccaacatctcccgggccgagatcatctccctttgtaaaaggtacccaggctttatgcgggtggcgctctcagagccccagccagagaggaggtttttccgtcgtggctgggtgaccttcgaccgcagtgttaacattaaagagatctgttggaacctgcagaacatccgtctccgggagtgtgagctgagccctggtgtgaacagggacctgacccggcgcgttcgcaacatcaacggcatcacccagcacaagcagattgtgcgcaacgacatcaagctggcggccaagctgatccacacgctggatgacaggacacagctttgggcctcagaaccagggacgcctcccctgcccacgagcctgccctcgcaaaacccgatcttgaagaatatcaccgactacctgatcgaggaagtaagcgccgaggaggaggagctgctggggagcagcgggggcgctcctcctgaggagcctcctaaggaagggaacccggcagagatcaacgtggagcgggatgagaagttgattaaggtcttggacaagctcctcctttacctgcgcatcgtgcattccttggattattacaacacctgtgagtaccccaacgaggacgagatgcccaatcgctgtgggatcatccacgttcgggggcccatgccacccaaccgcatcagtcacggggaagtgctggagtggcagaagacttttgaggagaagctcacgccgttgctgagtgtgcgggagtcactctcagaggaagaggcccagaagatggggcgcaaagacccagagcaggaagtggagaagttcgtcacctccaacacgcaggaactgggcaaggataagtggctgtgtcctctcagtggcaagaaattcaagggtcctgagtttgtgcgcaaacatatcttcaacaagcatgcagagaaaattgaggaagtgaaaaaggaagtcgcgttttttaacaacttcctcactgatgctaagcgcccagctctgcctgagatcaagccagcccagccacctggccccgcccagatactccccccaggtttgaccccaggactcccctacccacaccagactccccagggcctgatgccctatggtcagccccggcccccgatcttgggctatggagctggtgctgtccgccctgcagtccccacaggaggccctccatacccccatgccccgtatggtgctggtcgagggaactatgatgccttccgaggccagggaggttatcctgggaaacctcgcaacaggatggttcgtggagacccaagggccattgtggaatatcgggacctggatgccccagacgatgttgatttcttttgagccgtcccccgttcctcagtcctgtatcatccatacttgtactaccttgtcctatgaagctctgagaattttttgtacgatcagccttactgctaataaaagcacttccacaggg

SEQ ID NO: 438557 - DNA, 1622 bp, Homo sapiens
ccgtcatgagaagagacgagatgtgagacattcattgtcacggagcgaggagacaaaggcaagttcaagttgagaatgggagaagcccaaggacgccgcggggctggagtgcaagccgcggccgctgcataagacctgctccctcttcatgcgcaacatcgcgcccaacatctcccgggccgagatcatctccctttgtaaaaggtacccaggctttatgcgggtggcgctctcagagccccagccagagaggaggtttttccgtcgtggctgggtgaccttcgaccgcagtgttaacattaaagagatctgttggaacctgcagaacatccgtctccgggagtgtgagctgagccctggtgtgaacagggacctgacccggcgcgttcgcaacatcaacggcatcacccagcacaagcagattgtgcgcaacgacatcaagctggcggccaagctgatccacacgctggatgacaggacacagctttgggcctcagaaccagggacgcctcccctgcccacgagcctgccctcgcaaaacccgatcttgaagaatatcaccgactacctgatcgaggaagtaagcgccgaggaggaggagctgctggggagcagcgggggcgctcctcctgaggagcctcctaaggaagggaacccggcagagatcaacgtggagcgggatgagaagttgattaaggtcttggacaagctcctcctttacctgcgcatcgtgcattccttggattattacaacacctgtgagtaccccaacgaggacgagatgcccaatcgctgtgggatcatccacgttcgggggcccatgccacccaaccgcatcagtcacggggaagtgctggagtggcagaagacttttgaggagaagctcacgccgttgctgagtgtgcgggagtcactctcagaggaagaggcccagaagatggggcgcaaagacccagagcaggaagtggagaagttcgtcacctccaacacgcaggaactgggcaaggataagtggctgtgtcctctcagtggcaagaaattcaagggtcctgagtttgtgcgcaaacatatcttcaacaagcatgcagagaaaattgaggaagtgaaaaaggaagtcgcgttttttaacaacttcctcactgatgctaagcgcccagctctgcctgagatcaagccagcccagccacctggccccgcccagatactccccccaggtttgaccccaggactcccctacccacaccagactccccagggcctgatgccctatggtcagccccggcccccgatcttgggctatggagctggtgctgtccgccctgcagtccccacaggaggccctccatacccccatgccccgtatggtgctggtcgagggaactatgatgccttccgaggccagggaggttatcctgggaaacctcgcaacaggatggttcgtggagacccaagggccattgtggaatatcgggacctggatgccccagacgatgttgatttcttttgagccgtcccccgttcctcagtcctgtatcatccatacttgtactaccttgtcctatgaagctctgagaattttttgtacgatcagccttactgctaataaaagcacttccacaggg

SEQ ID NO: 438558 - DNA, 3100 bp, Homo sapiens
tatatgctaggtacgaggctgggctgaaatcggccgaggcgcaggcgcagcgcgggctgcgcgcgctactgcccatccccggttgtcccacttttgttcgcctctcttcggccctctactcaagagctccgtctccgtctcgccctcctcgaagtcctcgtcgcgcgcccgcgacccaggtcgccctgaaatctagcccgtccgagcgcgagtccaacggccgcggccgcaccaaggccccctcagaccgtgccatgggtgacagtgatgacgagtacgatcgaaggcgcagggacaagttcagaagagagcgcagcgactacgaccgttcccgcgagagagatgaaagacgtcgaggggacgattggaatgacagagagtgggaccgtggccgtgagcgccgtagtcggggtgaatatcgggactatgaccggaatcggcgagagcgcttctcgccacctcgccacgaactcagcccgccacagaagcgcatgaggagagactgggatgagcacagctctgacccataccacagtggctatgagatgccctatgctggggggggtgggggcccaacttatggcccccctcagccctggggccaccctgacgtccacatcatgcagcaccatgtcctgcctatccaggccaggctgggcagcattgcagagattgacctgggtgtgccgccgcccgtgatgaagaccttcaaggagtttctcctctccctggatgactcggtggatgagacggaggccgtcaagcgctataatgactacaagctggatttccggaggcaacagatgcaggatttcttcctggcgcacaaagatgaggagtggtttcggtctaagtaccacccagatgaggtggggaagcgtcggcaggaggcccggggggccctgcaaaaccgactgagggtcttcctgtccctcatggagactggctggtttgataaccttctcctggacatagacaaagctgatgccattgtcaagatgctggatgcagccgtgattaagatggaaggaggcacggagaatgatcttcgcatcctggagcaggaggaggaggaggagcaggcaggaaagcctggggagcccagcaagaaagaagaaggacgggctggagcaggcctaggggacggggagcgcaaaaccaacgacaaggatgagaagaaggaagacggcaagcaggctgagaatgacagttctaatgatgacaaaacaaagaagtcggagggtgatggggacaaggaagagaagaaagaagactccgagaaggaagccaaaaagagtagcaagaagcggaaccggaagcacagtggtgacgacagctttgacgagggcagcgtgtcagagtctgagtcggagtcagagagcggccaggctgaggaggagaaggaggaggccgaagaagcgctcaaggagaaggagaagcccaaggaagaagaatgggagaagcccaaggacgccgcggggctggagtgcaagccgcggccgctgcataagacctgctccctcttcatgcgcaacatcgcgcccaacatctcccgggccgagatcatctccctttgtaaaaggtacccaggctttatgcgggtggcgctctcagagccccagccagagaggaggtgagtaactcggtgcgttggagggaaaagtgcaggggaacgttaatggccaacaccaactccctcgcttgactatgctaacattttctttcttgtgtaggtttttccgtcgtggctgggtgaccttcgaccgcagtgttaacattaaagagatctgttggaacctgcagaacatccgtctccgggagtgtgagctgagccctggtgtgaacagggacctgacccggcgcgttcgcaacatcaacggcatcacccagcacaagcagattgtgcgcaacgacatcaagctggcggccaagctgatccacacgctggatgacaggacacagctttgggcctcagaaccagggacgcctcccctgcccacgagcctgccctcgcaaaacccgatcttgaagaatatcaccgactacctgatcgaggaagtaagcgccgaggaggaggagctgctggggagcagcgggggcgctcctcctgaggagcctcctaaggaagggaacccggcagagatcaacgtggagcgggatgagaagttgattaaggtcttggacaagctcctcctttacctgcgcatcgtgcattccttggattattacaacacctgtgagtaccccaacgaggacgagatgcccaatcgctgtgggatcatccacgttcgggggcccatgccacccaaccgcatcagtcacggggaagtgctggagtggcagaagacttttgaggagaagctcacgccgttgctgagtgtgcgggagtcactctcagaggaagaggcccagaagatggggcgcaaagacccagagcaggaagtggagaagttcgtcacctccaacacgcaggaactgggcaaggataagtggctgtgtcctctcagtggcaagaaattcaagggtcctgagtttgtgcgcaaacatatcttcaacaagcatgcagagaaaattgaggaagtgaaaaaggaagtcgcgttttttaacaacttcctcactgatgctaagcgcccagctctgcctgagatcaagccagcccagccacctggccccgcccagatactccccccaggtttgaccccaggactcccctacccacaccagactccccagggcctgatgccctatggtcagccccggcccccgatcttgggctatggagctggtgctgtccgccctgcagtccccacaggaggccctccatacccccatgccccgtatggtgctggtcgagggaactatgatgccttccgaggccagggaggttatcctgggaaacctcgcaacaggatggttcgtggagacccaagggccattgtggaatatcgggacctggatgccccagacgatgttgatttcttttgagccgtcccccgttcctcagtcctgtatcatccatacttgtactaccttgtcctatgaagctctgagaattttttgtacgatcagccttactgctaataaaagcacttccacaggg

SEQ ID NO: 438559 - DNA, 3089 bp, Homo sapiens
tatatgctaggtacgaggctgggctgaaatcggccgaggcgcaggcgcagcgcgggctgcgcgcgctactgcccatccccggttgtcccacttttgttcgcctctcttcggccctctactcaagagctccgtctccgtctcgccctcctcgaagtcctcgtcgcgcgcccgcgacccaggtcgccctgaaatctagcccgtccgagcgcgagtccaacggccgcggccgcaccaaggccccctcagaccgtgccatgggtgacagtgatgacgagtacgatcgaaggcgcagggacaagttcagaagagagcgcagcgactacgaccgttcccgcgagagagatgaaagacgtcgaggggacgattggaatgacagagagtgggaccgtggccgtgagcgccgtagtcggggtgaatatcgggactatgaccggaatcggcgagagcgcttctcgccacctcgccacgaactcagcccgccacagaagcgcatgaggagagactgggatgagcacagctctgacccataccacagtggctatgagatgccctatgctggggggggtgggggcccaacttatggcccccctcagccctggggccaccctgacgtccacatcatgcagcaccatgtcctgcctatccaggccaggctgggcagcattgcagagattgacctgggtgtgccgccgcccgtgatgaagaccttcaaggagtttctcctctccctggatgactcggtggatgagacggaggccgtcaagcgctataatgactacaagctggatttccggaggcaacagatgcaggatttcttcctggcgcacaaagatgaggagtggtttcggtctaagtaccacccagatgaggtggggaagcgtcggcaggaggcccggggggccctgcaaaaccgactgagggtcttcctgtccctcatggagactggctggtttgataaccttctcctggacatagacaaagctgatgccattgtcaagatgctggatgcagccgtgattaagatggaaggaggcacggagaatgatcttcgcatcctggagcaggaggaggaggaggagcaggcaggaaagcctggggagcccagcaagaaagaagaaggacgggctggagcaggcctaggggacggggagcgcaaaaccaacgacaaggatgagaagaaggaagacggcaagcaggctgagaatgacagttctaatgatgacaaaacaaagaagtcggagggtgatggggacaaggaagagaagaaagaagactccgagaaggaagccaaaaagagtagcaagaagcggaaccggaagcacagtggtgacgacagctttgacgagggcagcgtgtcagagtctgagtcggagtcagagagcggccaggctgaggaggagaaggaggaggccgaagaagcgctcaaggagaaggagaagcccaaggaagaagaatgggagaagcccaaggacgccgcggggctggagtgcaagccgcggccgctgcataagacctgctccctcttcatgcgcaacatcgcgcccaacatctcccgggccgagatcatctccctttgtaaaaggtacccaggctttatgcgggtggcgctctcagagccccagccagagaggaggtttttccgtcgtggctgggtgaccttcgaccgcagtgttaacattaaagagatctgttggaacctgcagaacatccgtctccgggagtgtgagctgagccctggtgtgaacagggacctgacccggcgcgttcgcaacatcaacggcatcacccagcacaagcagattgtgcgcaacgacatcaagctggcggccaagctgatccacacgctggatgacaggacacagctttgggcctcagaaccagggacgcctcccctgcccacgagcctgccctcgcaaaacccgatcttgaagaatatcaccgactacctgatcgaggaagtaagcgccgaggaggaggagctgctggggagcagcgggggcgctcctcctgaggagcctcctaaggaagggaacccggcagagatcaacgtggagcgggatgagaagttgattaaggtcttggacaagctcctcctttacctgcgcatcgtgcattccttggattattacaacacctgtgagtaccccaacgaggacgagatgcccaatcgctgtgggatcatccacgttcgggggcccatgccacccaaccgcatcagtcacggggaagtgctggagtggcagaagacttttgaggagaagctcacgccgttgctgagtgtgcgggagtcactctcagaggaagaggcccagaagatggggcgcaaagacccagagcaggaagtggagaagttcgtcacctccaacacgcaggaactgggcaaggataagtggctgtgtcctctcagtggcaagaaattcaagggtcctgagtttgtgcgcaaacatatcttcaacaagcatgcagagaaaattgaggaagtgaaaaaggaagtcgcgttttttaacaacttcctcactgatgctaagcgcccagctctgcctgagatcaagccagcccagccacctggccccgcccagatactccccccaggtttgaccccaggactcccctacccacaccagactccccagggcctgatgccctatggtcagccccggcccccgatcttgggctatggagctggtgctgtccgccctgcagtccccacaggaggccctccatacccccatgccccgtatggtgctggtcgagggaactatgatgccttccgaggccagggaggttatcctgggaaacctcgcaacaggtgaggagggcagacgcccaagctttgttgccgcctgcagactcccttttgggagccctcagctctcatcctgtacctctcacctcacagatggttcgtggagacccaagggccattgtggaatatcgggacctggatgccccagacgatgttgatttcttttgagccgtcccccgttcctcagtcctgtatcatccatacttgtactaccttgtcctatgaagctctgagaattttttgtacgatcagccttactgctaataaaagcacttccacaggg

SEQ ID NO: 438560 - DNA, 3112 bp, Homo sapiens
tatatgctaggtacgaggctgggctgaaatcggccgaggcgcaggcgcagcgcgggctgcgcgcgctactgcccatccccggttgtcccacttttgttcgcctctcttcggccctctactcaagagctccgtctccgtctcgccctcctcgaagtcctcgtcgcgcgcccgcgacccaggtcgccctgaaatctagcccgtccgagcgcgagtccaacggccgcggccgcaccaaggccccctcagaccgtgccatgggtgacagtgatgacgagtacgatcgaaggcgcagggacaagttcagaagagagcgcagcgactacgaccgttcccgcgagagagatgaaagacgtcgaggggacgattggaatgacagagagtgggaccgtggccgtgagcgccgtagtcggggtgaatatcgggactatgaccggaatcggcgagagcgcttctcgccacctcgccacgaactcagcccgccacagaagcgcatgaggagagactgggatgagcacagctctgacccataccacagtggctatgagatgccctatgctggggggggtgggggcccaacttatggcccccctcagccctggggccaccctgacgtccacatcatgcagcaccatgtcctgcctatccaggccaggctgggcagcattgcagagattgacctgggtgtgccgccgcccgtgatgaagaccttcaaggagtttctcctctccctggatgactcggtggatgagacggaggccgtcaagcgctataatgactacaagctggatttccggaggcaacagatgcaggatttcttcctggcgcacaaagatgaggagtggtttcggtctaagtaccacccagatgaggtggggaagcgtcggcaggaggcccggggggccctgcaaaaccgactgagggtcttcctgtccctcatggagactggctggtttgataaccttctcctggacatagacaaagctgatgccattgtcaagatgctggatgcagccgtgattaagatggaaggaggcacggagaatgatcttcgcatcctggagcaggaggaggaggaggagcaggcaggaaagcctggggagcccagcaagaaagaagaaggacgggctggagcaggcctaggggacggggagcgcaaaaccaacgacaaggatgagaagaaggaagacggcaagcaggctgagaatgacagttctaatgatgacaaaacaaagaagtcggagggtgatggggacaaggaagagaagaaagaagactccgagaaggaagccaaaaagagtagcaagaagcggaaccggaagcacagtggtgacgacagctttgacgagggcagcgtgtcagagtctgagtcggagtcagagagcggccaggctgaggaggagaaggaggaggccgaagaagcgctcaaggagaaggagaagcccaaggaagaagaatgggagaagcccaaggacgccgcggggctggagtgcaagccgcggccgctgcataagacctgctccctcttcatgcgcaacatcgcgcccaacatctcccgggccgagatcatctccctttgtaaaaggtacccaggctttatgcgggtggcgctctcagagccccagccagagaggaggtttttccgtcgtggctgggtgaccttcgaccgcagtgttaacattaaagagatctgttggaacctgcagaacatccgtctccgggagtgtgagctgagccctggtgtgaacagggacctgacccggcgcgttcgcaacatcaacggcatcacccagcacaagcagattgtgcgcaacgacatcaagctggcggccaagctgatccacacgctggatgacaggacacagctttgggcctcagaaccagggacgcctcccctgcccacgagcctgccctcgcaaaacccgatcttgaagaatatcaccgactacctgatcgaggaagtaagcgccgaggaggaggagctgctggggagcagcgggggcgctcctcctgaggagcctcctaaggaagggaacccggcagagatcaacgtggagcgggatgagaagttgattaaggtcttggacaagctcctcctttacctgcgcatcgtgcattccttggattattacaacacctgtgagtaccccaacgaggacgagatgcccaatcgctgtgggatcatccacgttcgggggcccatgccacccaaccgcatcagtcacggggaagtgctggagtggcagaagacttttgaggagaagctcacgccgttgctgagtgtgcgggagtcactctcagaggaagaggcccagaagatggggcgcaaagacccagagcaggaagtggagaagttcgtcacctccaacacgcaggaactgggcaaggataagtggctgtgtcctctcagtggcaagaaattcaagggtcctgagtttgtgcgcaaacatatcttcaacaagcatgcagagaaaattgaggaagtgaaaaaggaagtcgcgttttttaacaacttcctcactgatgctaagcgcccagctctgcctgagatcaagccagcccagccacctggccccgcccagatactccccccaggtttgaccccaggactcccctacccacaccagactccccagggcctgatgccctatggtcagccccggcccccgatcttgggctatggaggtaagtacaggagggagatgaaggggcttggtgagtgtgtggctttgggagaagaaaacagaggatggaattgaggacatagttttgcaactcaacactgatctctgtcatactggtgctgtccgccctgcagtccccacaggaggccctccatacccccatgccccgtatggtgctggtcgagggaactatgatgccttccgaggccagggaggttatcctgggaaacctcgcaacaggatggttcgtggagacccaagggccattgtggaatatcgggacctggatgccccagacgatgttgatttcttttgagccgtcccccgttcctcagtcctgtatcatccatacttgtactaccttgtcctatgaagctctgagaattttttgtacgatcagccttactgctaataaaagcacttccacaggg

SEQ ID NO: 438561 - DNA, 2939 bp, Homo sapiens
tatatgctaggtacgaggctgggctgaaatcggccgaggcgcaggcgcagcgcgggctgcgcgcgctactgcccatccccggttgtcccacttttgttcgcctctcttcggccctctactcaagagctccgtctccgtctcgccctcctcgaagtcctcgtcgcgcgcccgcgacccaggtcgccctgaaatctagcccgtccgagcgcgagtccaacggccgcggccgcaccaaggccccctcagaccgtgccatgggtgacagtgatgacgagtacgatcgaaggcgcagggacaagttcagaagagagcgcagcgactacgaccgttcccgcgagagagatgaaagacgtcgaggggacgattggaatgacagagagtgggaccgtggccgtgagcgccgtagtcggggtgaatatcgggactatgaccggaatcggcgagagcgcttctcgccacctcgccacgaactcagcccgccacagaagcgcatgaggagagactgggatgagcacagctctgacccataccacagtggctatgagatgccctatgctggggggggtgggggcccaacttatggcccccctcagccctggggccaccctgacgtccacatcatgcagcaccatgtcctgcctatccaggccaggctgggcagcattgcagagattgacctgggtgtgccgccgcccgtgatgaagaccttcaaggagtttctcctctccctggatgactcggtggatgagacggaggccgtcaagcgctataatgactacaagctggatttccggaggcaacagatgcaggatttcttcctggcgcacaaagatgaggagtggtttcggtctaagtaccacccagatgaggtggggaagcgtcggcaggaggcccggggggccctgcaaaaccgactgagggtcttcctgtccctcatggagactggctggtttgataaccttctcctggacatagacaaagctgatgccattgtcaagatgctggatgcagccgtgattaagatggaaggaggcacggagaatgatcttcgcatcctggagcaggaggaggaggaggagcaggcaggaaagcctggggagcccagcaagaaagaagaaggacgggctggagcaggcctaggggacggggagcgcaaaaccaacgacaaggatgagaagaaggaagacggcaagcaggctgagaatgacagttctaatgatgacaaaacaaagaagtcggagggtgatggggacaaggaagagaagaaagaagactccgagaaggaagccaaaaagagtagcaagaagcggaaccggaagcacagtggtgacgacagctttgacgagggcagcgtgtcagagtctgagtcggagtcagagagcggccaggctgaggaggagaaggaggaggccgaagaagcgctcaaggagaaggagaagcccaaggaagaagaatgggagaagcccaaggacgccgcggggctggagtgcaagccgcggccgctgcataagacctgctccctcttcatgcgcaacatcgcgcccaacatctcccgggccgagatcatctccctttgtaaaaggtacccaggctttatgcgggtggcgctctcagagccccagccagagaggaggtttttccgtcgtggctgggtgaccttcgaccgcagtgttaacattaaagagatctgttggaacctgcagaacatccgtctccgggagtgtgagctgagccctggtgtgaacagggacctgacccggcgcgttcgcaacatcaacggcatcacccagcacaagcagattgtgcgcaacgacatcaagctggcggccaagctgatccacacgctggatgacaggacacagctttgggcctcagaaccagggacgcctcccctgcccacgagcctgccctcgcaaaacccgatcttgaagaatatcaccgactacctgatcgaggaagtaagcgccgaggaggaggagctgctggggagcagcgggggcgctcctcctgaggagcctcctaaggaagggaacccggcagagatcaacgtggagcgggatgagaagttgattaaggtcttggacaagctcctcctttacctgcgcatcgtgcattccttggattattacaacacctgtgagtaccccaacgaggacgagatgcccaatcgctgtgggatcatccacgttcgggggcccatgccacccaaccgcatcagtcacggggaagtgctggagtggcagaagacttttgaggagaagctcacgccgttgctgagtgtgcgggagtcactctcagaggaagaggcccagaagatggggcgcaaagacccagagcaggaagtggagaagttcgtcacctccaacacgcaggaactgggcaaggataagtggctgtgtcctctcagtggcaagaaattcaaggtcctgagtttgtgcgccatatcttcaacaagcatgcagagttgaggaagtgatgcctgagatcgccagcccagacacctgggcccggccagatactactccccccaggtttgaccccaggactcccctacccacaccagactccccagggcctgatgccctatggtcagccccggcccccgatcttgggctatggagctggtgctgtccgccctgcagtccccacaggaggccctccatacccccatgccccgtatggtgctggtcgagggaactatgatgccttccgaggccagggaggttatcctgggaaacctcgcaacaggatggttcgtggagacccaagggccattgtggaatatcgggacctggatgccccagacgatgttgatttcttttgagccgtcccccgttcctcagtcctgtatcatccatacttgtactaccttgtcctatgaagctctgagaattttttgtacgatcagccttactgctaataaaagcacttccacaggg

SEQ ID NO: 438562 - DNA, 2465 bp, Homo sapiens
  misc_feature (2437)..(2437): n is a, c, g, or t
  misc_feature (2454)..(2456): n is a, c, g, or t
  misc_feature (2460)..(2460): n is a, c, g, or t
tatatgctaggtacgaggctgggctgaaatcggccgaggcgcaggcgcagcgcgggctgcgcgcgctactgcccatccccggttgtcccacttttgttcgcctctcttcggccctctactcaagagctccgtctccgtctcgccctcctcgaagtcctcgtcgcgcgcccgcgacccaggtcgccctgaaatctagcccgtccgagcgcgagtccaacggccgcggccgcaccaaggccccctcagaccgtgccatgggtgacagtgatgacgagtacgatcgaaggcgcagggacaagttcagaagagagcgcagcgactacgaccgttcccgcgagagagatgaaagacgtcgaggggacgattggaatgacagagagtgggaccgtggccgtgagcgccgtagtcggggtgaatatcgggactatgaccggaatcggcgagagcgcttctcgccacctcgccacgaactcagcccgccacagaagcgcatgaggagagactgggatgagcacagctctgacccataccacagtggctatgagatgccctatgctggggggggtgggggcccaacttatggcccccctcagccctggggccaccctgacgtccacatcatgcagcaccatgtcctgcctatccaggccaggctgggcagcattgcagagattgacctgggtgtgccgccgcccgtgatgaagaccttcaaggagtttctcctctccctggatgactcggtggatgagacggaggccgtcaagcgctataatgactacaagctggatttccggaggcaacagatgcaggatttcttcctggcgcacaaagatgaggagtggtttcggtctaagtaccacccagatgaggtggggaagcgtcggcaggaggcccggggggccctgcaaaaccgactgagggtcttcctgtccctcatggagactggctggtttgataaccttctcctggacatagacaaagctgatgccattgtcaagatgctggatgcagccgtgattaagatggaaggaggcacggagaatgatcttcgcatcctggagcaggaggaggaggaggagcaggcaggaaagcctggggagcccagcaagaaagaagaaggacgggctggagcaggcctaggggacggggagcgcaaaaccaacgacaaggatgagaagaaggaagacggcaagcaggctgagaatgacagttctaatgatgacaaaacaaagaagtcggagggtgatggggacaaggaagagaagaaagaagactccgagaaggaagccaaaaagagtagcaagaagcggaaccggaagcacagtggtgacgacagctttgacgagggcagcgtgtcagagtctgagtcggagtcagagagcggccaggctgaggaggagaaggaggaggccgaagaagcgctcaaggagaaggagaagcccaaggaagaagaatgggagaagcccaaggacgccgcggggctggagtgcaagccgcggccgctgcataagacctgctccctcttcatgcgcaacatcgcgcccaacatctcccgggccgagatcatctccctttgtaaaaggtacccaggctttatgcgggtggcgctctcagagccccagccagagaggaggtttttccgtcgtggctgggtgaccttcgaccgcagtgttaacattaaagagatctgttggaacctgcagaacatccgtctccgggagtgtgagctgagccctggtgtgaacagggacctgacccggcgcgttcgcaacatcaacggcatcacccagcacaagcagattgtgcgcaacgacatcaagctggcggccaagctgatccacacgctggatgacaggacacagctttgggcctcagaaccagggacgcctcccctgcccacgagcctgccctcgcaaaacccgatcttgaagaatatcaccgactacctgatcgaggaagtaagcgccgaggaggaggagctgctggggagcagcgggggcgctcctcctgaggagcctcctaaggaagggaacccggcagagatcaacgtggagcgggatgagaagttgattaaggtcttggacaagctcctcctttacctgcgcatcgtgcattccttggattattacaacacctgtgagtaccccaacgaggacgagatgcccaatcgctgtgggatcatccacgttcgggggcccatgccacccaaccgcatcagtcacggggaagtgctggagtggcagaagacttttgaggagaagctcacgccgttgctgagtgtgcgggagtcactctcagaggaagaggcccagaagatggggcgcaaagacccagagcaggaagtggagaagttcgtcacctccaacacgcaggaactgggcaaggataagtggctgtgtcctctcagtggcaagaaattcaagccacccgcctcgcncctgccgtggtattttnnntccntcccc

SEQ ID NO: 438563 - DNA, 1211 bp, Homo sapiens
gaaattatcaggtaggtacgaggccgggtggtttggcgtgcagctgatccacacgctggatgacaggacacagctttgggcctcagaaccagggacgcctcccctgcccacgagcctgccctcgcaaaacccgatcttgaagaatatcaccgactacctgatcgaggaagtaagcgccgaggaggaggagctgctggggagcagcgggggcgctcctcctgaggagcctcctaaggaagggaacccggcagagatcaacgtggagcgggatgagaagttgattaaggtcttggacaagctcctcctttacctgcgcatcgtgcattccttggattattacaacacctgtgagtaccccaacgaggacgagatgcccaatcgctgtgggatcatccacgttcgggggcccatgccacccaaccgcatcagtcacggggaagtgctggagtggcagaagacttttgaggagaagctcacgccgttgctgagtgtgcgggagtcactctcagaggaagaggcccagaagatggggcgcaaagacccagagcaggaagtggagaagttcgtcacctccaacacgcaggaactgggcaaggataagtggctgtgtcctctcagtggcaagaaattcaagggtcctgagtttgtgcgcaaacatatcttcaacaagcatgcagagaaaattgaggaagtgaaaaaggaagtcgcgttttttaacaacttcctcactgatgctaagcgcccagctctgcctgagatcaagccagcccagccacctggccccgcccagatactccccccaggtttgaccccaggactcccctacccacaccagactccccagggcctgatgccctatggtcagccccggcccccgatcttgggctatggagctggtgctgtccgccctgcagtccccacaggaggccctccatacccccatgccccgtatggtgctggtcgagggaactatgatgccttccgaggccagggaggttatcctgggaaacctcgcaacaggatggttcgtggagacccaagggccattgtggaatatcgggacctggatgccccagacgatgttgatttcttttgagccgtcccccgttcctcagtcctgtatcatccatacttgtactaccttgtcctatgaagctctgagaattttttgtacgatcagccttactgctaataaaagcacttccacaggg

SEQ ID NO: 438564 - DNA, 1486 bp, Homo sapiens
tatatgctaggtacgaggctgggctgaaatcggccgaggcgcaggcgcagcgcgggctgcgcgcgctactgcccatccccggttgtcccacttttgttcgcctctcttcggccctctactcaagagctccgtctccgtctcgccctcctcgaagtcctcgtcgcgcgcccgcgacccaggtcgccctgaaatctagcccgtccgagcgcgagtccaacggccgcggccgcaccaaggccccctcagaccgtgccatgggtgacagtgatgacgagtacgatcgaaggcgcagggacaagttcagaagagagcgcagcgactacgaccgttcccgcgagagagatgaaagacgtcgaggggacgattggaatgacagagagtgggaccgtggccgtgagcgccgtagtcggggtgaatatcgggactatgaccggaatcggcgagagcgcttctcgccacctcgccacgaactcagcccgccacagaagcgcatgaggagagactgggatgagcacagctctgacccataccacagtggctatgagatgccctatgctggggggggtgggggcccaacttatggcccccctcagccctggggccaccctgacgtccacatcatgcagcaccatgtcctgcctatccaggccaggctgggcagcattgcagagattgacctgggtgtgccgccgcccgtgatgaagaccttcaaggagtttctcctctccctggatgactcggtggatgagacggaggccgtcaagcgctataatgactacaagctggatttccggaggcaacagatgcaggatttcttcctggcgcacaaagatgaggagtggtttcggtctaagtaccacccagatgaggtggggaagcgtcggcaggaggcccggggggccctgcaaaaccgactgagggtcttcctgtccctcatggagactggctggtttgataaccttctcctggacatagacaaagctgatgccattgtcaagatgctggatgcagccgtgattaagatggaaggaggcacggagaatgatcttcgcatcctggagcaggaggaggaggaggagcaggcaggaaagcctggggagcccagcaagaaagaagaaggacgggctggagcaggcctaggggacggggagcgcaaaaccaacgacaaggatgagaagaaggaagacggcaagcaggctgagaatgacagttctaatgatgacaaaacaaagaagtcggagggtgatggggacaaggaagagaagaaagaagactccgagaaggaagccaaaaaggatggttcgtggagacccaagggccattgtggaatatcgggacctggatgccccagacgatgttgatttcttttgagccgtcccccgttcctcagtcctgtatcatccatacttgtactaccttgtcctatgaagctctgagaattttttgtacgatcagccttactgctaataaaagcacttccacaggg

SEQ ID NO: 438565 - DNA, 713 bp, Homo sapiens
cacatgatttctgatgctatctggtctgtagttttagaagtttcaatagcaggaagtggagaagttcgtcacctccaacacgcaggaactgggcaaggataagtggctgtgtcctctcagtggcaagaaattcaagggtcctgagtttgtgcgcaaacatatcttcaacaagcatgcagagaaaattgaggaagtgaaaaaggaagtcgcgttttttaacaacttcctcactgatgctaagcgcccagctctgcctgagatcaagccagcccagccacctggccccgcccagatactccccccaggtttgaccccaggactcccctacccacaccagactccccagggcctgatgccctatggtcagccccggcccccgatcttgggctatggagctggtgctgtccgccctgcagtccccacaggaggccctccatacccccatgccccgtatggtgctggtcgagggaactatgatgccttccgaggccagggaggttatcctgggaaacctcgcaacaggatggttcgtggagacccaagggccattgtggaatatcgggacctggatgccccagacgatgttgatttcttttgagccgtcccccgttcctcagtcctgtatcatccatacttgtactaccttgtcctatgaagctctgagaattttttgtacgatcagccttactgctaataaaagcacttccacaggg

SEQ ID NO: 438566 - DNA, 1204 bp, Homo sapiens
tatatgctaggtacgaggctgggctgaaatcggccgaggcgcaggcgcagcgcgggctgcgcgcgctactgcccatccccggttgtcccacttttgttcgcctctcttcggccctctactcaagagctccgtctccgtctcgccctcctcgaagtcctcgtcgcgcgcccgcgacccaggtcgccctgaaatctagcccgtccgagcgcgagtccaacggccgcggccgcaccaaggccccctcagaccgtgccatgggtgacagtgatgacgagtacgatcgaaggcgcagggacaagttcagaagagagcgcagcgactacgaccgttcccgcgagagagatgaaagacgtcgaggggacgattggaatgacagagagtgggaccgtggccgtgagcgccgtagtcggggtgaatatcgggactatgaccggaatcggcgagagcgcttctcgccacctcgccacgaactcagcccgccacagaagcgcatgaggagagactgggatgagcacagctctgacccataccacagtggctatgagatgccctatgctggggggggtgggggcccaacttatggcccccctcagccctggggccaccctgacgtccacatcatgcagcaccatgtcctgcctatccaggccaggctgggcagcattgcagagattgacctgggtgtgccgccgcccgtgatgaagaccttcaaggagtttctcctctccctggatgactcggtggatgagacggaggccgtcaagcgctataatgactacaagctggatttccggaggcaacagatgcaggatttcttcctggcgcacaaagatgaggagtggtttcggtctaagtaccacccagatgaggtggggaagcgtcggcaggaggcccggggggccctgcaaaaccgactgagggtcttcctgtccctcatggagactggctggtttgataaccttctcctggacatagacaaagctgatgccattgtcaagatgctggatgcagccgtgattaagatggaaggaggcacggagaatgatcttcgcatcctggagcaggaggaggaggaggagcaggcaggaaagcctggggagcccagcaagaaatgataccggaaaggacagaggagactctagagacaacagttgaaatggaggaaaggacagaggagagcgcagaagggacagtagagtcaaac

SEQ ID NO: 438567 - DNA, 1092 bp, Homo sapiens
tatatgctaggtacgaggctgggctgaaatcggccgaggcgcaggcgcagcgcgggctgcgcgcgctactgcccatccccggttgtcccacttttgttcgcctctcttcggccctctactcaagagctccgtctccgtctcgccctcctcgaagtcctcgtcgcgcgcccgcgacccaggtcgccctgaaatctagcccgtccgagcgcgagtccaacggccgcggccgcaccaaggccccctcagaccgtgccatgggtgacagtgatgacgagtacgatcgaaggcgcagggacaagttcagaagagagcgcagcgactacgaccgttcccgcgagagagatgaaagacgtcgaggggacgattggaatgacagagagtgggaccgtggccgtgagcgccgtagtcggggtgaatatcgggactatgaccggaatcggcgagagcgcttctcgccacctcgccacgaactcagcccgccacagaagcgcatgaggagagactgggatgagcacagctctgacccataccacagtggctatgagatgccctatgctggggggggtgggggcccaacttatggcccccctcagccctggggccaccctgacgtccacatcatgcagcaccatgtcctgcctatccaggccaggctgggcagcattgcagagattgacctgggtgtgccgccgcccgtgatgaagaccttcaaggagtttctcctctccctggatgactcggtggatgagacggaggccgtcaagcgctataatgactacaagctggatttccggaggcaacagatgcaggatttcttcctggcgcacaaagatgaggagtgttcggtctaagtaccacccagatgcggtggggcacagcgcctcggcaacggcagagcccgcgaggacggccaccagacacaaaccgactgagggatctacacgataccatcatggagagctggacccgcaaccgactacaccataacctccaggaccaccagcacccagagcccgcatgaccccacgcaccaaacaatgacggaccgcacgcccgcggaaccacccatggcacggccggccacggagcaac

SEQ ID NO: 438568 - DNA, 1335 bp, Homo sapiens
ttagacagaggaggagcacagacgaggccctccatacccccatgccccgtatggtgctggtcgagggaactatgatgccttccgaggccagggaggttatcctgggaaacctcgcaacaggatggttcgtggagacccaagggccattgtggaatatcgggacctggatgccccagacgatgttgatttcttttgagccgtcccccgttcctcagtcctgtatcatccatacttgtactaccttgtcctatgaagctctgagaattttttgtacgatcagccttactgctaataaaagcacttccacagggggctcctgactctcgtgtgttacataactcctccatccttccagagtaactcctgaggtgttgctcagccctgccacttttattattgatgtcaaaagcgccaggctttgcagggacaccagtgggaggtacataggtgcgtgtctgggacccgagaatctcagttctgtaacttcgtcctcagtccaaggtgcgctgctgctgttgggagctaaggctggtcaagcacaggttgtagaaggagttggggtcaaaggctgcactcacctcttgccagcccacccacccagcagcctgtagttcactggggctttttggagtgccccagtagtgagggtccaataccaggacataggcttccgtgcctgacccgacgcagactcccagcaaggccttggacctggcatctgcgtcccccccaaccatgactgggcccccaccccctgcgaagtgcgagtaaagcctctccagctccccgtgcagccccactccccggggtacgtggcagaggcgtccctggggccctccgaagtgagcgaggcagaggctggcctccacgcagccgatccagtcccgggagccccggaagccggggggcttgtcgcccatgtcctccagggccgcctgtacggcggccagtccaggtacgcccgcgggctggccctctggccacgagcacagcgtctgcagagtgcggtagccgcagccccagccgcggtcgtccaggccgtcgcagccgtagtggtagtagaggtagtggcccgagagcagcgccaggcggacagggccgcggctcggcggggacaggcccacgtggacgtccctcagcggctccagggcggtgggcgggagcggaggtcccaggccaggcacagcgtcctcctagcggcgcggagcgacctcaggctccaacacttcctttcggctccgggtcttgggccagctgccgcaggaccggcgcgcagactggggacgcgctccccgggcctcgttgatcaccgcaggccgcaataggcagccaccg

SEQ ID NO: 438569 - DNA, 1512 bp, Homo sapiens
gtagttcctaacgctcgagccgttatcgtctcgaaaagccgcgcgagacttgcgagatccccgcccctttcccatcacgccctgctctccccgcccttcgcgctcggtttgttagttccagttccggccgcgagggtggagctttgtgcctcggaggcgtgggtgacgcaggcgcagcgcgggctgcgcgcgctactgcccatccccggttgtcccacttttgttcgcctctcttcggccctctactcaagagctccgtctccgtctcgccctcctcgaagtcctcgtcgcgcgcccgcgacccaggtcgccctgaaatctagcccgtccgagcgcgagtccaacggccgcggccgcaccaaggtgggggaggggaggagcctggggggccccgctggggcgggagaggaaccggggtccacgggggcgggcgcggagaaactcggggcgagtggaggtgttggagccgcgttctcaggcctaggatggtgggggccgcggagggctggccttggcgggagggaagcgggcgagctgcccgcgagggacggtcccttcctccgctcgtccttttgcaccactcctaccgcctctccccggtccccaggccccctcagaccgtgccatgggtgacagtgatgacgagtacgatcgaaggcctggtgctgtccgccctgcagtccccacaggaggccctccatacccccatgccccgtatggtgctggtcgagggaactatgatgccttccgaggccagggaggttatcctgggaaacctcgcaacaggatggttcgtggagacccaagggccattgtggaatatcgggacctggatgccccagacgatgttgatttcttttgagccgtcccccgttcctcagtcctgtatcatccatacttgtactaccttgtcctatgaagctctgagaattttttgtacgatcagccttactgctaataaaagcacttccacagggaaaaaaaaaaaaaaaaaaaataaaaaaaaaaaaaaaaaaaaacaaaaaaaaaaaaaaaaaaaaaaaaaaaataaaaaaaaaaaaaataaaaggataaaaaaaaaaaaaataaaaaatccatgggccgtgttttaaaaacgtggtaatgggaaaacccttgggttaacccaattatatcgctttgaaacaaatcccctttttgcaattgggtttattacgaaaagggccctaaccgttgggcctttcacaaattttgcaacctgtaagggtaatgggcaaatttaagggttaatttttgtgtaaaatcccgttaaattttgtgaaaaaccttttttttaaccaatggcgcaaatgggcaatcctttttaaacaaaggattccccgaataggttaggttgtccttttgaaaaaggtccttttaaaacgggcctacactaaaggggaaaactttttagggatggccctttgaacatcccttagtttttgggcgggccctcttagtgaccctaaggcgcccttttaattttgggggccc

SEQ ID NO: 438570 - DNA, 1094 bp, Homo sapiens
gtagttcctaacgctcgagccgttatcgtctcgaaaagccgcgcgagacttgcgagatccccgcccctttcccatcacgccctgctctccccgcccttcgcgctcggtttgttagttccagttccggccgcgagggtggagctttgtgcctcggaggcgtgggtgacgcaggcgcagcgcgggctgcgcgcgctactgcccatccccggttgtcccacttttgttcgcctctcttcggccctctactcaagagctccgtctccgtctcgccctcctcgaagtcctcgtcgcgcgcccgcgacccaggtcgccctgaaatctagcccgtccgagcgcgagtccaacggccgcggccgcaccaaggtgggggaggggaggagcctggggggccccgctggggcgggagaggaaccggggtccacgggggcgggcgcggagaaactcggggcgagtggaggtgttggagccgcgttctcaggcctaggatggtgggggccgcggagggctggccttggcgggagggaagcgggcgagctgcccgcgagggacggtcccttcctccgctcgtccttttgcaccactcctaccgcctctccccggtccccaggccccctcagaccgtgccatgggtgacagtgatgacgagtacgatcgaaggcgcagggacaagttcagaagagagcgcagcgactacgaccgttcccgcgagagagatgaaagacgtcgaggggacgattggaatgacaggtgagccgtttttaacttcatcttgtccccgtttcatgccgtttcactccacccgcgtcgcttttctttctcccccttgtaatttttatgagggcgaatcctatgaaatggctcattggaccgttttctgtggttcagcctatttgctgttggccaaataactagctgtggcttggtttttgaaattctctgcagatcagagctatagagctaagagtttgagtatgaagaagcactgtttatacatgcacgaaaagcgtgcttttttgcttttttttgttttgttattgagatggggtttcaccatgttggccagctggtcttgaactcctgacctcacatatcca

SEQ ID NO: 438571 - DNA, 475 bp, Homo sapiens
gattcccggtgtcgacttactagctgcaagctctgcctgccttcctgcgcgccgttactccccccaggtttgaccccaggactcccctacccacaccagactccccagggcctgatgccctatggtcagccccggcccccgatcttgggctatggagctggtgctgtccgccctgcagtccccacaggaggccctccatacccccatgccccgtatggtgctggtcgagggaactatgatgccttccgaggccagggaggttatcctgggaaacctcgcaacaggatggttcgtggagacccaagggccattgtggaatatcgggacctggatgccccagacgatgttgatttcttttgagccgtcccccgttcctcagtcctgtatcatccatacttgtactaccttgtcctatgaagctctgagaattttttgtacgatcagccttactgctaataaaagcacttccacaggg

SEQ ID NO: 438572 - DNA, 514 bp, Homo sapiens
ggaactgcttactgcactggcaggcgggagctgggaatccttccagctcgggcctgggagcgaggcaacccttatgtggctgtcctgacccctctcctctctccacccagggtcctgagtttgtgcgcaaacatatcttcaacaagcatgcagagaaaattgaggaagtgaaaaaggaagtcgcgttttttaacaacttcctcactgatgctaagcgcccagctctgcctcttgcaaggccctgagtccactttgaaaggcatgtgggtaaacagatggcaggggagcccgcctatcctgaggctgggagaggatgtctggccaggcgggaacagcgggcatggcccacgggcaccaggcttcctgaaaagctggaaggagacaaaaggcccacatggccttggcctgcagaggaagacatagcggcaacacggctaatcgtgacaaagcatctgttctgtgcctggcagggaagccggcccacagaatacacaatccaaccactgcctcgtgg

SEQ ID NO: 438573 - DNA, 3252 bp, Homo sapiens
gtagttcctaacgctcgagccgttatcgtctcgaaaagccgcgcgagacttgcgagatccccgcccctttcccatcacgccctgctctccccgcccttcgcgctcggtttgttagttccagttccggccgcgagggtggagctttgtgcctcggaggcgtgggtgacgcaggcgcagcgcgggctgcgcgcgctactgcccatccccggttgtcccacttttgttcgcctctcttcggccctctactcaagagctccgtctccgtctcgccctcctcgaagtcctcgtcgcgcgcccgcgacccaggtcgccctgaaatctagcccgtccgagcgcgagtccaacggccgcggccgcaccaaggtgggggaggggaggagcctggggggccccgctggggcgggagaggaaccggggtccacgggggcgggcgcggagaaactcggggcgagtggaggtgttggagccgcgttctcaggcctaggatggccccctcagaccgtgccatgggtgacagtgatgacgagtacgatcgaaggcgcagggacaagttcagaagagagcgcagcgactacgaccgttcccgcgagagagatgaaagacgtcgaggggacgattggaatgacagagagtgggaccgtggccgtgagcgccgtagtcggggtgaatatcgggactatgaccggaatcggcgagagcgcttctcgccacctcgccacgaactcagcccgccacagaagcgcatgaggagagactgggatgagcacagctctgacccataccacagtggctatgagatgccctatgctggggggggtgggggcccaacttatggcccccctcagccctggggccaccctgacgtccacatcatgcagcaccatgtcctgcctatccaggccaggctgggcagcattgcagagattgacctgggtgtgccgccgcccgtgatgaagaccttcaaggagtttctcctctccctggatgactcggtggatgagacggaggccgtcaagcgctataatgactacaagctggatttccggaggcaacagatgcaggatttcttcctggcgcacaaagatgaggagtggtttcggtctaagtaccacccagatgaggtggggaagcgtcggcaggaggcccggggggccctgcaaaaccgactgagggtcttcctgtccctcatggagactggctggtttgataaccttctcctggacatagacaaagctgatgccattgtcaagatgctggatgcagccgtgattaagatggaaggaggcacggagaatgatcttcgcatcctggagcaggaggaggaggaggagcaggcaggaaagcctggggagcccagcaagaaagaagaaggacgggctggagcaggcctaggggacggggagcgcaaaaccaacgacaaggatgagaagaaggaagacggcaagcaggctgagaatgacagttctaatgatgacaaaacaaagaagtcggagggtgatggggacaaggaagagaagaaagaagactccgagaaggaagccaaaaagagtagcaagaagcggaaccggaagcacagtggtgacgacagctttgacgagggcagcgtgtcagagtctgagtcggagtcagagagcggccaggctgaggaggagaaggaggaggccgaagaagcgctcaaggagaaggagaagcccaaggaagaagaatgggagaagcccaaggacgccgcggggctggagtgcaagccgcggccgctgcataagacctgctccctcttcatgcgcaacatcgcgcccaacatctcccgggccgagatcatctccctttgtaaaaggtacccaggctttatgcgggtggcgctctcagagccccagccagagaggaggtttttccgtcgtggctgggtgaccttcgaccgcagtgttaacattaaagagatctgttggaacctgcagaacatccgtctccgggagtgtgagctgagccctggtgtgaacagggacctgacccggcgcgttcgcaacatcaacggcatcacccagcacaagcagattgtgcgcaacgacatcaagctggcggccaagctgatccacacgctggatgacaggacacagctttgggcctcagaaccagggacgcctcccctgcccacgagcctgccctcgcaaaacccgatcttgaagaatatcaccgactacctgatcgaggaagtaagcgccgaggaggaggagctgctggggagcagcgggggcgctcctcctgaggagcctcctaaggaagggaacccggcagagatcaacgtggagcgggatgagaagttgattaaggtcttggacaagctcctcctttacctgcgcatcgtgcattccttggattattacaacacctgtgagtaccccaacgaggacgagatgcccaatcgctgtgggatcatccacgttcgggggcccatgccacccaaccgcatcagtcacggggaagtgctggagtggcagaagacttttgaggagaagctcacgccgttgctgagtgtgcgggagtcactctcagaggaagaggcccagaagatggggcgcaaagacccagagcaggaagtggagaagttcgtcacctccaacacgcaggaactgggcaaggataagtggctgtgtcctctcagtggcaagaaattcaagggtcctgagtttgtgcgcaaacatatcttcaacaagcatgcagagaaaattgaggaagtgaaaaaggaagtcgcgttttttaacaacttcctcactgatgctaagcgcccagctctgcctgagatcaagccagcccagccacctggccccgcccagatactccccccaggtttgaccccaggactcccctacccacaccagactccccagggcctgatgccctatggtcagccccggcccccgatcttgggctatggagctggtgctgtccgccctgcagtccccacaggaggccctccatacccccatgccccgtatggtgctggtcgagggaactatgatgccttccgaggccagggaggttatcctgggaaacctcgcaacaggatggttcgtggagacccaagggccattgtggaatatcgggacctggatgccccagacgatgttgatttcttttgagccgtcccccgttcctcagtcctgtatcatccatacttgtactaccttgtcctatgaagctctgagaattttttgtacgatcagccttactgctaataaaagcacttccacaggg

SEQ ID NO: 438574 - DNA, 3379 bp, Homo sapiens
cgtcagccggtaccgggttactagaagataagagcaggccagggcactgctgtgcacaatgcagcggtttagctgaatgtgattgctcaggcagctagccagtcaggccccactgcggagtcccgcgtgggcatctcggccgggcgcccagccaggagccagccggtggcccaccagccagcatgggccctgggcgccgctagttaaatcttgagctctgtttgaccaagcggccaaggtaaagatcctggaggtgatgcctgcggctttcctttcctcttctgccccactcgtggttctgttctgtcttcgctgtcccctctctcgaattgctctgtgtctttgtcctaatctctcagcaccttcattcttctctgtttctgttcttgctccctgcctaacaccaccttcttccctgttggtttttttagtttctctctctgatctttagtttttccctttgttttcggtttctgggactttctcacactctcccctttcctccctttccccttttcctcatactcctcatttcttctgttttccctctgaggtcctatttgaaatgttttatttttcttctccctaaccttccagccctctcctctctctccccctgtgggcaggacctgaggctctaaagggcactccagtgtctcccttcggtctttcctgtcccttcaccgtcttgcttatcttcccacgggtggagaaaggtgccctgcctctgggcttttgctatctggccctctgtcttccacctcggggtggagggagttggcgggagcagtttttgaatgactgcagtttggggttggtgaggagagggaggttcttcagggcctgctatttcctgagccttcctctctgaagctttggggaaatgacacctttttactacgttagtgtttcccagagatttaaagtggtaaatctgcctctcctaccctggcgtccccctgtagtcattggtcttcccaaatccagagctcttagttcctggttctcccccaaatcttcacagaacacaacttctggttccttttggggtgttgggtggttctagcgcacccctatcccttaatctctctattttgatgaccttttgtggttgtgagaggaagggggatatgccctgtctttcctgggccccttcccacatcctggccttggcttccaataactgttttgtctttccctcccccgcttcgttcccaggtgtttcggtctaagtaccacccagatgaggtggggaagcgtcggcaggaggcccggggggccctgcaaaaccgactgagggtcttcctgtccctcatggagactggctggtttgataaccttctcctggacatagacaaagctgatgccattgtcaagatgctggatgcagccgtgattaagatggaaggaggcacggagaatgatcttcgcatcctggagcaggaggaggaggaggagcaggcaggaaagcctggggagcccagcaagaaagaagaaggacgggctggagcaggcctaggggacggggagcgcaaaaccaacgacaaggatgagaagaaggaagacggcaagcaggctgagaatgacagttctaatgatgacaaaacaaagaagtcggagggtgatggggacaaggaagagaagaaagaagactccgagaaggaagccaaaaagagtagcaagaagcggaaccggaagcacagtggtgacgacagctttgacgagggcagcgtgtcagagtctgagtcggagtcagagagcggccaggctgaggaggagaaggaggaggccgaagaagcgctcaaggagaaggagaagcccaaggaagaagaatgggagaagcccaaggacgccgcggggctggagtgcaagccgcggccgctgcataagacctgctccctcttcatgcgcaacatcgcgcccaacatctcccgggccgagatcatctccctttgtaaaaggtacccaggctttatgcgggtggcgctctcagagccccagccagagaggaggtttttccgtcgtggctgggtgaccttcgaccgcagtgttaacattaaagagatctgttggaacctgcagaacatccgtctccgggagtgtgagctgagccctggtgtgaacagggacctgacccggcgcgttcgcaacatcaacggcatcacccagcacaagcagattgtgcgcaacgacatcaagctggcggccaagctgatccacacgctggatgacaggacacagctttgggcctcagaaccagggacgcctcccctgcccacgagcctgccctcgcaaaacccgatcttgaagaatatcaccgactacctgatcgaggaagtaagcgccgaggaggaggagctgctggggagcagcgggggcgctcctcctgaggagcctcctaaggaagggaacccggcagagatcaacgtggagcgggatgagaagttgattaaggtcttggacaagctcctcctttacctgcgcatcgtgcattccttggattattacaacacctgtgagtaccccaacgaggacgagatgcccaatcgctgtgggatcatccacgttcgggggcccatgccacccaaccgcatcagtcacggggaagtgctggagtggcagaagacttttgaggagaagctcacgccgttgctgagtgtgcgggagtcactctcagaggaagaggcccagaagatggggcgcaaagacccagagcaggaagtggagaagttcgtcacctccaacacgcaggaactgggcaaggataagtggctgtgtcctctcagtggcaagaaattcaagggtcctgagtttgtgcgcaaacatatcttcaacaagcatgcagagaaaattgaggaagtgaaaaaggaagtcgcgttttttaacaacttcctcactgatgctaagcgcccagctctgcctgagatcaagccagcccagccacctggccccgcccagatactccccccaggtttgaccccaggactcccctacccacaccagactccccagggcctgatgccctatggtcagccccggcccccgatcttgggctatggagctggtgctgtccgccctgcagtccccacaggaggccctccatacccccatgccccgtatggtgctggtcgagggaactatgatgccttccgaggccagggaggttatcctgggaaacctcgcaacaggatggttcgtggagacccaagggccattgtggaatatcgggacctggatgccccagacgatgttgatttcttttgagccgtcccccgttcctcagtcctgtatcatccatacttgtactaccttgtcctatgaagctctgagaattttttgtacgatcagccttactgctaataaaagcacttccacaggg

SEQ ID NO: 438575 - DNA, 2557 bp, Homo sapiens
ttcggcaacgagggcacggagaatgatctcctcctcctcctcatcctctttctgctcctcctccttgaaaagagccagaactgggaactacacccgctcatcgacggagctcggagcaaacccacctccacccccaccatacccagcccatacatgagcccctgggctgagctgcgcggccccggccaggcagacaggccagggcactgctgtgcacaatgcagcggtttagctgaatgtgattgctcaggcagctagccagtcaggccccactgcggagtcccgcgtgggcatctcggccgggcgcccagccaggagccagccggtggcccaccagccagcatgggccctgggcgccgctagttaaatcttgagctctgtttgaccaagcggccaaggtttcggtctaagtaccacccagatgaggtggggaagcgtcggcaggaggcccggggggccctgcaaaaccgactgagggtcttcctgtccctcatggagactggctggtttgataaccttctcctggacatagacaaagctgatgccattgtcaagatgctggatgcagccgtgattaagatggaaggaggcacggagaatgatcttcgcatcctggagcaggaggaggaggaggagcaggcaggaaagcctggggagcccagcaagaaagaagaaggacgggctggagcaggcctaggggacggggagcgcaaaaccaacgacaaggatgagaagaaggaagacggcaagcaggctgagaatgacagttctaatgatgacaaaacaaagaagtcggagggtgatggggacaaggaagagaagaaagaagactccgagaaggaagccaaaaagagtagcaagaagcggaaccggaagcacagtggtgacgacagctttgacgagggcagcgtgtcagagtctgagtcggagtcagagagcggccaggctgaggaggagaaggaggaggccgaagaagcgctcaaggagaaggagaagcccaaggaagaagaatgggagaagcccaaggacgccgcggggctggagtgcaagccgcggccgctgcataagacctgctccctcttcatgcgcaacatcgcgcccaacatctcccgggccgagatcatctccctttgtaaaaggtacccaggctttatgcgggtggcgctctcagagccccagccagagaggaggtttttccgtcgtggctgggtgaccttcgaccgcagtgttaacattaaagagatctgttggaacctgcagaacatccgtctccgggagtgtgagctgagccctggtgtgaacagggacctgacccggcgcgttcgcaacatcaacggcatcacccagcacaagcagattgtgcgcaacgacatcaagctggcggccaagctgatccacacgctggatgacaggacacagctttgggcctcagaaccagggacgcctcccctgcccacgagcctgccctcgcaaaacccgatcttgaagaatatcaccgactacctgatcgaggaagtaagcgccgaggaggaggagctgctggggagcagcgggggcgctcctcctgaggagcctcctaaggaagggaacccggcagagatcaacgtggagcgggatgagaagttgattaaggtcttggacaagctcctcctttacctgcgcatcgtgcattccttggattattacaacacctgtgagtaccccaacgaggacgagatgcccaatcgctgtgggatcatccacgttcgggggcccatgccacccaaccgcatcagtcacggggaagtgctggagtggcagaagacttttgaggagaagctcacgccgttgctgagtgtgcgggagtcactctcagaggaagaggcccagaagatggggcgcaaagacccagagcaggaagtggagaagttcgtcacctccaacacgcaggaactgggcaaggataagtggctgtgtcctctcagtggcaagaaattcaagggtcctgagtttgtgcgcaaacatatcttcaacaagcatgcagagaaaattgaggaagtgaaaaaggaagtcgcgttttttaacaacttcctcactgatgctaagcgcccagctctgcctgagatcaagccagcccagccacctggccccgcccagatactccccccaggtttgaccccaggactcccctacccacaccagactccccagggcctgatgccctatggtcagccccggcccccgatcttgggctatggagctggtgctgtccgccctgcagtccccacaggaggccctccatacccccatgccccgtatggtgctggtcgagggaactatgatgccttccgaggccagggaggttatcctgggaaacctcgcaacaggatggttcgtggagacccaagggccattgtggaatatcgggacctggatgccccagacgatgttgatttcttttgagccgtcccccgttcctcagtcctgtatcatccatacttgtactaccttgtcctatgaagctctgagaattttttgtacgatcagccttactgctaataaaagcacttccacaggg

SEQ ID NO: 438576 - DNA, 2184 bp, Homo sapiens
agaggatcccctgaacattcgtgtcgtttcggtctaagtaccacccagatgaggtggggaagcgtcggcaggaggcccggggggccctgcaaaaccgactgagggtcttcctgtccctcatggagactggctggtttgataaccttctcctggacatagacaaagctgatgccattgtcaagatgctggatgcagccgtgattaagatggaaggaggcacggagaatgatcttcgcatcctggagcaggaggaggaggaggagcaggcaggaaagcctggggagcccagcaagaaagaagaaggacgggctggagcaggcctaggggacggggagcgcaaaaccaacgacaaggatgagaagaaggaagacggcaagcaggctgagaatgacagttctaatgatgacaaaacaaagaagtcggagggtgatggggacaaggaagagaagaaagaagactccgagaaggaagccaaaaagagtagcaagaagcggaaccggaagcacagtggtgacgacagctttgacgagggcagcgtgtcagagtctgagtcggagtcagagagcggccaggctgaggaggagaaggaggaggccgaagaagcgctcaaggagaaggagaagcccaaggaagaagaatgggagaagcccaaggacgccgcggggctggagtgcaagccgcggccgctgcataagacctgctccctcttcatgcgcaacatcgcgcccaacatctcccgggccgagatcatctccctttgtaaaaggtacccaggctttatgcgggtggcgctctcagagccccagccagagaggaggtttttccgtcgtggctgggtgaccttcgaccgcagtgttaacattaaagagatctgttggaacctgcagaacatccgtctccgggagtgtgagctgagccctggtgtgaacagggacctgacccggcgcgttcgcaacatcaacggcatcacccagcacaagcagattgtgcgcaacgacatcaagctggcggccaagctgatccacacgctggatgacaggacacagctttgggcctcagaaccagggacgcctcccctgcccacgagcctgccctcgcaaaacccgatcttgaagaatatcaccgactacctgatcgaggaagtaagcgccgaggaggaggagctgctggggagcagcgggggcgctcctcctgaggagcctcctaaggaagggaacccggcagagatcaacgtggagcgggatgagaagttgattaaggtcttggacaagctcctcctttacctgcgcatcgtgcattccttggattattacaacacctgtgagtaccccaacgaggacgagatgcccaatcgctgtgggatcatccacgttcgggggcccatgccacccaaccgcatcagtcacggggaagtgctggagtggcagaagacttttgaggagaagctcacgccgttgctgagtgtgcgggagtcactctcagaggaagaggcccagaagatggggcgcaaagacccagagcaggaagtggagaagttcgtcacctccaacacgcaggaactgggcaaggataagtggctgtgtcctctcagtggcaagaaattcaagggtcctgagtttgtgcgcaaacatatcttcaacaagcatgcagagaaaattgaggaagtgaaaaaggaagtcgcgttttttaacaacttcctcactgatgctaagcgcccagctctgcctgagatcaagccagcccagccacctggccccgcccagatactccccccaggtttgaccccaggactcccctacccacaccagactccccagggcctgatgccctatggtcagccccggcccccgatcttgggctatggagctggtgctgtccgccctgcagtccccacaggaggccctccatacccccatgccccgtatggtgctggtcgagggaactatgatgccttccgaggccagggaggttatcctgggaaacctcgcaacaggatggttcgtggagacccaagggccattgtggaatatcgggacctggatgccccagacgatgttgatttcttttgagccgtcccccgttcctcagtcctgtatcatccatacttgtactaccttgtcctatgaagctctgagaattttttgtacgatcagccttactgctaataaaagcacttccacaggg

SEQ ID NO: 438577 - DNA, 2330 bp, Homo sapiens
ttcggcaacgagggcacggagaatgatctcctcctcctcctcatcctctttctgctcctcctccttgaaaagagccagaactgggaactacacccgctcatcgacggagctcggagcaaacccacctccacccccaccatacccagcccatacatgagcccctgggctgagctgcgcggccccggccaggcagacaggccagggcactgctgtgcacaatgcagcggtttagctgaatgtgattgctcaggcagctagccagtcaggccccactgcggagtcccgcgtgggcatctcggccgggcgcccagccaggagccagccggtggcccaccagccagcatgggccctgggcgccgctagttaaatcttgagctctgtttgaccaagcggccaaggtttcggtctaagtaccacccagatgaggtggggaagcgtcggcaggaggcccggggggccctgcaaaaccgactgagggtcttcctgtccctcatggagactggctggtttgataaccttctcctggacatagacaaagctgatgccattgtcaagatgctggatgcagccgtgattaagatggaaggaagagaagaaagaagactccgagaaggaagccaaaaagagtagcaagaagcggaaccggaagcacagtggtgacgacagctttgacgagggcagcgtgtcagagtctgagtcggagtcagagagcggccaggctgaggaggagaaggaggaggccgaagaagcgctcaaggagaaggagaagcccaaggaagaagaatgggagaagcccaaggacgccgcggggctggagtgcaagccgcggccgctgcataagacctgctccctcttcatgcgcaacatcgcgcccaacatctcccgggccgagatcatctccctttgtaaaaggtacccaggctttatgcgggtggcgctctcagagccccagccagagaggaggtttttccgtcgtggctgggtgaccttcgaccgcagtgttaacattaaagagatctgttggaacctgcagaacatccgtctccgggagtgtgagctgagccctggtgtgaacagggacctgacccggcgcgttcgcaacatcaacggcatcacccagcacaagcagattgtgcgcaacgacatcaagctggcggccaagctgatccacacgctggatgacaggacacagctttgggcctcagaaccagggacgcctcccctgcccacgagcctgccctcgcaaaacccgatcttgaagaatatcaccgactacctgatcgaggaagtaagcgccgaggaggaggagctgctggggagcagcgggggcgctcctcctgaggagcctcctaaggaagggaacccggcagagatcaacgtggagcgggatgagaagttgattaaggtcttggacaagctcctcctttacctgcgcatcgtgcattccttggattattacaacacctgtgagtaccccaacgaggacgagatgcccaatcgctgtgggatcatccacgttcgggggcccatgccacccaaccgcatcagtcacggggaagtgctggagtggcagaagacttttgaggagaagctcacgccgttgctgagtgtgcgggagtcactctcagaggaagaggcccagaagatggggcgcaaagacccagagcaggaagtggagaagttcgtcacctccaacacgcaggaactgggcaaggataagtggctgtgtcctctcagtggcaagaaattcaagggtcctgagtttgtgcgcaaacatatcttcaacaagcatgcagagaaaattgaggaagtgaaaaaggaagtcgcgttttttaacaacttcctcactgatgctaagcgcccagctctgcctgagatcaagccagcccagccacctggccccgcccagatactccccccaggtttgaccccaggactcccctacccacaccagactccccagggcctgatgccctatggtcagccccggcccccgatcttgggctatggagctggtgctgtccgccctgcagtccccacaggaggccctccatacccccatgccccgtatggtgctggtcgagggaactatgatgccttccgaggccagggaggttatcctgggaaacctcgcaacaggatggttcgtggagacccaagggccattgtggaatatcgggacctggatgccccagacgatgttgatttcttttgagccgtcccccgttcctcagtcctgtatcatccatacttgtactaccttgtcctatgaagctctgagaattttttgtacgatcagccttactgctaataaaagcacttccacaggg

SEQ ID NO: 438578 - DNA, 4024 bp, Homo sapiens
tatatgctaggtacgaggctgggctgaaatcggccgaggcgcaggcgcagcgcgggctgcgcgcgctactgcccatccccggttgtcccacttttgttcgcctctcttcggccctctactcaagagctccgtctccgtctcgccctcctcgaagtcctcgtcgcgcgcccgcgacccaggtcgccctgaaatctagcccgtccgagcgcgagtccaacggccgcggccgcaccaaggccccctcagaccgtgccatgggtgacagtgatgacgagtacgatcgaaggcgcagggacaagttcagaagagagcgcagcgactacgaccgttcccgcgagagagatgaaagacgtcgaggggacgattggaatgacagagagtgggaccgtggccgtgagcgccgtagtcggggtgaatatcgggactatgaccggaatcggcgagagcgcttctcgccacctcgccacgaactcagcccgccacagaagcgcatgaggagagactgggatgagcacagctctgacccataccacagtggctatgagatgccctatgctggggggggtgggggcccaacttatggcccccctcagccctggggccaccctgacgtccacatcatgcagcaccatgtcctgcctatccaggccaggctgggcagcattgcagagattgacctgggtgtgccgccgcccgtgatgaagaccttcaaggagtttctcctctccctggatgactcggtggatgagacggaggccgtcaagcgctataatgactacaagctggatttccggaggcaacagatgcaggatttcttcctggcgcacaaagatgaggagtggtttcggtctaagtaccacccagatgaggtggggaagcgtcggcaggaggcccggggggccctgcaaaaccgactgagggtcttcctgtccctcatggagactggctggtttgataaccttctcctggacatagacaaagctgatgccattgtcaagatgctggatgcagccgtgattaagatggaaggaggcacggagaatgatcttcgcatcctggagcaggaggaggaggaggagcaggcaggaaagcctggggagcccagcaagaaagaagaaggacgggctggagcaggcctaggggacggggagcgcaaaaccaacgacaaggatgagaagaaggaagacggcaagcaggctgagaatgacagttctaatgatgacaaaacaaagaagtcggagggtgatggggacaaggaagagaagaaagaagactccgagaaggaagccaaaaagagtagcaagaagcggaaccggaagcacagtggtgacgacagctttgacgagggcagcgtgtcagagtctgagtcggagtcagagagcggccaggctgaggaggagaaggaggaggccgaagaagcgctcaaggagaaggagaagcccaaggaagaagaatgggagaagcccaaggacgccgcggggctggagtgcaagccgcggccgctgcataagacctgctccctcttcatgcgcaacatcgcgcccaacatctcccgggccgagatcatctccctttgtaaaaggtacccaggctttatgcgggtggcgctctcagagccccagccagagaggaggtttttccgtcgtggctgggtgaccttcgaccgcagtgttaacattaaagagatctgttggaacctgcagaacatccgtctccgggagtgtgagctgagccctggtgtgaacagggacctgacccggcgcgttcgcaacatcaacggcatcacccagcacaagcagattgtgcgcaacgacatcaagctggcggccaagctgatccacacgctggatgacaggacacagctttgggcctcagaaccagggacgcctcccctgcccacgagcctgccctcgcaaaacccgatcttgaagaatatcaccgactacctgatcgaggaagtaagcgccgaggaggaggagctgctggggagcagcgggggcgctcctcctgaggagcctcctaaggaagggaacccggcagagatcaacgtggagcgggatgagaagttgattaaggtcttggacaagctcctcctttacctgcgcatcgtgcattccttggattattacaacacctgtgagtaccccaacgaggacgagatgcccaatcgctgtgggatcatccacgttcgggggcccatgccacccaaccgcatcagtcacggggaagtgctggagtggcagaagacttttgaggagaagctcacgccgttgctgagtgtgcgggagtcactctcagaggaagaggcccagaagatggggcgcaaagacccagagcaggaagtggagaagttcgtcacctccaacacgcaggaactgggcaaggataagtggctgtgtcctctcagtggcaagaaattcaagggtcctgagtttgtgcgcaaacatatcttcaacaagcatgcagagaaaattgaggaagtgaaaaaggaagtcgcgttttttaacaacttcctcactgatgctaagcgcccagctctgcctgagatcaagccagcccagccacctggccccgcccagatactccccccaggtttgaccccaggactcccctacccacaccagactccccagggcctgatgccctatggtcagccccggcccccgatcttgggctatggagctggtgctgtccgccctgcagtccccacaggaggccctccatacccccatgccccgtatggtgctggtcgagggaactatgatgccttccgaggccagggaggttatcctgggaaacctcgcaacaggatggttcgtggagacccaagggccattgtggaatatcgggacctggatgccccagacgatgttgatttcttttgagccgtcccccgttcctcagtcctgtatcatccatacttgtactaccttgtcctatgaagctctgagaattttttgtacgatcagccttactgctaataaaagcacttccacagggggctcctgactctcgtgtgttacataactcctccatccttccagagtaactcctgaggtgttgctcagccctgccacttttattattgatgtcaaaagcgccaggctttgcagggacaccagtgggaggtacataggtgcgtgtctgggacccgagaatctcagttctgtaacttcgtcctcagtccaaggtgcgctgctgctgttgggagctaaggctggtcaagcacaggttgtagaaggagttggggtcaaaggctgcactcacctcttgccagcccacccacccagcagcctgtagttcactggggctttttggagtgccccagtagtgagggtccaataccaggacataggcttccgtgcctgacccgacgcagactcccagcaaggccttggacctggcatctgcgtcccccccaaccatgactgggcccccaccccctgcgaagtgcgagtaaagcctctccagctccccgtgcagccccactccccggggtacgtggcagaggcgtccctggggccctccgaagtgagcgaggcagaggctggcctccacgcagccgatccagtcccgggagccccggaagccggggggcttgtcgcccatgtcctccagggccgcctgtacggcggccagtccaggtacgcccgcgggctggccctctggccacgagcacagcgtctgcagagtgcggtagccgcagccccagccgcggtcgtccaggccgtcgcagccgtagtggtagtagaggtagtggcccgagagcagcgccaggcggacagggccgcggctcggcggggacaggcccacgtggacgtccctcagcggctccagggcggtgggcgggagcggaggtcccaggccaggcacagcgtcctcctagcggcgcggagcgacctcaggctccaacacttcctttcggctccgggtcttgggccagctgccgcaggaccggcgcgcagactggggacgcgctccccgggcctcgttgatcaccgcaggccgcaataggcagccaccg

SEQ ID NO: 438579 - DNA, 3535 bp, Homo sapiens
tatatgctaggtacgaggctgggctgaaatcggccgaggcgcaggcgcagcgcgggctgcgcgcgctactgcccatccccggttgtcccacttttgttcgcctctcttcggccctctactcaagagctccgtctccgtctcgccctcctcgaagtcctcgtcgcgcgcccgcgacccaggtcgccctgaaatctagcccgtccgagcgcgagtccaacggccgcggccgcaccaaggccccctcagaccgtgccatgggtgacagtgatgacgagtacgatcgaaggcgcagggacaagttcagaagagagcgcagcgactacgaccgttcccgcgagagagatgaaagacgtcgaggggacgattggaatgacagagagtgggaccgtggccgtgagcgccgtagtcggggtgaatatcgggactatgaccggaatcggcgagagcgcttctcgccacctcgccacgaactcagcccgccacagaagcgcatgaggagagactgggatgagcacagctctgacccataccacagtggctatgagatgccctatgctggggggggtgggggcccaacttatggcccccctcagccctggggccaccctgacgtccacatcatgcagcaccatgtcctgcctatccaggccaggctgggcagcattgcagagattgacctgggtgtgccgccgcccgtgatgaagaccttcaaggagtttctcctctccctggatgactcggtggatgagacggaggccgtcaagcgctataatgactacaagctggatttccggaggcaacagatgcaggatttcttcctggcgcacaaagatgaggagtggtttcggtctaagtaccacccagatgaggtggggaagcgtcggcaggaggcccggggggccctgcaaaaccgactgagggtcttcctgtccctcatggagactggctggtttgataaccttctcctggacatagacaaagctgatgccattgtcaagatgctggatgcagccgtgattaagatggaaggaggcacggagaatgatcttcgcatcctggagcaggaggaggaggaggagcaggcaggaaagcctggggagcccagcaagaaagaagaaggacgggctggagcaggcctaggggacggggagcgcaaaaccaacgacaaggatgagaagaaggaagacggcaagcaggctgagaatgacagttctaatgatgacaaaacaaagaagtcggagggtgatggggacaaggaagagaagaaagaagactccgagaaggaagccaaaaagagtagcaagaagcggaaccggaagcacagtggtgacgacagctttgacgagggcagcgtgtcagagtctgagtcggagtcagagagcggccaggctgaggaggagaaggaggaggccgaagaagcgctcaaggagaaggagaagcccaaggaagaagaatgggagaagcccaaggacgccgcggggctggagtgcaagccgcggccgctgcataagacctgctccctcttcatgcgcaacatcgcgcccaacatctcccgggccgagatcatctccctttgtaaaaggtacccaggctttatgcgggtggcgctctcagagccccagccagagaggaggtttttccgtcgtggctgggtgaccttcgaccgcagtgttaacattaaagagatctgttggaacctgcagaacatccgtctccgggagtgtgagctgagccctggtgtgaacagggacctgacccggcgcgttcgcaacatcaacggcatcacccagcacaagcagattgtgcgcaacgacatcaagctggcggccaagctgatccacacgctggatgacaggacacagctttgggcctcagaaccagggacgcctcccctgcccacgagcctgccctcgcaaaacccgatcttgaagaatatcaccgactacctgatcgaggaagtaagcgccgaggaggaggagctgctggggagcagcgggggcgctcctcctgaggagcctcctaaggaagggaacccggcagagatcaacgtggagcgggatgagaagttgattaaggtcttggacaagctcctcctttacctgcgcatcgtgcattccttggattattacaacacctgtgagtaccccaacgaggacgagatgcccaatcgctgtgggatcatccacgttcgggggcccatgccacccaaccgcatcagtcacggggaagtgctggagtggcagaagacttttgaggagaagctcacgccgttgctgagtgtgcgggagtcactctcagaggaagaggcccagaagatggggcgcaaagacccagagcaggaagtggagaagttcgtcacctccaacacgcaggaactgggcaaggataagtggctgtgtcctctcagtggcaagaaattcaagggtcctgagtttgtgcgcaaacatatcttcaacaagcatgcagagaaaattgaggaagtgaaaaaggaagtcgcgttttttaacaacttcctcactgatgctaagcgcccagctctgcctgagatcaagccagcccagccacctggccccgcccagatactccccccaggtttgaccccaggactcccctacccacaccagactccccagggcctgatgccctatggtcagccccggcccccgatcttgggctatggagctggtgctgtccgccctgcagtccccacaggaggccctccatacccccatgccccgtatggtgctggtcgagggaactatgatgccttccgaggccagggaggttatcctgggaaacctcgcaacaggatggttcgtggagacccaagggccattgtggaatatcgggacctggatgccccagacgatgttgatttcttttgagccgtcccccgttcctcagtcctgtatcatccatacttgtactaccttgtcctatgaagctctgagaattttttgtacgatcagccttactgctaataaaagcacttccacagggaaaaaaaaaaaaaaaaaaaataaaaaaaaaaaaaaaaaaaaacaaaaaaaaaaaaaaaaaaaaaaaaaaaataaaaaaaaaaaaaataaaaggataaaaaaaaaaaaaataaaaaatccatgggccgtgttttaaaaacgtggtaatgggaaaacccttgggttaacccaattatatcgctttgaaacaaatcccctttttgcaattgggtttattacgaaaagggccctaaccgttgggcctttcacaaattttgcaacctgtaagggtaatgggcaaatttaagggttaatttttgtgtaaaatcccgttaaattttgtgaaaaaccttttttttaaccaatggcgcaaatgggcaatcctttttaaacaaaggattccccgaataggttaggttgtccttttgaaaaaggtccttttaaaacgggcctacactaaaggggaaaactttttagggatggccctttgaacatcccttagtttttgggcgggccctcttagtgaccctaaggcgcccttttaattttgggggccc

SEQ ID NO: 438580 - DNA, 3306 bp, Homo sapiens
tatatgctaggtacgaggctgggctgaaatcggccgaggcgcaggcgcagcgcgggctgcgcgcgctactgcccatccccggttgtcccacttttgttcgcctctcttcggccctctactcaagagctccgtctccgtctcgccctcctcgaagtcctcgtcgcgcgcccgcgacccaggtcgccctgaaatctagcccgtccgagcgcgagtccaacggccgcggccgcaccaaggccccctcagaccgtgccatgggtgacagtgatgacgagtacgatcgaaggcgcagggacaagttcagaagagagcgcagcgactacgaccgttcccgcgagagagatgaaagacgtcgaggggacgattggaatgacagagagtgggaccgtggccgtgagcgccgtagtcggggtgaatatcgggactatgaccggaatcggcgagagcgcttctcgccacctcgccacgaactcagcccgccacagaagcgcatgaggagagactgggatgagcacagctctgacccataccacagtggctatgagatgccctatgctggggggggtgggggcccaacttatggcccccctcagccctggggccaccctgacgtccacatcatgcagcaccatgtcctgcctatccaggccaggctgggcagcattgcagagattgacctgggtgtgccgccgcccgtgatgaagaccttcaaggagtttctcctctccctggatgactcggtggatgagacggaggccgtcaagcgctataatgactacaagctggatttccggaggcaacagatgcaggatttcttcctggcgcacaaagatgaggagtggtttcggtctaagtaccacccagatgaggtggggaagcgtcggcaggaggcccggggggccctgcaaaaccgactgagggtcttcctgtccctcatggagactggctggtttgataaccttctcctggacatagacaaagctgatgccattgtcaagatgctggatgcagccgtgattaagatggaaggaggcacggagaatgatcttcgcatcctggagcaggaggaggaggaggagcaggcaggaaagcctggggagcccagcaagaaagaagaaggacgggctggagcaggcctaggggacggggagcgcaaaaccaacgacaaggatgagaagaaggaagacggcaagcaggctgagaatgacagttctaatgatgacaaaacaaagaagtcggagggtgatggggacaaggaagagaagaaagaagactccgagaaggaagccaaaaagagtagcaagaagcggaaccggaagcacagtggtgacgacagctttgacgagggcagcgtgtcagagtctgagtcggagtcagagagcggccaggctgaggaggagaaggaggaggccgaagaagcgctcaaggagaaggagaagcccaaggaagaagaatgggagaagcccaaggacgccgcggggctggagtgcaagccgcggccgctgcataagacctgctccctcttcatgcgcaacatcgcgcccaacatctcccgggccgagatcatctccctttgtaaaaggtacccaggctttatgcgggtggcgctctcagagccccagccagagaggaggtttttccgtcgtggctgggtgaccttcgaccgcagtgttaacattaaagagatctgttggaacctgcagaacatccgtgtgagtgctgggggtgggactgtggggaagaggaagggagactctgtgccacacgggacctctgtgtgactttgttcatctgatagtttggttgttctgcacactctttgaccgttttgtctgggctacgttgtctctgggcaaggctctagggcgttacatgggacggaacctatgtggtccccgtccccagggagctcgcagtctgatcaatcgctggtgctcaagagggaagggtcttagagctgctgtttctctggcaagcggggtaagtggggtaagctgctgatgatgtctgccctccagctccgggagtgtgagctgagccctggtgtgaacagggacctgacccggcgcgttcgcaacatcaacggcatcacccagcacaagcagattgtgcgcaacgacatcaagctggcggccaagctgatccacacgctggatgacaggacacagctttgggcctcagaaccagggacgcctcccctgcccacgagcctgccctcgcaaaacccgatcttgaagaatatcaccgactacctgatcgaggaagtaagcgccgaggaggaggagctgctggggagcagcgggggcgctcctcctgaggagcctcctaaggaagggaacccggcagagatcaacgtggagcgggatgagaagttgattaaggtcttggacaagctcctcctttacctgcgcatcgtgcattccttggattattacaacacctgtgagtaccccaacgaggacgagatgcccaatcgctgtgggatcatccacgttcgggggcccatgccacccaaccgcatcagtcacggggaagtgctggagtggcagaagacttttgaggagaagctcacgccgttgctgagtgtgcgggagtcactctcagaggaagaggcccagaagatggggcgcaaagacccagagcaggaagtggagaagttcgtcacctccaacacgcaggaactgggcaaggataagtggctgtgtcctctcagtggcaagaaattcaagggtcctgagtttgtgcgcaaacatatcttcaacaagcatgcagagaaaattgaggaagtgaaaaaggaagtcgcgttttttaacaacttcctcactgatgctaagcgcccagctctgcctgagatcaagccagcccagccacctggccccgcccagatactccccccaggtttgaccccaggactcccctacccacaccagactccccagggcctgatgccctatggtcagccccggcccccgatcttgggctatggagctggtgctgtccgccctgcagtccccacaggaggccctccatacccccatgccccgtatggtgctggtcgagggaactatgatgccttccgaggccagggaggttatcctgggaaacctcgcaacaggatggttcgtggagacccaagggccattgtggaatatcgggacctggatgccccagacgatgttgatttcttttgagccgtcccccgttcctcagtcctgtatcatccatacttgtactaccttgtcctatgaagctctgagaattttttgtacgatcagccttactgctaataaaagcacttccacaggg

SEQ ID NO: 438581 - DNA, 3201 bp, Homo sapiens
tatatgctaggtacgaggctgggctgaaatcggccgaggcgcaggcgcagcgcgggctgcgcgcgctactgcccatccccggttgtcccacttttgttcgcctctcttcggccctctactcaagagctccgtctccgtctcgccctcctcgaagtcctcgtcgcgcgcccgcgacccaggtcgccctgaaatctagcccgtccgagcgcgagtccaacggccgcggccgcaccaaggccccctcagaccgtgccatgggtgacagtgatgacgagtacgatcgaaggcgcagggacaagttcagaagagagcgcagcgactacgaccgttcccgcgagagagatgaaagacgtcgaggggacgattggaatgacagagagtgggaccgtggccgtgagcgccgtagtcggggtgaatatcgggactatgaccggaatcggcgagagcgcttctcgccacctcgccacgaactcagcccgccacagaagcgcatgaggagagactgggatgagcacagctctgacccataccacagtggctatgagatgccctatgctggggggggtgggggcccaacttatggcccccctcagccctggggccaccctgacgtccacatcatgcagcaccatgtcctgcctatccaggccaggctgggcagcattgcagagattgacctgggtgtgccgccgcccgtgatgaagaccttcaaggagtttctcctctccctggatgactcggtggatgagacggaggccgtcaagcgctataatgactacaagctggatttccggaggcaacagatgcaggatttcttcctggcgcacaaagatgaggagtggtttcggtctaagtaccacccagatgaggtggggaagcgtcggcaggaggcccggggggccctgcaaaaccgactgagggtcttcctgtccctcatggagactggctggtttgataaccttctcctggacatagacaaagctgatgccattgtcaagatgctggatgcagccgtgattaagatggaaggaggcacggagaatgatcttcgcatcctggagcaggaggaggaggaggagcaggcaggaaagcctggggagcccagcaagaaagaagaaggacgggctggagcaggcctaggggacggggagcgcaaaaccaacgacaaggatgagaagaaggaagacggcaagcaggctgagaatgacagttctaatgatgacaaaacaaagaagtcggagggtgatggggacaaggaagagaagaaagaagactccgagaaggaagccaaaaagagtagcaagaagcggaaccggaagcacagtggtgacgacagctttgacgagggcagcgtgtcagagtctgagtcggagtcagagagcggccaggctgaggaggagaaggaggaggccgaagaagcgctcaaggagaaggagaagcccaaggaagaagaatgggagaagcccaaggacgccgcggggctggagtgcaagccgcggccgctgcataagacctgctccctcttcatgcgcaacatcgcgcccaacatctcccgggccgagatcatctccctttgtaaaaggtacccaggctttatgcgggtggcgctctcagagccccagccagagaggaggtttttccgtcgtggctgggtgaccttcgaccgcagtgttaacattaaagagatctgttggaacctgcagaacatccgtctccgggagtgtgagctgagccctggtgtgaacagggacctgacccggcgcgttcgcaacatcaacggcatcacccagcacaagcagattgtgcgcaacgacatcaagctggcggccaagctgatccacacgctggatgacaggacacagctttgggcctcagaaccagggacgcctcccctgcccacgagcctgccctcgcaaaacccgatcttgaagaatatcaccgactacctgatcgaggaagtaagcgccgaggaggaggagctgctggggagcagcgggggcgctcctcctgaggagcctcctaaggaagggaacccggcagagatcaacgtggagcgggatgagaagttgattaaggtcttggacaagctcctcctttacctgcgcatcgtgcattccttggattattacaacacctgtgagtaccccaacgaggacgagatgcccaatcgctgtgggatcatccacgttcgggggcccatgccacccaaccgcatcagtcacggggaagtgctggagtggcagaagacttttgaggagaagctcacgccgttgctgagtgtgcgggagtcactctcagaggaagaggcccagaagatggggcgcaaagacccagagcaggaagtggagaagttcgtcacctccaacacgcaggaactgggcaaggataagtggctgtgtcctctcagtggcaagaaattcaagggtcctgagtttgtgcgcaaacatatcttcaacaagcatgcagagaaaattgaggaagtgaaaaaggaagtcgcgttttttaacaacttcctcactgatgctaagcgcccagctctgcctgagatcaagccagcccagccacctggccccgcccagatactccccccaggtttgaccccaggactcccctacccacaccagactccccagggcctgatgccctatggtcagccccggcccccgatcttgggctatggaggtaagtacaggagggagatgaaggggcttggtgagtgtgtggctttgggagaagaaaacagaggatggaattgaggacatagttttgcaactcaacactgatctctgtcatactggtgctgtccgccctgcagtccccacaggaggccctccatacccccatgccccgtatggtgctggtcgagggaactatgatgccttccgaggccagggaggttatcctgggaaacctcgcaacaggtgaggagggcagacgcccaagctttgttgccgcctgcagactcccttttgggagccctcagctctcatcctgtacctctcacctcacagatggttcgtggagacccaagggccattgtggaatatcgggacctggatgccccagacgatgttgatttcttttgagccgtcccccgttcctcagtcctgtatcatccatacttgtactaccttgtcctatgaagctctgagaattttttgtacgatcagccttactgctaataaaagcacttccacaggg

SEQ ID NO: 438582 - DNA, 2735 bp, Homo sapiens
tatatgctaggtacgaggctgggctgaaatcggccgaggcgcaggcgcagcgcgggctgcgcgcgctactgcccatccccggttgtcccacttttgttcgcctctcttcggccctctactcaagagctccgtctccgtctcgccctcctcgaagtcctcgtcgcgcgcccgcgacccaggtcgccctgaaatctagcccgtccgagcgcgagtccaacggccgcggccgcaccaaggccccctcagaccgtgccatgggtgacagtgatgacgagtacgatcgaaggcgcagggacaagttcagaagagagcgcagcgactacgaccgttcccgcgagagagatgaaagacgtcgaggggacgattggaatgacagagagtgggaccgtggccgtgagcgccgtagtcggggtgaatatcgggactatgaccggaatcggcgagagcgcttctcgccacctcgccacgaactcagcccgccacagaagcgcatgaggagagactgggatgagcacagctctgacccataccacagtggctatgagatgccctatgctggggggggtgggggcccaacttatggcccccctcagccctggggccaccctgacgtccacatcatgcagcaccatgtcctgcctatccaggccaggctgggcagcattgcagagattgacctgggtgtgccgccgcccgtgatgaagaccttcaaggagtttctcctctccctggatgactcggtggatgagacggaggccgtcaagcgctataatgactacaagctggatttccggaggcaacagatgcaggatttcttcctggcgcacaaagatgaggagtggtttcggtctaagtaccacccagatgaggtggggaagcgtcggcaggaggcccggggggccctgcaaaaccgactgagggtcttcctgtccctcatggagactggctggtttgataaccttctcctggacatagacaaagctgatgccattgtcaagatgctggatgcagccgtgattaagatggaaggaggcacggagaatgatcttcgcatcctggagcaggaggaggaggaggagcaggcaggaaagcctggggagcccagcaagaaagaagaaggacgggctggagcaggcctaggggacggggagcgcaaaaccaacgacaaggatgagaagaaggaagacggcaagcaggctgagaatgacagttctaatgatgacaaaacaaagaagtcggagggtgatggggacaaggaagagaagaaagaagactccgagaaggaagccaaaaagagtagcaagaagcggaaccggaagcacagtggtgacgacagctttgacgagggcagcgtgtcagagtctgagtcggagtcagagagcggccaggctgaggaggagaaggaggaggccgaagaagcgctcaaggagaaggagaagcccaaggaagaagaatgggagaagcccaaggacgccgcggggctggagtgcaagccgcggccgctgcataagacctgctccctcttcatgcgcaacatcgcgcccaacatctcccgggccgagatcatctccctttgtaaaaggtacccaggctttatgcgggtggcgctctcagagccccagccagagaggaggtttttccgtcgtggctgggtgaccttcgaccgcagtgttaacattaaagagatctgttggaacctgcagaacatccgtctccgggagtgtgagctgagccctggtgtgaacagggacctgacccggcgcgttcgcaacatcaacggcatcacccagcacaagcagattgtgcgcaacgacatcaagctggcggccaagctgatccacacgctggatgacaggacacagctttgggcctcagaaccagggacgcctcccctgcccacgagcctgccctcgcaaaacccgatcttgaagaatatcaccgactacctgatcgaggaagtaagcgccgaggaggaggagctgctggggagcagcgggggcgctcctcctgaggagcctcctaaggaagggaacccggcagagatcaacgtggagcgggatgagaagttgattaaggtcttggacaagctcctcctttacctgcgcatcgtgcattccttggattattacaacacctgtgagtaccccaacgaggacgagatgcccaatcgctgtgggatcatccacgttcgggggcccatgccacccaaccgcatcagtcacggggaagtgctggagtggcagaagacttttgaggagaagctcacgccgttgctgagtgtgcgggagtcactctcagaggaagaggcccagaagatggggcgcaaagacccagagcaggaagtggagaagttcgtcacctccaacacgcaggaactgggcaaggataagtggctgtgtcctctcagtggcaagaaattcaagggtcctgagtttgtgcgcaaacatatcttcaacaagcatgcagagaaaattgaggaagtgaaaaaggaagtcgcgttttttaacaacttcctcactgatgctaagcgcccagctctgcctgagatcaagccagcccagccacctggccccgcccagatactccccccaggtttgaccccaggactcccctacccacaccagactccccagggcctgatgccctatggtcagccccggcccccgatcttgggctatggagctggtgctgtcgcactgcagtccccacaggagggcttaggatatatgagcacg

SEQ ID NO: 438583 - DNA, 2812 bp, Homo sapiens
tatatgctaggtacgaggctgggctgaaatcggccgaggcgcaggcgcagcgcgggctgcgcgcgctactgcccatccccggttgtcccacttttgttcgcctctcttcggccctctactcaagagctccgtctccgtctcgccctcctcgaagtcctcgtcgcgcgcccgcgacccaggtcgccctgaaatctagcccgtccgagcgcgagtccaacggccgcggccgcaccaaggccccctcagaccgtgccatgggtgacagtgatgacgagtacgatcgaaggcgcagggacaagttcagaagagagcgcagcgactacgaccgttcccgcgagagagatgaaagacgtcgaggggacgattggaatgacagagagtgggaccgtggccgtgagcgccgtagtcggggtgaatatcgggactatgaccggaatcggcgagagcgcttctcgccacctcgccacgaactcagcccgccacagaagcgcatgaggagagactgggatgagcacagctctgacccataccacagtggctatgagatgccctatgctggggggggtgggggcccaacttatggcccccctcagccctggggccaccctgacgtccacatcatgcagcaccatgtcctgcctatccaggccaggctgggcagcattgcagagattgacctgggtgtgccgccgcccgtgatgaagaccttcaaggagtttctcctctccctggatgactcggtggatgagacggaggccgtcaagcgctataatgactacaagctggatttccggaggcaacagatgcaggatttcttcctggcgcacaaagatgaggagtggtttcggtctaagtaccacccagatgaggtggggaagcgtcggcaggaggcccggggggccctgcaaaaccgactgagggtcttcctgtccctcatggagactggctggtttgataaccttctcctggacatagacaaagctgatgccattgtcaagatgctggatgcagccgtgattaagatggaaggaggcacggagaatgatcttcgcatcctggagcaggaggaggaggaggagcaggcaggaaagcctggggagcccagcaagaaagaagaaggacgggctggagcaggcctaggggacggggagcgcaaaaccaacgacaaggatgagaagaaggaagacggcaagcaggctgagaatgacagttctaatgatgacaaaacaaagaagtcggagggtgatggggacaaggaagagaagaaagaagactccgagaaggaagccaaaaagagtagcaagaagcggaaccggaagcacagtggtgacgacagctttgacgagggcagcgtgtcagagtctgagtcggagtcagagagcggccaggctgaggaggagaaggaggaggccgaagaagcgctcaaggagaaggagaagcccaaggaagaagaatgggagaagcccaaggacgccgcggggctggagtgcaagccgcggccgctgcataagacctgctccctcttcatgcgcaacatcgcgcccaacatctcccgggccgagatcatctccctttgtaaaaggtacccaggctttatgcgggtggcgctctcagagccccagccagagaggaggtttttccgtcgtggctgggtgaccttcgaccgcagtgttaacattaaagagatctgttggaacctgcagaacatccgtctccgggagtgtgagctgagccctggtgtgaacagggacctgacccggcgcgttcgcaacatcaacggcatcacccagcacaagcagattgtgcgcaacgacatcaagctggcggccaagctgatccacacgctggatgacaggacacagctttgggcctcagaaccagggacgcctcccctgcccacgagcctgccctcgcaaaacccgatcttgaagaatatcaccgactacctgatcgaggaagtaagcgccgaggaggaggagctgctggggagcagcgggggcgctcctcctgaggagcctcctaaggaagggaacccggcagagatcaacgtggagcgggatgagaagttgattaaggtcttggacaagctcctcctttacctgcgcatcgtgcattccttggattattacaacacctgtgagtaccccaacgaggacgagatgcccaatcgctgtgggatcatccacgttcgggggcccatgccacccaaccgcatcagtcacggggaagtgctggagtggcagaagacttttgaggagaagctcacgccgttgctgagtgtgcgggagtcactctcagaggaagaggcccagaagatggggcgcaaagacccagagcaggaagtggagaagttcgtcacctccaacacgcaggaactgggcaaggataagtggctgtgtcctctcagtggcaagaaattcaaggtcctgagtttgtgcgccatatcttcaacaagcatgcagagttgaggaagtgatgcctgagatcgccagcccagacacctgggcccggccagatactactccccccaggtttgaccccaggactcccctacccacaccagactccccagggcctgatgccctatggtcagccccggcccccgatcttgggctatggaggatggttcgtggagacccaagggccattgtggaatatcgggacctggatgccccagacgatgttgatttcttttgagccgtcccccgttcctcagtcctgtatcatccatacttgtactaccttgtcctatgaagctctgagaattttttgtacgatcagccttactgctaataaaagcacttccacaggg

SEQ ID NO: 438584 - DNA, 1806 bp, Homo sapiens
tatatgctaggtacgaggctgggctgaaatcggccgaggcgcaggcgcagcgcgggctgcgcgcgctactgcccatccccggttgtcccacttttgttcgcctctcttcggccctctactcaagagctccgtctccgtctcgccctcctcgaagtcctcgtcgcgcgcccgcgacccaggtcgccctgaaatctagcccgtccgagcgcgagtccaacggccgcggccgcaccaaggccccctcagaccgtgccatgggtgacagtgatgacgagtacgatcgaaggcgcagggacaagttcagaagagagcgcagcgactacgaccgttcccgcgagagagatgaaagacgtcgaggggacgattggaatgacagagagtgggaccgtggccgtgagcgccgtagtcggggtgaatatcgggactatgaccggaatcggcgagagcgcttctcgccacctcgccacgaactcagcccgccacagaagcgcatgaggagagactgggatgagcacagctctgacccataccacagtggctatgagatgccctatgctggggggggtgggggcccaacttatggcccccctcagccctggggccaccctgacgtccacatcatgcagcaccatgtcctgcctatccaggccaggctgggcagcattgcagagattgacctgggtgtgccgccgcccgtgatgaagaccttcaaggagtttctcctctccctggatgactcggtggatgagacggaggccgtcaagcgctataatgactacaagctggatttccggaggcaacagatgcaggatttcttcctggcgcacaaagatgaggagtggtttcggtctaagtaccacccagatgaggtggggaagcgtcggcaggaggcccggggggccctgcaaaaccgactgagggtcttcctgtccctcatggagactggctggtttgataaccttctcctggacatagacaaagctgatgccattgtcaagatgctggatgcagccgtgattaagatggaaggaggcacggagaatgatcttcgcatcctggagcaggaggaggaggaggagcaggcaggaaagcctggggagcccagcaagaaagaagaaggacgggctggagcaggcctaggggacggggagcgcaaaaccaacgacaaggatgagaagaaggaagacggcaagcaggctgagaatgacagttctaatgatgacaaaacaaagaagtcggagggtgatggggacaaggaagagaagaaagaagactccgagaaggaagccaaaaagagtagcaagaagcggaaccggaagcacagtggtgacgacagctttgacgagggcagcgtgtcagagtctgagtcggagtcagagagcggccaggctgaggaggagaaggaggaggccgaagaagcgctcaaggagaaggagaagcccaaggaagaagaatgggagaagcccaaggacgccgcggggctggagtgcaagccgcggccgctgcataagacctgctccctcttcatgcgcaacatcgcgcccaacatctcccgggccgagatcatctcctttggaggtttttccgctgtggttgggtgactttcaaccgcagtgttaacattatagagatcctgtgagaccttcagaacattcctttccgggcgtgggaggtgcacctctggggtgtaccggtatctgaaccggtgccgtttgaacataaaccgcactaccccagtcaagttgtttggtgcgaaccaattaaagctggcggccaatctggtacccctctggactccacccttct

SEQ ID NO: 438585 - DNA, 1374 bp, Homo sapiens
tatatgctaggtacgaggctgggctgaaatcggccgaggcgcaggcgcagcgcgggctgcgcgcgctactgcccatccccggttgtcccacttttgttcgcctctcttcggccctctactcaagagctccgtctccgtctcgccctcctcgaagtcctcgtcgcgcgcccgcgacccaggtcgccctgaaatctagcccgtccgagcgcgagtccaacggccgcggccgcaccaaggccccctcagaccgtgccatgggtgacagtgatgacgagtacgatcgaaggcgcagggacaagttcagaagagagcgcagcgactacgaccgttcccgcgagagagatgaaagacgtcgaggggacgattggaatgacagagagtgggaccgtggccgtgagcgccgtagtcggggtgaatatcgggactatgaccggaatcggcgagagcgcttctcgccacctcgccacgaactcagcccgccacagaagcgcatgaggagagactgggatgagcacagctctgacccataccacagtggctatgagatgccctatgctggggggggtgggggcccaacttatggcccccctcagccctggggccaccctgacgtccacatcatgcagcaccatgtcctgcctatccaggccaggctgggcagcattgcagagattgacctgggtgtgccgccgcccgtgatgaagaccttcaaggagtttctcctctccctggatgactcggtggatgagacggaggccgtcaagcgctataatgactacaagctggatttccggaggcaacagatgcaggatttcttcctggcgcacaaagatgaggagtggtttcggtctaagtaccacccagatgaggtggggaagcgtcggcaggaggcccggggggccctgcaaaaccgactgagggtcttcctgtccctcatggagactggctggtttgataaccttctcctggacatagacaaagctgatgccattgtcaagatgctggatgcagccgtgattaagatggaaggaggcacggagaatgatcttcgcatcctggagcaggaggaggaggaggagcaggcaggaaagcctggggagcccagcaagaaagaagaaggacgggctggagcaggcctaggggacggggagcgcaaaaccaacgacaaggatgagaagaaggaagacggcaagcaggctgagaatgacagttctaatgatgacaaaacaaagaagtcggagggtgatggggacaaggaagagaagaaagaagactccgagaaggaagccaaaaagggtgaggtgtctgtggcctggggtcagagtgttggggctggggttctggcacgctgacttgtcccctctgctgtggctc

SEQ ID NO: 438586 - DNA, 996 bp, Homo sapiens
tatatgctaggtacgaggctgggctgaaatcggccgaggcgcaggcgcagcgcgggctgcgcgcgctactgcccatccccggttgtcccacttttgttcgcctctcttcggccctctactcaagagctccgtctccgtctcgccctcctcgaagtcctcgtcgcgcgcccgcgacccaggtcgccctgaaatctagcccgtccgagcgcgagtccaacggccgcggccgcaccaaggccccctcagaccgtgccatgggtgacagtgatgacgagtacgatcgaaggcgcagggacaagttcagaagagagcgcagcgactacgaccgttcccgcgagagagatgaaagacgtcgaggggacgattggaatgacagagagtgggaccgtggccgtgagcgccgtagtcggggtgaatatcgggactatgaccggaatcggcgagagcgcttctcgccacctcgccacgaactcagcccgccacagaagcgcatgaggagagactgggatgagcacagctctgacccataccacagtggctatgagatgccctatgctggggggggtgggggcccaacttatggcccccctcagccctggggccaccctgacgtccacatcatgcagcaccatgtcctgcctatccaggccaggctgggcagcattgcagagattgacctgggtgtgccgccgcccgtgatgaagaccttcaaggagtttctcctctccctggatgactcggtggatgagacggaggccgtcaagcgctataatgactacaagctggatttccggaggcaacagatgcaggatttcttcctggcgcacaaagatgaggagtggtgagtgcccctacttccctggacctctgccctggcatgtccccctggccccgctggtggagccacagccctgtcctcttcccagttttccctgtccagaactttctgggggcgggggtcgggaagtatgacagcattggctgatggggtctccc

SEQ ID NO: 438587 - DNA, 977 bp, Homo sapiens
gtagttcctaacgctcgagccgttatcgtctcgaaaagccgcgcgagacttgcgagatccccgcccctttcccatcacgccctgctctccccgcccttcgcgctcggtttgttagttccagttccggccgcgagggtggagctttgtgcctcggaggcgtgggtgacgcaggcgcagcgcgggctgcgcgcgctactgcccatccccggttgtcccacttttgttcgcctctcttcggccctctactcaagagctccgtctccgtctcgccctcctcgaagtcctcgtcgcgcgcccgcgacccaggtcgccctgaaatctagcccgtccgagcgcgagtccaacggccgcggccgcaccaaggtgggggaggggaggagcctggggggccccgctggggcgggagaggaaccggggtccacgggggcgggcgcggagaaactcggggcgagtggaggtgttggagccgcgttctcaggcctaggatggtgggggccgcggagggctggccttggcgggagggaagcgggcgagctgcccgcgagggacggtcccttcctccgctcgtccttttgcaccactcctaccgcctctccccggtccccaggccccctcagaccgtgccatgggtgacagtgatgacgagtacgatcgaaggcctggtgctgtccgccctgcagtccccacaggaggccctccatacccccatgccccgtatggtgctggtcgagggaactatgatgccttccgaggccagggaggttatcctgggaaacctcgcaacaggatggttcgtggagacccaagggccattgtggaatatcgggacctggatgccccagacgatgttgatttcttttgagccgtcccccgttcctcagtcctgtatcatccatacttgtactaccttgtcctatgaagctctgagaattttttgtacgatcagccttactgctaataaaagcacttccacaggg

SEQ ID NO: 438588 - DNA, 697 bp, Homo sapiens
tatatgctaggtacgaggctgggctgaaatcggccgaggcgcaggcgcagcgcgggctgcgcgcgctactgcccatccccggttgtcccacttttgttcgcctctcttcggccctctactcaagagctccgtctccgtctcgccctcctcgaagtcctcgtcgcgcgcccgcgacccaggtcgccctgaaatctagcccgtccgagcgcgagtccaacggccgcggccgcaccaaggccccctcagaccgtgccatgggtgacagtgatgacgagtacgatcgaaggcgcagggacaagttcagaagagagcgcagcgactacgaccgttcccgcgagagagatgaaagacgtcgaggggacgattggaatgacagagagtgggaccgtggccgtgagcgccgtagtcggggtgaatatcgggactatgaccggaatcggcgagagcgcttctcgccacctcgccacgaactcagcccgccacagaagcgcatgaggagagactggtgagatggagcggtttccctctcctcccctttgcctcagttccacctgggcctcccctttctcccctcacctgtgcctaaatctttgtcatttccttttctcaacttcccatcacccatcgttactttgtcccttgaaacccttgtctgggagaccatgctgtgtgtacccccgtctgtccatcctccatg

SEQ ID NO: 438589 - DNA, 367 bp, Homo sapiens
ggccagtgctggcaagggggttccttggcagcagctgacaggagggaaggttgcccggtcaggggctccaaatacaggcaggggtttttgcaaagccggggcagcgacatggcaatcgtgatgccataggaagccgaagcctgcaaagggcacagctgggtggacgcagcacctgcggccagagactggtggctgagcatgggggtgcctggcatggaaacttgcagggcttggagctgatggttaggggagggagtcaccaatatcacctctgctcctcctggcagtccccctgctgtgctatcaaatattaggtctttatactagatctttttttattaaaaaaattttttttaaagatggagtc

SEQ ID NO: 438590 - DNA, 2021 bp, Homo sapiens
  misc_feature (1403)..(1403): n is a, c, g, or t
tttccctggaaaaacaatgatttgaattcaaggaggggaggagaacaggtttcccccaactccaagcttgaggactttcttttccttttgaagtaggaatggagttctgtccccggcccccgaaggcgtccttacagctgatatttttccagctgcctatctccccagagcgtggagcggcctccagagtggggtcagggatggggcgagagggccagacctgcctgggccgggcagctcagcatctctctgagctgctgaacacctatggaggctgtgctcatgttcactggtggtgtgactttgtgtgaccttgccacttcactctttcacagcctcgtttcctttatctgtcaaatggggatcatgagtccactgggtggcttttgaagaacgtgccacaatcagagaaggtctgagctgggaaatgcaacagaggccttctcctccttgaccagtggggaaacagaggctcttaaaactggcatagatccagcttcctgcccctagtctctgtctttcccattccatcaggaccagatctcagaataggggattggcattttcatgctggggagctgggtatcattttcttttcagagacttagtagaaaataaaaggatccctgagaaattctttatgtgcaggtgcttgtcgatggtaggggtgacctcaggaccgcactgtctgcccatgaccaaggagtgagactgcttggacattgtccttgtgtcccccctgggggtctggatcaaagcccaccctgaaggtgacaacactaacctacagatgtttgttctctctcatgccctccaggggtttcctggagtctttggggaaagaggccctcctggactggatggaaatcctgtgagtatttcaagtctttgggaacaggagcgagattctgagtgaacacacagcagattttaggagcccacgctttagggtcagacagacctgggtcaaatcccagccctgtgaagtaccagctgggcacccttggacaaattacatgacgtctctaaacgctaggctcctgtctactgcggctgcaccgtcgcccccctgtaagagtccccagcccactgagcccctgggtccaaagctccaggctgcaccccatttccaggactttggaaggttcatgggtcactccccactggagaggccccagctgctgccatcttacacagcatcagcaatgtttatgggccggcagaggcatggggaagcaaacggtctgcaggccgtgtttggagaaaaggaagagctgagttccaaaggaatctccaccacaggcatgtttatagagtttgtaaataattagaggcccaggctctgttccccgaggagccaggtcagcctgccctggggagccgagtctgtctttcccttcccngctccaggccctggtgggagaaggtgttcatggttccccatctccccctggggcttcctgcctgagcagctgtgccagctgtgccctctgcagtggtggctgctgcgttcataaccagcacccgattaggcgctaattcagttccacaaatgctccctgagcctgacccagccaggctcccttggggattatagccttgacctcagaaccctgcggacctgggtttgaattttgttgtaccacttgtcaggtgtgtgagcttggaaaaatccattcacctccctgaatctcagtttccttgtctgcaaattggggggatcagaattccagcctgaggccgggcgcagtggctcacgtctgtaatcccagcactttgggaggccgaggcggctagatcacttgaggccaggagttcaagaccaccctggccaacatggcaaaaccccgtctctactaaaaatacaaaaaattagctgggcgtggtggcaggcatctgtaatcccaggtacttgggaggctgatgggggagaattgcttgaacccgggaggtggaggttgcagtgagccaagatcacgccactacactccagcctgggcaagagagtgagactctgtctc

SEQ ID NO: 438591 - DNA, 1196 bp, Homo sapiens
gtaagccaaggccccctcagagggaatgggtgactagagtcatgtctgcctgaggttctgtccaagtacccctttgactctgcccatttgttgggggtctccaaggccacacactggagataagatccctggttcatccccactaatggcagctaaggccagcaggcctgggacttccccaggaggtctagactttcatctcccatcccaatccatcctcctctttgtctctttgcagggggaaccaggggatcctggtcggccggggcctgtgggagagcaggttagttagcaacggtctctgaatgagtggctccatttattgggcccttactctgtgccaagccctttgcccagcaccctccatgcaccacctcgtgtaattctcagaacaactccagaggtaggttcagtcctctacccctttcacgaatgtggacggtgaccctcagaacggggaagtctgtaaatgagaaagctgtggatcatagtcacgacagcttttccccacagcctgactctacacacaggtttttggtgcatttgcccaaagaggttatgtgactgctcccccaggacattaaaactggaggagcccttggcagtcgttgctcgtgttcccatcagcttatagatcaggaagccaaaggccagagaagtgttaccacttgccaaggtcccttggtctaggcatccctaaattatatagaagatgaaatccaaaccagtggctctggctggttgagaagctgggtcaaggtctgaagaagagaagaggttgcaactagtcattaaaatgaaggtttgaggatcacgaccttcaattaaagtccagagaaacaccctggggcctcctgaaagcttaacctcttggctccaaggtggagaggtgttcatctcctccactcctttaaatatggagctcattcctggaaggggcttcctcaatccggaaggactgatgctggggatggccatagaggaatttggccgcaccacgaaaccccgtcagtggcgtgagagtcacacacgatgggcttcctcaccaggcctgcaacatctgttgggggaagaaaggaattaaaacagggggaggcctggatttttgaaatctttccagtgtcattcgagcgcattctgtgggaagcccgggagtttggaaaggctgccgcggcctggatatatttcctgattgg

SEQ ID NO: 438592 - DNA, 900 bp, Homo sapiens
ttggtactggggcgttgccagagtccttctcatcagtatctggatggcctatccctccctggaataggagctggggccggtgggagaagggaaacaactatttgggttaataaatgtggtcaaggcgtgtgatgggggctttatgagaaggggcaggtcttgaaaggggagggaatcccagcatcccgtgtgacgtggtggctcagcacagtccagacctcaagtcctactcagtttactcctccattgacaaatcctagccctgagagacggtctcgccttctctcttgattcagaaggaatggttgcgatacaccatctcttggtcacagttgctctgtcccagttcagctcacctactctgccagagcagtgaatgaccctcctgatgtcctctggcctaagaaccactgggagcagagagaaaaccttaggaatatgtgaaccctcacatggtatctgcatccatctggggaacctttactgagtgcacactccatcccggatgcagtacatacggtgctgaacagggcaggccgggaggctgggcccttgcgatctccaggaccagatgtgtcctccctgcctgatgcagcttcttccccctccaacagggacacaagggctatcctggaccggcagggcaccccggagaacaggggcagccaggacctgagggcagcccaggggccaaaggttaccctggcaggcaggtacctggaccggtaggagatccggccccaaggagcagggtacatgcgctccaggctctcggctgcaggccgatgaaaagagcgcctgcgtcgcagaggcaaaggtccaccaaatcgagcaagggacccagctcgaaggccggtgacacggcccacggatccgatagggcggggaaaggccggacac

SEQ ID NO: 438593 - DNA, 590 bp, Homo sapiens
acactgacccagaagccacctccttgctctgtgacaaggtataaaatctgggtaccagataccattctgccacccctcaaccaggtggtgggggaggctgaggaaagagacctgagtggttccttcagaatgaggagagggtgatcacaaccagaaggtgggcgctcctgactcccagtccagtgctcattctgtgcctcactgccttcatccccctgtcccagaggctgcattcaactcacccttgcctggaaaaagaaggaagaatgaacagagaataaacagggcaaatagaaaacacacaacaaacagtttcaataccccaattaaagctgagattgtcagagtggatgaaaaagcaagacccaactacatctgctgctacaagaaatccacttcaaatataaagatataagtaggttaaagatagatatagaaaaagacatactgtgctaacattcatcccaaacagctggagtagctattttaatatcagatgaaatgaatttcagagcaaagactactaacagtcataaagaaggtattttcataatgacaaagaagccaacttttcaaaatagcataagaat

SEQ ID NO: 438594 - DNA, 2934 bp, Homo sapiens
tgtggtgctgtgaaggacaagctgcggagccagacagacctgagttccaatgtcagttctgcctcagacttggtctgtgagctggggcaagccacggccccatcccgagctgcccttgcctcctctgcacaagcggctgggactagatggctggttgttccactcttgagctgcaaaggttttggcttcctgagaagcccagtggggaagctagatgtaagcagcagcgctggctgatggggtgggagacctgactcctaccctcccccggcaggccctaggaggagccctaggcctcgaagaatccattcaactaggtgatcccccaaacccttgtgcaagtgacccagcctctctcaatgtcagttgtcttctctgtaaaatggatacatcccagtagcaacataggcaagtacttagccatgtgacccctcctctgggggctctgccagttgtgagctctgcccagaaggtttccttccatctcggttggaggaatcccttttctgctcacccaccctgacttcatgctcacctggggctcggcaggtcacaagatgcagggtccatctacagaaccaaggaatgggctcatcccccagatacatacatcacctccatcccacgctgcctgcaggtacctactgggtggatccaaaccttggctgctcctctgacaccatcgaggtctcctgcaacttcactcatggtggacagacgtgtctcaagcccatcacggcctccaaggtcgagtttgccatcagccgggtccagatgaatttcctgcacctgctaagctccgaggtgacccagcacatcaccatccactgccttaacatgaccgtgtggcaggagggcactgggcagaccccagccaagcaggccgtacgcttccgggcctggaatggacagatttttgaagctgggggtcagttccggcccgaggtgtccatggatggctgcaaggtccaagatggccgctggcatcagacactcttcaccttccggacccaagacccccaacagctgcccatcatcagtgtggacaacctccctcctgcctcatcagggaagcagtaccgcctggaagttggacctgcgtgcttcctctgacctctgacctcgtggccactctaggcctcatggaggagggaagaggaagaggcaaggggagggtactgaggggcagatggctccaggagaggcagctcccctgcccaagggtccttgggcagaccccagctgttgtctgcccagtagaagtgggtgggggtaggaggggatagggtgtccttgggaacaatggatcccagcttagccccaaagaccaaccaaagagccagccagagtaagctggacctgcaacctgcctgagccccgtggcctctcagctctgcggccaccccgttccctccccagcttcctgcccaaagagccccacattcaagccaacttgagggaagggggcgtctcgtcagctggtccctgctagggagctattgatgtgcaatattagaaaggagacatgaaaaaaggagaaaaggaaagacagaagtgtatatatatattatttaaacaaacaaaaagaaggtgcgttactatttttttttcacccgggaaagaggtgagaggatgggaaggagcagccaggcgtgggaagcggcgagatcctcgggctgggggtgcccacgtttgctacctcccactgtgaaatcgctggtgctcacaattgtctctcacagtgtatgtgatttttttaaggaaaaaaaaaaaatccctatttaagattctgaaggtgctaccattattttgccacagactttgaagaaacttttggatgtggggcatcatccgcatctttctctctcctccaaatgacaaagtttggggaatttttgaattttcctagcatcgcccttgtgctcatcaggtaatctgctaaggaggaaaaaagaaaagaaaaaaggaaaaaaaaaaaaaaaaagcaaaacaaaaacaaaaacaaaaaccctaccagaaaccagaagtagagagatttaccatataacttatggactttgaaatgtctgtccttttaaggcagcagggaggcctgggtgcgaacatgttggcttggcccttcacggtcctggagggaggtgaggctggccttggaaggcgtgccctggagaggtcttgggtgaaaacttgaccttgaagaaaccaatcacaaaagcggcgttgggtcagggctaggcttagaggtgaagcatcaacatggaaccatctcaggaagccgcatcgcctcttccgaggtcctcacttccaggagcctgtccttgcaagatgcaatcatcgttcctgctttttcattgtcattaaattctgtagaaacccattgtcattagctccaagtgtaaatttgggtcaaggagacagaataataatgggaatctcggagttcgacaccatagtgacgttcagcgtcctctgaattgtgctacatcagcgaacaagtcggcgcttgaattggattttgaggttattttaaccatggaattatttttatagaaggggaaaatgtatgtgaaagtctctatttgtgtatttctctcctaaagttgtgtctctttgggaattggatttgatttttattatttaatacctcactttggcccgtcccccctcccaacacttctgtatcctcgccctgccgccccagcctggacgctctgcgtggaagtgcgtgtttgtagcagctcgggcctcatctcagcgctcggatccctcctgctgccagaatccactggcctctgtctcattcttgggttttcctgctgtcttcgtttacgtctctgtccacatgtcagtgtattaaaaccccaatgggttccgtttctccttttcccctctggattttaaataaatatttaaaactgaggcaatggaatgaca

SEQ ID NO: 438595 - DNA, 4047 bp, Homo sapiens
  misc_feature (1577)..(1577): n is a, c, g, or t
gcttgaaagaatgacatttgaggccaggctcaagactgcagtcccagcgctttgggaggccgagatgtggacatcctccagcggctgggcctcagctggacgaaggccgggagccctgcacccccgggagtcattcctttccagtcgggcttcatctttacgcagcgggcccggctccaggctcccacgggcaccatcattcctgccgccttgggcacagagctggcactggtgctgagcctctgctcccaccgggtgaaccatgccttcctcttcgctgtccgcagccggaaacgcaagctgcagctgggcctgcagttcctccccggcaagacggtcgtccacctcgggtcccggcgctcagtggccttcgacctcgacatgcacgacgggcgctggcaccacctggccctcgagctccgaggccgcacagtcactctggtgactgcctgcgggcagcgccgggtgcctgtcctgctgcctttccacagggaccctgcactcgaccctgggggctccttcctctttgggaagatgaacccgcatgcagtccagtttgaaggtgctctctgccagttcagtatctaccctgtgacgcaggtcgctcacaattactgtacccacctgaggaagcagtgtggacaggctgacacgtaccagtccccactgggacctctcttctcccaagactctggcagaccttttaccttccagtccgacctcgccctgctaggcctggagaacttgaccactgccacaccagccctggggtcactgccagcaggcaggggacccagggggactgtggcacccgccacgcccaccaagccccaaaggactagccccacaaaccctcaccagcatatggcggtgggaggcccagcccaaaccccgctgctacctgccaagctgtcagccagtaacgcacttgatcccatgctcccagcctctgttggcggctctaccagaacgcctcgccctgcggccgctcaaccatcacagaagatcacagccaccaaaatccccaaaagcctccctaccaagccttcggccccttctacttcaattgtgcccatcaaaagcccccatcctacccagaaaacagctccatcttcatttacaaagtcagccctacccactcagaagcaagtgccacctacttcccgtccagttcctgccagagtctcccgtcccgcagagaagcccatccagaggaacccgggaatgcccaggcccccacgccgcctggtgcagtgggagaaccgggccttcctggggaagccgggatgaagggtgaccttggacccctgggcactcctggggagcagggcctcattgggcaacggggagagccaggccttgagggtgacagtggccccatgggacctgatgggctgaagggggacaggggagacccagggcctgatggagaacatggcgagaaaggccaggaagggctgatgggtgaggacgggccccccggcccccctggcgtcactggtgtccggggtcctgaaggaaaatcagggaagcaaggcgagaagggccgcactggagccaagggtgccaagggctancaaggacagctgggtgagatgggcgtccctggagaccctggaccccctggcactccaggccctaaagggtcccggggcagcctgggaccaacgggtgctccgggacgcatgggggcccaaggagaaccgggactggctggttatgatggacacaaaggcattgtgggaccccttggacctcctggaccaaaaggcgcttggctgctcctctgacaccatcgaggtctcctgcaacttcactcatggtggacagacgtgtctcaagcccatcacggcctccaaggtcgagtttgccatcagccgggtccagatgaatttcctgcacctgctaagctccgaggtgacccagcacatcaccatccactgccttaacatgaccgtgtggcaggagggcactgggcagaccccagccaagcaggccgtacgcttccgggcctggaatggacagatttttgaagctgggggtcagttccggcccgaggtgtccatggatggctgcaaggtccaagatggccgctggcatcagacactcttcaccttccggacccaagacccccaacagctgcccatcatcagtgtggacaacctccctcctgcctcatcagggaagcagtaccgcctggaagttggacctgcgtgcttcctctgacctctgacctcgtggccactctaggcctcatggaggagggaagaggaagaggcaaggggagggtactgaggggcagatggctccaggagaggcagctcccctgcccaagggtccttgggcagaccccagctgttgtctgcccagtagaagtgggtgggggtaggaggggatagggtgtccttgggaacaatggatcccagcttagccccaaagaccaaccaaagagccagccagagtaagctggacctgcaacctgcctgagccccgtggcctctcagctctgcggccaccccgttccctccccagcttcctgcccaaagagccccacattcaagccaacttgagggaagggggcgtctcgtcagctggtccctgctagggagctattgatgtgcaatattagaaaggagacatgaaaaaaggagaaaaggaaagacagaagtgtatatatatattatttaaacaaacaaaaagaaggtgcgttactatttttttttcacccgggaaagaggtgagaggatgggaaggagcagccaggcgtgggaagcggcgagatcctcgggctgggggtgcccacgtttgctacctcccactgtgaaatcgctggtgctcacaattgtctctcacagtgtatgtgatttttttaaggaaaaaaaaaaaatccctatttaagattctgaaggtgctaccattattttgccacagactttgaagaaacttttggatgtggggcatcatccgcatctttctctctcctccaaatgacaaagtttggggaatttttgaattttcctagcatcgcccttgtgctcatcaggtaatctgctaaggaggaaaaaagaaaagaaaaaaggaaaaaaaaaaaaaaaaagcaaaacaaaaacaaaaacaaaaaccctaccagaaaccagaagtagagagatttaccatataacttatggactttgaaatgtctgtccttttaaggcagcagggaggcctgggtgcgaacatgttggcttggcccttcacggtcctggagggaggtgaggctggccttggaaggcgtgccctggagaggtcttgggtgaaaacttgaccttgaagaaaccaatcacaaaagcggcgttgggtcagggctaggcttagaggtgaagcatcaacatggaaccatctcaggaagccgcatcgcctcttccgaggtcctcacttccaggagcctgtccttgcaagatgcaatcatcgttcctgctttttcattgtcattaaattctgtagaaacccattgtcattagctccaagtgtaaatttgggtcaaggagacagaataataatgggaatctcggagttcgacaccatagtgacgttcagcgtcctctgaattgtgctacatcagcgaacaagtcggcgcttgaattggattttgaggttattttaaccatggaattatttttatagaaggggaaaatgtatgtgaaagtctctatttgtgtatttctctcctaaagttgtgtctctttgggaattggatttgatttttattatttaatacctcactttggcccgtcccccctcccaacacttctgtatcctcgccctgccgccccagcctggacgctctgcgtggaagtgcgtgtttgtagcagctcgggcctcatctcagcgctcggatccctcctgctgccagaatccactggcctctgtctcattcttgggttttcctgctgtcttcgtttacgtctctgtccacatgtcagtgtattaaaaccccaatgggttccgtttctccttttcccctctggattttaaataaatatttaaaactgaggcaatggaatgaca

SEQ ID NO: 438596 - DNA, 7171 bp, Homo sapiens
  misc_feature (1541)..(1541): n is a, c, g, or t
  misc_feature (1762)..(1762): n is a, c, g, or t
  misc_feature (1833)..(1833): n is a, c, g, or t
  misc_feature (2129)..(2129): n is a, c, g, or t
  misc_feature (3660)..(3660): n is a, c, g, or t
  misc_feature (4662)..(4662): n is a, c, g, or t
  misc_feature (4664)..(4664): n is a, c, g, or t
  misc_feature (4667)..(4667): n is a, c, g, or t
  misc_feature (4669)..(4669): n is a, c, g, or t
  misc_feature (4672)..(4672): n is a, c, g, or t
  misc_feature (4674)..(4674): n is a, c, g, or t
gcttgaaagaatgacatttgaggccaggctcaagactgcagtcccagcgctttgggaggccgagatgtggacatcctccagcggctgggcctcagctggacgaaggccgggagccctgcacccccgggagtcattcctttccagtcgggcttcatctttacgcagcgggcccggctccaggctcccacgggcaccatcattcctgccgccttgggcacagagctggcactggtgctgagcctctgctcccaccgggtgaaccatgccttcctcttcgctgtccgcagccggaaacgcaagctgcagctgggcctgcagttcctccccggcaagacggtcgtccacctcgggtcccggcgctcagtggccttcgacctcgacatgcacgacgggcgctggcaccacctggccctcgagctccgaggccgcacagtcactctggtgactgcctgcgggcagcgccgggtgcctgtcctgctgcctttccacagggaccctgcactcgaccctgggggctccttcctctttgggaagatgaacccgcatgcagtccagtttgaaggtgctctctgccagttcagtatctaccctgtgacgcaggtcgctcacaattactgtacccacctgaggaagcagtgtggacaggctgacacgtaccagtccccactgggacctctcttctcccaagactctggcagaccttttaccttccagtccgacctcgccctgctaggcctggagaacttgaccactgccacaccagccctggggtcactgccagcaggcaggggacccagggggactgtggcacccgccacgcccaccaagccccaaaggactagccccacaaaccctcaccagcatatggcggtgggaggcccagcccaaaccccgctgctacctgccaagctgtcagccagtaacgcacttgatcccatgctcccagcctctgttggcggctctaccagaacgcctcgccctgcggccgctcaaccatcacagaagatcacagccaccaaaatccccaaaagcctccctaccaagccttcggccccttctacttcaattgtgcccatcaaaagcccccatcctacccagaaaacagctccatcttcatttacaaagtcagccctacccactcagaagcaagtgccacctacttcccgtccagttcctgccagagtctcccgtcccgcagagaagcccatccagaggaacccgggaatgcccaggcccccaccgcccagcacccggcccctacctcctaccaccagctcctctaaaaaacccattcccacactagctcggactgaggccaagataaccagccatgccagtaagccggcctctgcccgcaccagcacccacaaacctcccccatttactgctttatcctcatctcctgcccctactcctggttctaccaggagtactcggccaccagccacgatggtacctccaacttcgggcaccagcactcccagaacagcacctgccgtccccactcctggctcagctcccactggaagcaagaagcccantggatcggaagcctcaaagaaagccggacccaagagcagcccccggaagcctgtccccctcagacctgggaaggcagccagggatgtccccttgagcgatctgacaaccaggcctagccccagacagccccagcccagtcagcagaccaccccggccctggtattggccccggcgcaattcctgtcctccagcccccggcccacgagcagtggctattcgntcttccacctggcaggatctacgcctttccctctgctgatggggcctccgggacccaagggagactgtggnttgccgggtccccctgggctacctgggctacctggaatccctggtgcacgtgggcctcggggtcctcctgggccttatggaaatccaggtctccccggccctcctggagccaaaggtgacatgggcttgcctgggctctccgggaatccaggacctccgggacgaaagggacacaagggctatcctggaccggcagggcaccccggagaacaggggcagccaggacctgagggcagcccaggggccaaaggttaccctggcaggcaggggttacctggaccggtaggagatcccgnccccaaaggcagcaggggctacattgggctcccagggctcttcggcctgccagggtctgatggagaacgaggcctgcctggcgttcctggcaagaggggcaagatgggtatgccggggtttcctggagtctttggggaaagaggccctcctggactggatggaaatcctggagaactgggcctgccaggcccccctggagtccccggcctcattggtgacttaggagtgttgggtccgattggctacccgggacccaagggcatgaagggactgatgggcagcgtgggggagcccggactgaaagggtgaacaaggggttccaggtgtgtcaggagatcccggattccaaggagacaaggggagccaggggttgccagggttccccggtgcacgggggaagccagggcctctgggcaaagtcggagacaaaggatccattgggtttcccgggccccctggacccgagggattcccaggagacatcggcccccctggcgacaatggcccagaaggcatgaagggtaagcctggagcccgaggcctgccgggaccccgtgggcagctggggcccgagggagatgagggacccatggggccgccaggggcccctggcttggagggtcagcctggcaggaaggggtttcctgggaggcccggcctggatggcgtgaagggggaaccaggggatcctggtcggccggggcctgtgggagagcagggatttatgggattcattggtctggtcggggagccaggaatcgtgggagaaaagggtgatcgtggcatgatgggacccccaggcgtgcctggacccaaggggtcgatggtaaggaggtcatcctggaatgccaggtggtatggggacccctggagagcctggaccccagggtcctccaggatctcgaggcccaccaggcatgaggggagcaaagggacgtcggggcccccgaggaccggacggaccagctggggagcaagggtccaggggcctgaagggccctccaggaccccagggcagaccgggccggcctggacagcagggtgtggctggtgagcgaggccacttgggctcgagaggctttcctggcatcccgggtccctcaggccccccaggcaccaagggcctcccaggagaaccgggccctcagggaccccaggggccaattgggcctccaggagagatgggacccaaggccgcctggtgcagtgggagaaccgggccttcctggggaagccgggatgaagggtgaccttggacccctgggcactcctggggagcagggcctcattgggcaacggggagagccaggccttgagggtgacagtggccccatgggacctgatgggctgaagggggacaggggagacccagggcctgatggagaacatggcgagaaaggccaggaagggctgatgggtgaggacgggccccccggcccccctggcgtcactggtgtccggggtcctgaaggaaaatcagggaagcaaggcgagaagggccgcactggagccaagggtgccaagggctancaaggacagctgggtgagatgggcgtccctggagaccctggaccccctggcactccaggccctaaagggtcccggggcagcctgggaccaacgggtgctccgggacgcatgggggcccaaggagaaccgggactggctggttatgatggacacaaaggcattgtgggaccccttggacctcctggaccaaaaggcgggggagcagggcgaggacggcaaggctgaggggccccctgggccacctggagatcggggccctgtgggtgatcgaggagaccgcggggaaccgggagaccctgggtaccctggacaggagggtgtgcaaggcctccgtggaaagccaggccagcagggccaacccgggcatccgggaccccgggggtggccgggacccaaaggatcgaaaggcgcagagggaccaaagggaaagcaaggcaaggcaggggccccaggccggaggggggtccagggcctgcaggggctgccagggccccggggcgtggtggggagacagggcctcgagggcatcgctggaccagatgggcttcctggcagggacgggcaagcaggacagcagggggagcagggagacgatggggaccctggccccatgggccctgctgggaagagaggaaatccaggtgtggccggcttacctggagcacagggacccccaggattcaagggtgagagtgggttacccggacagctgggtccccctggcaagcgaggaacagagggcagaacggggctccctggaaaccagggggagcctgggtccaaaggccagccgggcgactctggcgagatgggcttcccaggaatggcaggtctcttcggacccaagggcccgcctggagacattggcttcaaaggcatccagggccctcgggggccacctggcttgatgggaaaggaaggcatcgtcgggcccctcggaatcctgggaccttcgggactcccgggtccgaagggtgacaaaggcagccgtggggactgggnantgnanggncngggggtcctcccggccccagagggcggcccggccccccgggtcctccagggggtcctatccaattgcaacaagatgatcttggggcagctttccagacgtggatggacaccagtggagcactcaggccagagagttacagctatccagaccggctggtgctggaccagggaggagagatctttaaaaccttacactacctcagcaacctcatccagagcattaagacgcccctgggcaccaaagagaaccccgcccgggtctgcagggacctcatggactgtgagcagaagatggtggatggtacctactgggtggatccaaaccttggctgctcctctgacaccatcgaggtctcctgcaacttcactcatggtggacagacgtgtctcaagcccatcacggcctccaaggtcgagtttgccatcagccgggtccagatgaatttcctgcacctgctaagctccgaggtgacccagcacatcaccatccactgccttaacatgaccgtgtggcaggagggcactgggcagaccccagccaagcaggccgtacgcttccgggcctggaatggacagatttttgaagctgggggtcagttccggcccgaggtgtccatggatggctgcaaggtccaagatggccgctggcatcagacactcttcaccttccggacccaagacccccaacagctgcccatcatcagtgtggacaacctccctcctgcctcatcagggaagcagtaccgcctggaagttggacctgcgtgcttcctctgacctctgacctcgtggccactctaggcctcatggaggagggaagaggaagaggcaaggggagggtactgaggggcagatggctccaggagaggcagctcccctgcccaagggtccttgggcagaccccagctgttgtctgcccagtagaagtgggtgggggtaggaggggatagggtgtccttgggaacaatggatcccagcttagccccaaagaccaaccaaagagccagccagagtaagctggacctgcaacctgcctgagccccgtggcctctcagctctgcggccaccccgttccctccccagcttcctgcccaaagagccccacattcaagccaacttgagggaagggggcgtctcgtcagctggtccctgctagggagctattgatgtgcaatattagaaaggagacatgaaaaaaggagaaaaggaaagacagaagtgtatatatatattatttaaacaaacaaaaagaaggtgcgttactatttttttttcacccgggaaagaggtgagaggatgggaaggagcagccaggcgtgggaagcggcgagatcctcgggctgggggtgcccacgtttgctacctcccactgtgaaatcgctggtgctcacaattgtctctcacagtgtatgtgatttttttaaggaaaaaaaaaaaatccctatttaagattctgaaggtgctaccattattttgccacagactttgaagaaacttttggatgtggggcatcatccgcatctttctctctcctccaaatgacaaagtttggggaatttttgaattttcctagcatcgcccttgtgctcatcaggtaatctgctaaggaggaaaaaagaaaagaaaaaaggaaaaaaaaaaaaaaaaagcaaaacaaaaacaaaaacaaaaaccctaccagaaaccagaagtagagagatttaccatataacttatggactttgaaatgtctgtccttttaaggcagcagggaggcctgggtgcgaacatgttggcttggcccttcacggtcctggagggaggtgaggctggccttggaaggcgtgccctggagaggtcttgggtgaaaacttgaccttgaagaaaccaatcacaaaagcggcgttgggtcagggctaggcttagaggtgaagcatcaacatggaaccatctcaggaagccgcatcgcctcttccgaggtcctcacttccaggagcctgtccttgcaagatgcaatcatcgttcctgctttttcattgtcattaaattctgtagaaacccattgtcattagctccaagtgtaaatttgggtcaaggagacagaataataatgggaatctcggagttcgacaccatagtgacgttcagcgtcctctgaattgtgctacatcagcgaacaagtcggcgcttgaattggattttgaggttattttaaccatggaattatttttatagaaggggaaaatgtatgtgaaagtctctatttgtgtatttctctcctaaagttgtgtctctttgggaattggatttgatttttattatttaatacctcatctcagcgctcggatccctcctgctgccagaatccactggcctctgtctcattcttgggttttcctgctgtcttcgtttacgtctctgtccacatgtcagtgtattaaaaccccaatgggttccgtttctccttttcccctctggattttaaataaatatttaaaactgaggcaatggaatgaca

SEQ ID NO: 438597 - DNA, 5791 bp, Homo sapiens
  misc_feature (2233)..(2233): n is a, c, g, or t
  misc_feature (3235)..(3235): n is a, c, g, or t
  misc_feature (3237)..(3237): n is a, c, g, or t
  misc_feature (3240)..(3240): n is a, c, g, or t
  misc_feature (3242)..(3242): n is a, c, g, or t
  misc_feature (3245)..(3245): n is a, c, g, or t
  misc_feature (3247)..(3247): n is a, c, g, or t
tttccctggaaaaacaatgatttgaattcaaggaggggaggagaacaggtttcccccaactccaagcttgaggactttcttttccttttgaagtaggaatggagttctgtccccggcccccgaaggcgtccttacagctgatatttttccagctgcctatctccccagagcgtggagcggcctccagagtggggtcagggatggggcgagagggccagacctgcctgggccgggcagctcagcatctctctgagctgctgaacacctatggaggctgtgctcatgttcactggtggtgtgactttgtgtgaccttgccacttcactctttcacagcctcgtttcctttatctgtcaaatggggatcatgagtccactgggtggcttttgaagaacgtgccacaatcagagaaggtctgagctgggaaatgcaacagaggccttctcctccttgaccagtggggaaacagaggctcttaaaactggcatagatccagcttcctgcccctagtctctgtctttcccattccatcaggaccagatctcagaataggggattggcattttcatgctggggagctgggtatcattttcttttcagagacttagtagaaaataaaaggatccctgagaaattctttatgtgcaggtgcttgtcgatggtaggggtgacctcaggaccgcactgtctgcccatgaccaaggagtgagactgcttggacattgtccttgtgtcccccctgggggtctggatcaaagcccaccctgaaggtgacaacactaacctacagatgtttgttctctctcatgccctccaggggtttcctggagtctttggggaaagaggccctcctggactggatggaaatcctggagaactgggcctgccaggcccccctggagtccccggcctcattggtgacttaggagtgttgggtccgattggctacccgggacccaagggcatgaagggactgatgggcagcgtgggggagcccggactgaaagggtgaacaaggggttccaggtgtgtcaggagatcccggattccaaggagacaaggggagccaggggttgccagggttccccggtgcacgggggaagccagggcctctgggcaaagtcggagacaaaggatccattgggtttcccgggccccctggacccgagggattcccaggagacatcggcccccctggcgacaatggcccagaaggcatgaagggtaagcctggagcccgaggcctgccgggaccccgtgggcagctggggcccgagggagatgagggacccatggggccgccaggggcccctggcttggagggtcagcctggcaggaaggggtttcctgggaggcccggcctggatggcgtgaagggggaaccaggggatcctggtcggccggggcctgtgggagagcagggatttatgggattcattggtctggtcggggagccaggaatcgtgggagaaaagggtgatcgtggcatgatgggacccccaggcgtgcctggacccaaggggtcgatggtaaggaggtcatcctggaatgccaggtggtatggggacccctggagagcctggaccccagggtcctccaggatctcgaggcccaccaggcatgaggggagcaaagggacgtcggggcccccgaggaccggacggaccagctggggagcaagggtccaggggcctgaagggccctccaggaccccagggcagaccgggccggcctggacagcagggtgtggctggtgagcgaggccacttgggctcgagaggctttcctggcatcccgggtccctcaggccccccaggcaccaagggcctcccaggagaaccgggccctcagggaccccaggggccaattgggcctccaggagagatgggacccaaggccgcctggtgcagtgggagaaccgggccttcctggggaagccgggatgaagggtgaccttggacccctgggcactcctggggagcagggcctcattgggcaacggggagagccaggccttgagggtgacagtggccccatgggacctgatgggctgaagggggacaggggagacccagggcctgatggagaacatggcgagaaaggccaggaagggctgatgggtgaggacgggccccccggcccccctggcgtcactggtgtccggggtcctgaaggaaaatcagggaagcaaggcgagaagggccgcactggagccaagggtgccaagggctancaaggacagctgggtgagatgggcgtccctggagaccctggaccccctggcactccaggccctaaagggtcccggggcagcctgggaccaacgggtgctccgggacgcatgggggcccaaggagaaccgggactggctggttatgatggacacaaaggcattgtgggaccccttggacctcctggaccaaaaggcgggggagcagggcgaggacggcaaggctgaggggccccctgggccacctggagatcggggccctgtgggtgatcgaggagaccgcggggaaccgggagaccctgggtaccctggacaggagggtgtgcaaggcctccgtggaaagccaggccagcagggccaacccgggcatccgggaccccgggggtggccgggacccaaaggatcgaaaggcgcagagggaccaaagggaaagcaaggcaaggcaggggccccaggccggaggggggtccagggcctgcaggggctgccagggccccggggcgtggtggggagacagggcctcgagggcatcgctggaccagatgggcttcctggcagggacgggcaagcaggacagcagggggagcagggagacgatggggaccctggccccatgggccctgctgggaagagaggaaatccaggtgtggccggcttacctggagcacagggacccccaggattcaagggtgagagtgggttacccggacagctgggtccccctggcaagcgaggaacagagggcagaacggggctccctggaaaccagggggagcctgggtccaaaggccagccgggcgactctggcgagatgggcttcccaggaatggcaggtctcttcggacccaagggcccgcctggagacattggcttcaaaggcatccagggccctcgggggccacctggcttgatgggaaaggaaggcatcgtcgggcccctcggaatcctgggaccttcgggactcccgggtccgaagggtgacaaaggcagccgtggggactgggnantgnanggncngggggtcctcccggccccagagggcggcccggccccccgggtcctccagggggtcctatccaattgcaacaagatgatcttggggcagctttccagacgtggatggacaccagtggagcactcaggccagagagttacagctatccagaccggctggtgctggaccagggaggagagatctttaccaaagagaaccccgcccgggtctgcagggacctcatggactgtgagcagaagatggtggatggtacctactgggtggatccaaaccttggctgctcctctgacaccatcgaggtctcctgcaacttcactcatggtggacagacgtgtctcaagcccatcacggcctccaaggtcgagtttgccatcagccgggtccagatgaatttcctgcacctgctaagctccgaggtgacccagcacatcaccatccactgccttaacatgaccgtgtggcaggagggcactgggcagaccccagccaagcaggccgtacgcttccgggcctggaatggacagatttttgaagctgggggtcagttccggcccgaggtgtccatggatggctgcaaggtccaagatggccgctggcatcagacactcttcaccttccggacccaagacccccaacagctgcccatcatcagtgtggacaacctccctcctgcctcatcagggaagcagtaccgcctggaagttggacctgcgtgcttcctctgacctctgacctcgtggccactctaggcctcatggaggagggaagaggaagaggcaaggggagggtactgaggggcagatggctccaggagaggcagctcccctgcccaagggtccttgggcagaccccagctgttgtctgcccagtagaagtgggtgggggtaggaggggatagggtgtccttgggaacaatggatcccagcttagccccaaagaccaaccaaagagccagccagagtaagctggacctgcaacctgcctgagccccgtggcctctcagctctgcggccaccccgttccctccccagcttcctgcccaaagagccccacattcaagccaacttgagggaagggggcgtctcgtcagctggtccctgctagggagctattgatgtgcaatattagaaaggagacatgaaaaaaggagaaaaggaaagacagaagtgtatatatatattatttaaacaaacaaaaagaaggtgcgttactatttttttttcacccgggaaagaggtgagaggatgggaaggagcagccaggcgtgggaagcggcgagatcctcgggctgggggtgcccacgtttgctacctcccactgtgaaatcgctggtgctcacaattgtctctcacagtgtatgtgatttttttaaggaaaaaaaaaaaatccctatttaagattctgaaggtgctaccattattttgccacagactttgaagaaacttttggatgtggggcatcatccgcatctttctctctcctccaaatgacaaagtttggggaatttttgaattttcctagcatcgcccttgtgctcatcaggtaatctgctaaggaggaaaaaagaaaagaaaaaaggaaaaaaaaaaaaaaaaagcaaaacaaaaacaaaaacaaaaaccctaccagaaaccagaagtagagagatttaccatataacttatggactttgaaatgtctgtccttttaaggcagcagggaggcctgggtgcgaacatgttggcttggcccttcacggtcctggagggaggtgaggctggccttggaaggcgtgccctggagaggtcttgggtgaaaacttgaccttgaagaaaccaatcacaaaagcggcgttgggtcagggctaggcttagaggtgaagcatcaacatggaaccatctcaggaagccgcatcgcctcttccgaggtcctcacttccaggagcctgtccttgcaagatgcaatcatcgttcctgctttttcattgtcattaaattctgtagaaacccattgtcattagctccaagtgtaaatttgggtcaaggagacagaataataatgggaatctcggagttcgacaccatagtgacgttcagcgtcctctgaattgtgctacatcagcgaacaagtcggcgcttgaattggattttgaggttattttaaccatggaattatttttatagaaggggaaaatgtatgtgaaagtctctatttgtgtatttctctcctaaagttgtgtctctttgggaattggatttgatttttattatttaatacctcactttggcccgtcccccctcccaacacttctgtatcctcgccctgccgccccagcctggacgctctgcgtggaagtgcgtgtttgtagcagctcgggcctcatctcagcgctcggatccctcctgctgccagaatccactggcctctgtctcattcttgggttttcctgctgtcttcgtttacgtctctgtccacatgtcagtgtattaaaaccccaatgggttccgtttctccttttcccctctggattttaaataaatatttaaaactgaggcaatggaatgaca

SEQ ID NO: 438598 - DNA, 7129 bp, Homo sapiens
  misc_feature (1541)..(1541): n is a, c, g, or t
  misc_feature (1762)..(1762): n is a, c, g, or t
  misc_feature (1833)..(1833): n is a, c, g, or t
  misc_feature (2129)..(2129): n is a, c, g, or t
  misc_feature (3660)..(3660): n is a, c, g, or t
  misc_feature (4662)..(4662): n is a, c, g, or t
  misc_feature (4664)..(4664): n is a, c, g, or t
  misc_feature (4667)..(4667): n is a, c, g, or t
  misc_feature (4669)..(4669): n is a, c, g, or t
  misc_feature (4672)..(4672): n is a, c, g, or t
  misc_feature (4674)..(4674): n is a, c, g, or t
gcttgaaagaatgacatttgaggccaggctcaagactgcagtcccagcgctttgggaggccgagatgtggacatcctccagcggctgggcctcagctggacgaaggccgggagccctgcacccccgggagtcattcctttccagtcgggcttcatctttacgcagcgggcccggctccaggctcccacgggcaccatcattcctgccgccttgggcacagagctggcactggtgctgagcctctgctcccaccgggtgaaccatgccttcctcttcgctgtccgcagccggaaacgcaagctgcagctgggcctgcagttcctccccggcaagacggtcgtccacctcgggtcccggcgctcagtggccttcgacctcgacatgcacgacgggcgctggcaccacctggccctcgagctccgaggccgcacagtcactctggtgactgcctgcgggcagcgccgggtgcctgtcctgctgcctttccacagggaccctgcactcgaccctgggggctccttcctctttgggaagatgaacccgcatgcagtccagtttgaaggtgctctctgccagttcagtatctaccctgtgacgcaggtcgctcacaattactgtacccacctgaggaagcagtgtggacaggctgacacgtaccagtccccactgggacctctcttctcccaagactctggcagaccttttaccttccagtccgacctcgccctgctaggcctggagaacttgaccactgccacaccagccctggggtcactgccagcaggcaggggacccagggggactgtggcacccgccacgcccaccaagccccaaaggactagccccacaaaccctcaccagcatatggcggtgggaggcccagcccaaaccccgctgctacctgccaagctgtcagccagtaacgcacttgatcccatgctcccagcctctgttggcggctctaccagaacgcctcgccctgcggccgctcaaccatcacagaagatcacagccaccaaaatccccaaaagcctccctaccaagccttcggccccttctacttcaattgtgcccatcaaaagcccccatcctacccagaaaacagctccatcttcatttacaaagtcagccctacccactcagaagcaagtgccacctacttcccgtccagttcctgccagagtctcccgtcccgcagagaagcccatccagaggaacccgggaatgcccaggcccccaccgcccagcacccggcccctacctcctaccaccagctcctctaaaaaacccattcccacactagctcggactgaggccaagataaccagccatgccagtaagccggcctctgcccgcaccagcacccacaaacctcccccatttactgctttatcctcatctcctgcccctactcctggttctaccaggagtactcggccaccagccacgatggtacctccaacttcgggcaccagcactcccagaacagcacctgccgtccccactcctggctcagctcccactggaagcaagaagcccantggatcggaagcctcaaagaaagccggacccaagagcagcccccggaagcctgtccccctcagacctgggaaggcagccagggatgtccccttgagcgatctgacaaccaggcctagccccagacagccccagcccagtcagcagaccaccccggccctggtattggccccggcgcaattcctgtcctccagcccccggcccacgagcagtggctattcgntcttccacctggcaggatctacgcctttccctctgctgatggggcctccgggacccaagggagactgtggnttgccgggtccccctgggctacctgggctacctggaatccctggtgcacgtgggcctcggggtcctcctgggccttatggaaatccaggtctccccggccctcctggagccaaaggtgacatgggcttgcctgggctctccgggaatccaggacctccgggacgaaagggacacaagggctatcctggaccggcagggcaccccggagaacaggggcagccaggacctgagggcagcccaggggccaaaggttaccctggcaggcaggggttacctggaccggtaggagatcccgnccccaaaggcagcaggggctacattgggctcccagggctcttcggcctgccagggtctgatggagaacgaggcctgcctggcgttcctggcaagaggggcaagatgggtatgccggggtttcctggagtctttggggaaagaggccctcctggactggatggaaatcctggagaactgggcctgccaggcccccctggagtccccggcctcattggtgacttaggagtgttgggtccgattggctacccgggacccaagggcatgaagggactgatgggcagcgtgggggagcccggactgaaagggtgaacaaggggttccaggtgtgtcaggagatcccggattccaaggagacaaggggagccaggggttgccagggttccccggtgcacgggggaagccagggcctctgggcaaagtcggagacaaaggatccattgggtttcccgggccccctggacccgagggattcccaggagacatcggcccccctggcgacaatggcccagaaggcatgaagggtaagcctggagcccgaggcctgccgggaccccgtgggcagctggggcccgagggagatgagggacccatggggccgccaggggcccctggcttggagggtcagcctggcaggaaggggtttcctgggaggcccggcctggatggcgtgaagggggaaccaggggatcctggtcggccggggcctgtgggagagcagggatttatgggattcattggtctggtcggggagccaggaatcgtgggagaaaagggtgatcgtggcatgatgggacccccaggcgtgcctggacccaaggggtcgatggtaaggaggtcatcctggaatgccaggtggtatggggacccctggagagcctggaccccagggtcctccaggatctcgaggcccaccaggcatgaggggagcaaagggacgtcggggcccccgaggaccggacggaccagctggggagcaagggtccaggggcctgaagggccctccaggaccccagggcagaccgggccggcctggacagcagggtgtggctggtgagcgaggccacttgggctcgagaggctttcctggcatcccgggtccctcaggccccccaggcaccaagggcctcccaggagaaccgggccctcagggaccccaggggccaattgggcctccaggagagatgggacccaaggccgcctggtgcagtgggagaaccgggccttcctggggaagccgggatgaagggtgaccttggacccctgggcactcctggggagcagggcctcattgggcaacggggagagccaggccttgagggtgacagtggccccatgggacctgatgggctgaagggggacaggggagacccagggcctgatggagaacatggcgagaaaggccaggaagggctgatgggtgaggacgggccccccggcccccctggcgtcactggtgtccggggtcctgaaggaaaatcagggaagcaaggcgagaagggccgcactggagccaagggtgccaagggctancaaggacagctgggtgagatgggcgtccctggagaccctggaccccctggcactccaggccctaaagggtcccggggcagcctgggaccaacgggtgctccgggacgcatgggggcccaaggagaaccgggactggctggttatgatggacacaaaggcattgtgggaccccttggacctcctggaccaaaaggcgggggagcagggcgaggacggcaaggctgaggggccccctgggccacctggagatcggggccctgtgggtgatcgaggagaccgcggggaaccgggagaccctgggtaccctggacaggagggtgtgcaaggcctccgtggaaagccaggccagcagggccaacccgggcatccgggaccccgggggtggccgggacccaaaggatcgaaaggcgcagagggaccaaagggaaagcaaggcaaggcaggggccccaggccggaggggggtccagggcctgcaggggctgccagggccccggggcgtggtggggagacagggcctcgagggcatcgctggaccagatgggcttcctggcagggacgggcaagcaggacagcagggggagcagggagacgatggggaccctggccccatgggccctgctgggaagagaggaaatccaggtgtggccggcttacctggagcacagggacccccaggattcaagggtgagagtgggttacccggacagctgggtccccctggcaagcgaggaacagagggcagaacggggctccctggaaaccagggggagcctgggtccaaaggccagccgggcgactctggcgagatgggcttcccaggaatggcaggtctcttcggacccaagggcccgcctggagacattggcttcaaaggcatccagggccctcgggggccacctggcttgatgggaaaggaaggcatcgtcgggcccctcggaatcctgggaccttcgggactcccgggtccgaagggtgacaaaggcagccgtggggactgggnantgnanggncngggggtcctcccggccccagagggcggcccggccccccgggtcctccagggggtcctatccaattgcaacaagatgatcttggggcagctttccagacgtggatggacaccagtggagcactcaggccagagagttacagctatccagaccggctggtgctggaccagggaggagagatctttaaaaccttacactacctcagcaacctcatccagagcattaagacgcccctgggcaccaaagagaaccccgcccgggtctgcagggacctcatggactgtgagcagaagatggtggatggtacctactgggtggatccaaaccttggctgctcctctgacaccatcgaggtctcctgcaacttcactcatggtggacagacgtgtctcaagcccatcacggcctccaaggtcgagtttgccatcagccgggtccagatgaatttcctgcacctgctaagctccgaggtgacccagcacatcaccatccactgccttaacatgaccgtgtggcaggagggcactgggcagaccccagccaagcaggccgtacgcttccgggcctggaatggacagatttttgaagctgggggtcagttccggcccgaggtgtccatggatggctgcaaggtccaagatggccgctggcatcagacactcttcaccttccggacccaagacccccaacagctgcccatcatcagtgtggacaacctccctcctgcctcatcagggaagcagtaccgcctggaagttggacctgcgtgcttcctctgacctctgacctcgtggccactctaggcctcatggaggagggaagaggaagaggcaaggggagggtactgaggggcagatggctccaggagaggcagctcccctgcccaagggtccttgggcagaccccagctgttgtctgcccagtagaagtgggtgggggtaggaggggatagggtgtccttgggaacaatggatcccagcttagccccaaagaccaaccaaagagccagccagagtaagctggacctgcaacctgcctgagccccgtggcctctcagctctgcggccaccccgttccctccccagcttcctgcccaaagagccccacattcaagccaacttgagggaagggggcgtctcgtcagctggtccctgctagggagctattgatgtgcaatattagaaaggagacatgaaaaaaggagaaaaggaaagacagaagtgtatatatatattatttaaacaaacaaaaagaaggtgcgttactatttttttttcacccgggaaagaggtgagaggatgggaaggagcagccaggcgtgggaagcggcgagatcctcgggctgggggtgcccacgtttgctacctcccactgtgaaatcgctggtgctcacaattgtctctcacagtgtatgtgatttttttaaggaaaaaaaaaaaatccctatttaagattctgaaggtgctaccattattttgccacagactttgaagaaacttttggatgtggggcatcatccgcatctttctctctcctccaaatgacaaagtttggggaatttttgaattttcctagcatcgcccttgtgctcatcaggtaatctgctaaggaggaaaaaagaaaagaaaaaaggaaaaaaaaaaaaaaaaagcaaaacaaaaacaaaaacaaaaaccctaccagaaaccagaagtagagagatttaccatataacttatggactttgaaatgtctgtccttttaaggcagcagggaggcctgggtgcgaacatgttggcttggcccttcacggtcctggagggaggtgaggctggccttggaaggcgtgccctggagaggtcttgggtgaaaacttgaccttgaagaaaccaatcacaaaagcggcgttggttttctgaaaagggatccagcacacctcctcggtttttttttcaataaaagtttagaaagaaaaaaaaaaaaaaaaaaaaaaaaaaaaaaaaaaaaaaaaaaaaaaaaaaaaaaaaaaaaaaaaaaaaaagaagagggacgaggacacacactgaggaacctcaccacagagggctgcccaacacggcgcgcgcacccaaccctcactattctgatcacacccatgatggtgccaccacattgtgcgcggactccataactaaacaagccagactccgcgacgccgctccgtgaattcaaccgacacccatcaacggcagggaaaaaaagagggccacgaggcgcggaccatttcgggagaggaacagcactcctacaataccccgcgggctgggtcggacaacaaccgtgcagggcacaccaacgcgcgcacaagcagagaatttatcagccacgcatcggcgcacacctcccagaacgtaccccaaccagatacaccgtggcgaacaacacgagcgcgaaaaaccgagcgccgtctacacacaaatgtgcaacccagcggcctac

SEQ ID NO: 438599 - DNA, 1443 bp, Homo sapiens
gcacgagctcgtgccgaattcggcacgaggagacatgaaaaaaggagaaaaggaaagacagaagtgtatatatatattatttaaacaaacaaaaagaaggtgcgttactatttttttttcacccgggaaagaggtgagaggatgggaaggagcagccaggcgtgggaagcggcgagatcctcgggctgggggtgcccacgtttgctacctcccactgtgaaatcgctggtgctcacaattgtctctcacagtgtatgtgatttttttaaggaaaaaaaaaaaatccctatttaagattctgaaggtgctaccattattttgccacagactttgaagaaacttttggatgtggggcatcatccgcatctttctctctcctccaaatgacaaagtttggggaatttttgaattttcctagcatcgcccttgtgctcatcaggtaatctgctaaggaggaaaaaagaaaagaaaaaaggaaaaaaaaaaaaaaaaagcaaaacaaaaacaaaaacaaaaaccctaccagaaaccagaagtagagagatttaccatataacttatggactttgaaatgtctgtccttttaaggcagcagggaggcctgggtgcgaacatgttggcttggcccttcacggtcctggagggaggtgaggctggccttggaaggcgtgccctggagaggtcttgggtgaaaacttgaccttgaagaaaccaatcacaaaagcggcgttgggtcagggctaggcttagaggtgaagcatcaacatggaaccatctcaggaagccgcatcgcctcttccgaggtcctcacttccaggagcctgtccttgcaagatgcaatcatcgttcctgctttttcattgtcattaaattctgtagaaacccattgtcattagctccaagtgtaaatttgggtcaaggagacagaataataatgggaatctcggagttcgacaccatagtgacgttcagcgtcctctgaattgtgctacatcagcgaacaagtcggcgcttgaattggattttgaggttattttaaccatggaattatttttatagaaggggaaaatgtatgtgaaagtctctatttgtgtatttctctcctaaagttgtgtctctttgggaattggatttgatttttattatttaatacctcactttggcccgtcccccctcccaacacttctgtatcctcgccctgccgccccagcctggacgctctgcgtggaagtgcgtgtttgtagcagctcgggcctcatctcagcgctcggatccctcctgctgccagaatccactggcctctgtctcattcttgggttttcctgctgtcttcgtttacgtctctgtccacatgtcagtgtattaaaaccccaatgggttccgtttctccttttcccctctggattttaaataaatatttaaaactgaggcaatggaatgaca

SEQ ID NO: 438600 - DNA, 2954 bp, Homo sapiens
  misc_feature (1541)..(1541): n is a, c, g, or t
  misc_feature (1762)..(1762): n is a, c, g, or t
  misc_feature (1833)..(1833): n is a, c, g, or t
  misc_feature (2030)..(2030): n is a, c, g, or t
gcttgaaagaatgacatttgaggccaggctcaagactgcagtcccagcgctttgggaggccgagatgtggacatcctccagcggctgggcctcagctggacgaaggccgggagccctgcacccccgggagtcattcctttccagtcgggcttcatctttacgcagcgggcccggctccaggctcccacgggcaccatcattcctgccgccttgggcacagagctggcactggtgctgagcctctgctcccaccgggtgaaccatgccttcctcttcgctgtccgcagccggaaacgcaagctgcagctgggcctgcagttcctccccggcaagacggtcgtccacctcgggtcccggcgctcagtggccttcgacctcgacatgcacgacgggcgctggcaccacctggccctcgagctccgaggccgcacagtcactctggtgactgcctgcgggcagcgccgggtgcctgtcctgctgcctttccacagggaccctgcactcgaccctgggggctccttcctctttgggaagatgaacccgcatgcagtccagtttgaaggtgctctctgccagttcagtatctaccctgtgacgcaggtcgctcacaattactgtacccacctgaggaagcagtgtggacaggctgacacgtaccagtccccactgggacctctcttctcccaagactctggcagaccttttaccttccagtccgacctcgccctgctaggcctggagaacttgaccactgccacaccagccctggggtcactgccagcaggcaggggacccagggggactgtggcacccgccacgcccaccaagccccaaaggactagccccacaaaccctcaccagcatatggcggtgggaggcccagcccaaaccccgctgctacctgccaagctgtcagccagtaacgcacttgatcccatgctcccagcctctgttggcggctctaccagaacgcctcgccctgcggccgctcaaccatcacagaagatcacagccaccaaaatccccaaaagcctccctaccaagccttcggccccttctacttcaattgtgcccatcaaaagcccccatcctacccagaaaacagctccatcttcatttacaaagtcagccctacccactcagaagcaagtgccacctacttcccgtccagttcctgccagagtctcccgtcccgcagagaagcccatccagaggaacccgggaatgcccaggcccccaccgcccagcacccggcccctacctcctaccaccagctcctctaaaaaacccattcccacactagctcggactgaggccaagataaccagccatgccagtaagccggcctctgcccgcaccagcacccacaaacctcccccatttactgctttatcctcatctcctgcccctactcctggttctaccaggagtactcggccaccagccacgatggtacctccaacttcgggcaccagcactcccagaacagcacctgccgtccccactcctggctcagctcccactggaagcaagaagcccantggatcggaagcctcaaagaaagccggacccaagagcagcccccggaagcctgtccccctcagacctgggaaggcagccagggatgtccccttgagcgatctgacaaccaggcctagccccagacagccccagcccagtcagcagaccaccccggccctggtattggccccggcgcaattcctgtcctccagcccccggcccacgagcagtggctattcgntcttccacctggcaggatctacgcctttccctctgctgatggggcctccgggacccaagggagactgtggnttgccgggtccccctgggctacctgggctacctggaatccctggtgcacgtgggcctcggggtcctcctgggccttatggaaatccaggtctccccggccctcctggagccaaaggtgacatgggcttgcctgggctctccgggaatccaggacctccgggacgaaaggggttacctggaccggtaggagatcccgnccccaaaggcagcaggggctacattgggctcccagggctcttcggcctgccagggtctgatggagaacgaggcctgcctggcgttcctggcaagaggggcaagatgggtatgccggtccttctaccccaaagttcagaggccagaggtgggaactcaatgccttcagaaggtgccctggctggacgccatggctcacacctgtaatcccaacactttgggaggccaaggcaggcagatcgcttgagcccaggagttcgagaccagcttgggcaacatggagaaaccccatctttaccaaaaatacaaaaattagccaggtgtagtggtgtgcatctgtaatcccagctacttgggaggctgaggcggcaggatcactaggaggcagaggttgcagtgagcagttatcacaccactgcacttcagcctggatgacagagtgagaccctgtatcatgaaaaaaaaagaaggatcccctggacacagcccacctggctgattcttgtcccaggaggtgagacgatctaccttcagcatgaccaagaagagctggtttaggtgagactggaatttaccaggggagaccctaaagatgtgggggaggaagcttgggtaaggtcagatatgcccccacaaagacatgatctggaaacacacacacaccctcccctgccacactcctctgccaccctctgcaaccagttggacacgcgtttgagcagcttctacataccaggctttgcccgtgcatagctcatatgaacatgccaaactccagaggtggacctgggctctgcttgctttatgaccttggccatgtgatgttgcctaaccgagtctcaattttcccatctgtgaaatgggactgataacttttccctcaaagatagatatcaaatgcaaaatgaagtcttgcatgcaaagtg

SEQ ID NO: 438601 - DNA, 3807 bp, Homo sapiens
  misc_feature (1541)..(1541): n is a, c, g, or t
  misc_feature (1762)..(1762): n is a, c, g, or t
  misc_feature (1833)..(1833): n is a, c, g, or t
  misc_feature (2129)..(2129): n is a, c, g, or t
gcttgaaagaatgacatttgaggccaggctcaagactgcagtcccagcgctttgggaggccgagatgtggacatcctccagcggctgggcctcagctggacgaaggccgggagccctgcacccccgggagtcattcctttccagtcgggcttcatctttacgcagcgggcccggctccaggctcccacgggcaccatcattcctgccgccttgggcacagagctggcactggtgctgagcctctgctcccaccgggtgaaccatgccttcctcttcgctgtccgcagccggaaacgcaagctgcagctgggcctgcagttcctccccggcaagacggtcgtccacctcgggtcccggcgctcagtggccttcgacctcgacatgcacgacgggcgctggcaccacctggccctcgagctccgaggccgcacagtcactctggtgactgcctgcgggcagcgccgggtgcctgtcctgctgcctttccacagggaccctgcactcgaccctgggggctccttcctctttgggaagatgaacccgcatgcagtccagtttgaaggtgctctctgccagttcagtatctaccctgtgacgcaggtcgctcacaattactgtacccacctgaggaagcagtgtggacaggctgacacgtaccagtccccactgggacctctcttctcccaagactctggcagaccttttaccttccagtccgacctcgccctgctaggcctggagaacttgaccactgccacaccagccctggggtcactgccagcaggcaggggacccagggggactgtggcacccgccacgcccaccaagccccaaaggactagccccacaaaccctcaccagcatatggcggtgggaggcccagcccaaaccccgctgctacctgccaagctgtcagccagtaacgcacttgatcccatgctcccagcctctgttggcggctctaccagaacgcctcgccctgcggccgctcaaccatcacagaagatcacagccaccaaaatccccaaaagcctccctaccaagccttcggccccttctacttcaattgtgcccatcaaaagcccccatcctacccagaaaacagctccatcttcatttacaaagtcagccctacccactcagaagcaagtgccacctacttcccgtccagttcctgccagagtctcccgtcccgcagagaagcccatccagaggaacccgggaatgcccaggcccccaccgcccagcacccggcccctacctcctaccaccagctcctctaaaaaacccattcccacactagctcggactgaggccaagataaccagccatgccagtaagccggcctctgcccgcaccagcacccacaaacctcccccatttactgctttatcctcatctcctgcccctactcctggttctaccaggagtactcggccaccagccacgatggtacctccaacttcgggcaccagcactcccagaacagcacctgccgtccccactcctggctcagctcccactggaagcaagaagcccantggatcggaagcctcaaagaaagccggacccaagagcagcccccggaagcctgtccccctcagacctgggaaggcagccagggatgtccccttgagcgatctgacaaccaggcctagccccagacagccccagcccagtcagcagaccaccccggccctggtattggccccggcgcaattcctgtcctccagcccccggcccacgagcagtggctattcgntcttccacctggcaggatctacgcctttccctctgctgatggggcctccgggacccaagggagactgtggnttgccgggtccccctgggctacctgggctacctggaatccctggtgcacgtgggcctcggggtcctcctgggccttatggaaatccaggtctccccggccctcctggagccaaaggtgacatgggcttgcctgggctctccgggaatccaggacctccgggacgaaagggacacaagggctatcctggaccggcagggcaccccggagaacaggggcagccaggacctgagggcagcccaggggccaaaggttaccctggcaggcaggggttacctggaccggtaggagatcccgnccccaaaggcagcaggggctacattgggctcccagggctcttcggcctgccagggtctgatggagaacgaggcctgcctggcgttcctggcaagaggggcaagatgggtatgccggggtttcctggagtctttggggaaagaggccctcctggactggatggaaatcctggagaactgggcctgccaggcccccctggagtccccggcctcattggtgacttaggagtgttgggtccgattggctacccgggacccaagggcatgaagggactgatgggcagcgtgggggagcccggactgaaagggtgaacaaggggttccaggtgtgtcaggagatcccggattccaaggagacaaggggagccaggggttgccagggttccccggtgcacgggggaagccagggcctctgggcaaagtcggagacaaaggatccattgggtttcccgggccccctggacccgagggattcccaggagacatcggcccccctggcgacaatggcccagaaggcatgaagggtaagcctggagcccgaggcctgccgggaccccgtgggcagctggggcccgagggagatgagggacccatggggccgccaggggcccctggcttggagggtcagcctggcaggaaggggtttcctgggaggcccggcctggatggcgtgaagggggaaccaggggatcctggtcggccggggcctgtgggagagcaggttagttagcaacggtctctgaatgagtggctccatttattgggcccttactctgtgccaagccctttgcccagcaccctccatgcaccacctcgtgtaattctcagaacaactccagaggtaggttcagtcctctacccctttcacgaatgtggacggtgaccctcagaacggggaagtctgtaaatgagaaagctgtggatcatagtcacgacagcttttccccacagcctgactctacacacaggtttttggtgcatttgcccaaagaggttatgtgactgctcccccaggacattaaaactggaggagcccttggcagtcgttgctcgtgttcccatcagcttatagatcaggaagccaaaggccagagaagtgttaccacttgccaaggtcccttggtctaggcatccctaaattatatagaagatgaaatccaaaccagtggctctggctggttgagaagctgggtcaaggtctgaagaagagaagaggttgcaactagtcattaaaatgaaggtttgaggatcacgaccttcaattaaagtccagagaaacagctctgagggatgggcagagggacagcttcaatccttcctgcccagccctggggcctcctgaaagcttaacctcttggctccaaggtggagaggtgttcatctcctccactcctttaaatatggagctcattcctggaaggggcttcctcaatccggaaggactgatgctggggatggccatagaggaatttggccgcaccacgaaaccccgtcagtggcgtgagagtcacacacgatgggcttcctcaccaggcctgcaacatctgttgggggaagaaaggaattaaaacagggggaggcctggatttttgaaatctttccagtgtcattcgagcgcattctgtgggaagcccgggagtttggaaaggctgccgcggcctggatatatttcctgattgg

SEQ ID NO: 438602 - DNA, 3761 bp, Homo sapiens
  misc_feature (1541)..(1541): n is a, c, g, or t
  misc_feature (1762)..(1762): n is a, c, g, or t
  misc_feature (1833)..(1833): n is a, c, g, or t
  misc_feature (2129)..(2129): n is a, c, g, or t
gcttgaaagaatgacatttgaggccaggctcaagactgcagtcccagcgctttgggaggccgagatgtggacatcctccagcggctgggcctcagctggacgaaggccgggagccctgcacccccgggagtcattcctttccagtcgggcttcatctttacgcagcgggcccggctccaggctcccacgggcaccatcattcctgccgccttgggcacagagctggcactggtgctgagcctctgctcccaccgggtgaaccatgccttcctcttcgctgtccgcagccggaaacgcaagctgcagctgggcctgcagttcctccccggcaagacggtcgtccacctcgggtcccggcgctcagtggccttcgacctcgacatgcacgacgggcgctggcaccacctggccctcgagctccgaggccgcacagtcactctggtgactgcctgcgggcagcgccgggtgcctgtcctgctgcctttccacagggaccctgcactcgaccctgggggctccttcctctttgggaagatgaacccgcatgcagtccagtttgaaggtgctctctgccagttcagtatctaccctgtgacgcaggtcgctcacaattactgtacccacctgaggaagcagtgtggacaggctgacacgtaccagtccccactgggacctctcttctcccaagactctggcagaccttttaccttccagtccgacctcgccctgctaggcctggagaacttgaccactgccacaccagccctggggtcactgccagcaggcaggggacccagggggactgtggcacccgccacgcccaccaagccccaaaggactagccccacaaaccctcaccagcatatggcggtgggaggcccagcccaaaccccgctgctacctgccaagctgtcagccagtaacgcacttgatcccatgctcccagcctctgttggcggctctaccagaacgcctcgccctgcggccgctcaaccatcacagaagatcacagccaccaaaatccccaaaagcctccctaccaagccttcggccccttctacttcaattgtgcccatcaaaagcccccatcctacccagaaaacagctccatcttcatttacaaagtcagccctacccactcagaagcaagtgccacctacttcccgtccagttcctgccagagtctcccgtcccgcagagaagcccatccagaggaacccgggaatgcccaggcccccaccgcccagcacccggcccctacctcctaccaccagctcctctaaaaaacccattcccacactagctcggactgaggccaagataaccagccatgccagtaagccggcctctgcccgcaccagcacccacaaacctcccccatttactgctttatcctcatctcctgcccctactcctggttctaccaggagtactcggccaccagccacgatggtacctccaacttcgggcaccagcactcccagaacagcacctgccgtccccactcctggctcagctcccactggaagcaagaagcccantggatcggaagcctcaaagaaagccggacccaagagcagcccccggaagcctgtccccctcagacctgggaaggcagccagggatgtccccttgagcgatctgacaaccaggcctagccccagacagccccagcccagtcagcagaccaccccggccctggtattggccccggcgcaattcctgtcctccagcccccggcccacgagcagtggctattcgntcttccacctggcaggatctacgcctttccctctgctgatggggcctccgggacccaagggagactgtggnttgccgggtccccctgggctacctgggctacctggaatccctggtgcacgtgggcctcggggtcctcctgggccttatggaaatccaggtctccccggccctcctggagccaaaggtgacatgggcttgcctgggctctccgggaatccaggacctccgggacgaaagggacacaagggctatcctggaccggcagggcaccccggagaacaggggcagccaggacctgagggcagcccaggggccaaaggttaccctggcaggcaggggttacctggaccggtaggagatcccgnccccaaaggcagcaggggctacattgggctcccagggctcttcggcctgccagggtctgatggagaacgaggcctgcctggcgttcctggcaagaggggcaagatgggtatgccggggtttcctggagtctttggggaaagaggccctcctggactggatggaaatcctggagaactgggcctgccaggcccccctggagtccccggcctcattggtgacttaggagtgttgggtccgattggctacccgggacccaagggcatgaagggactgatgggcagcgtgggggagcccggactgaaagggtgaacaaggggttccaggtgtgtcaggagatcccggattccaaggagacaaggggagccaggggttgccagggttccccggtgcacgggggaagccagggcctctgggcaaagtcggagacaaaggatccattgggtttcccgggccccctggacccgagggattcccaggagacatcggcccccctggcgacaatggcccagaaggcatgaagggtaagcctggagcccgaggcctgccgggaccccgtgggcagctggggcccgagggagatgagggacccatggggccgccaggggcccctggcttggagggtcagcctggcaggaaggggtttcctgggaggcccggcctggatggcgtgaagggggaaccaggggatcctggtcggccggggcctgtgggagagcaggttagttagcaacggtctctgaatgagtggctccatttattgggcccttactctgtgccaagccctttgcccagcaccctccatgcaccacctcgtgtaattctcagaacaactccagaggtaggttcagtcctctacccctttcacgaatgtggacggtgaccctcagaacggggaagtctgtaaatgagaaagctgtggatcatagtcacgacagcttttccccacagcctgactctacacacaggtttttggtgcatttgcccaaagaggttatgtgactgctcccccaggacattaaaactggaggagcccttggcagtcgttgctcgtgttcccatcagcttatagatcaggaagccaaaggccagagaagtgttaccacttgccaaggtcccttggtctaggcatccctaaattatatagaagatgaaatccaaaccagtggctctggctggttgagaagctgggtcaaggtctgaagaagagaagaggttgcaactagtcattaaaatgaaggtttgaggatcacgaccttcaattaaagtccagagaaacaccctggggcctcctgaaagcttaacctcttggctccaaggtggagaggtgttcatctcctccactcctttaaatatggagctcattcctggaaggggcttcctcaatccggaaggactgatgctggggatggccatagaggaatttggccgcaccacgaaaccccgtcagtggcgtgagagtcacacacgatgggcttcctcaccaggcctgcaacatctgttgggggaagaaaggaattaaaacagggggaggcctggatttttgaaatctttccagtgtcattcgagcgcattctgtgggaagcccgggagtttggaaaggctgccgcggcctggatatatttcctgattgg

SEQ ID NO: 438603 - DNA, 7272 bp, Homo sapiens
  misc_feature (1541)..(1541): n is a, c, g, or t
  misc_feature (1762)..(1762): n is a, c, g, or t
  misc_feature (1833)..(1833): n is a, c, g, or t
  misc_feature (2129)..(2129): n is a, c, g, or t
  misc_feature (3660)..(3660): n is a, c, g, or t
  misc_feature (4662)..(4662): n is a, c, g, or t
  misc_feature (4664)..(4664): n is a, c, g, or t
  misc_feature (4667)..(4667): n is a, c, g, or t
  misc_feature (4669)..(4669): n is a, c, g, or t
  misc_feature (4672)..(4672): n is a, c, g, or t
  misc_feature (4674)..(4674): n is a, c, g, or t
gcttgaaagaatgacatttgaggccaggctcaagactgcagtcccagcgctttgggaggccgagatgtggacatcctccagcggctgggcctcagctggacgaaggccgggagccctgcacccccgggagtcattcctttccagtcgggcttcatctttacgcagcgggcccggctccaggctcccacgggcaccatcattcctgccgccttgggcacagagctggcactggtgctgagcctctgctcccaccgggtgaaccatgccttcctcttcgctgtccgcagccggaaacgcaagctgcagctgggcctgcagttcctccccggcaagacggtcgtccacctcgggtcccggcgctcagtggccttcgacctcgacatgcacgacgggcgctggcaccacctggccctcgagctccgaggccgcacagtcactctggtgactgcctgcgggcagcgccgggtgcctgtcctgctgcctttccacagggaccctgcactcgaccctgggggctccttcctctttgggaagatgaacccgcatgcagtccagtttgaaggtgctctctgccagttcagtatctaccctgtgacgcaggtcgctcacaattactgtacccacctgaggaagcagtgtggacaggctgacacgtaccagtccccactgggacctctcttctcccaagactctggcagaccttttaccttccagtccgacctcgccctgctaggcctggagaacttgaccactgccacaccagccctggggtcactgccagcaggcaggggacccagggggactgtggcacccgccacgcccaccaagccccaaaggactagccccacaaaccctcaccagcatatggcggtgggaggcccagcccaaaccccgctgctacctgccaagctgtcagccagtaacgcacttgatcccatgctcccagcctctgttggcggctctaccagaacgcctcgccctgcggccgctcaaccatcacagaagatcacagccaccaaaatccccaaaagcctccctaccaagccttcggccccttctacttcaattgtgcccatcaaaagcccccatcctacccagaaaacagctccatcttcatttacaaagtcagccctacccactcagaagcaagtgccacctacttcccgtccagttcctgccagagtctcccgtcccgcagagaagcccatccagaggaacccgggaatgcccaggcccccaccgcccagcacccggcccctacctcctaccaccagctcctctaaaaaacccattcccacactagctcggactgaggccaagataaccagccatgccagtaagccggcctctgcccgcaccagcacccacaaacctcccccatttactgctttatcctcatctcctgcccctactcctggttctaccaggagtactcggccaccagccacgatggtacctccaacttcgggcaccagcactcccagaacagcacctgccgtccccactcctggctcagctcccactggaagcaagaagcccantggatcggaagcctcaaagaaagccggacccaagagcagcccccggaagcctgtccccctcagacctgggaaggcagccagggatgtccccttgagcgatctgacaaccaggcctagccccagacagccccagcccagtcagcagaccaccccggccctggtattggccccggcgcaattcctgtcctccagcccccggcccacgagcagtggctattcgntcttccacctggcaggatctacgcctttccctctgctgatggggcctccgggacccaagggagactgtggnttgccgggtccccctgggctacctgggctacctggaatccctggtgcacgtgggcctcggggtcctcctgggccttatggaaatccaggtctccccggccctcctggagccaaaggtgacatgggcttgcctgggctctccgggaatccaggacctccgggacgaaagggacacaagggctatcctggaccggcagggcaccccggagaacaggggcagccaggacctgagggcagcccaggggccaaaggttaccctggcaggcaggggttacctggaccggtaggagatcccgnccccaaaggcagcaggggctacattgggctcccagggctcttcggcctgccagggtctgatggagaacgaggcctgcctggcgttcctggcaagaggggcaagatgggtatgccggggtttcctggagtctttggggaaagaggccctcctggactggatggaaatcctggagaactgggcctgccaggcccccctggagtccccggcctcattggtgacttaggagtgttgggtccgattggctacccgggacccaagggcatgaagggactgatgggcagcgtgggggagcccggactgaaagggtgaacaaggggttccaggtgtgtcaggagatcccggattccaaggagacaaggggagccaggggttgccagggttccccggtgcacgggggaagccagggcctctgggcaaagtcggagacaaaggatccattgggtttcccgggccccctggacccgagggattcccaggagacatcggcccccctggcgacaatggcccagaaggcatgaagggtaagcctggagcccgaggcctgccgggaccccgtgggcagctggggcccgagggagatgagggacccatggggccgccaggggcccctggcttggagggtcagcctggcaggaaggggtttcctgggaggcccggcctggatggcgtgaagggggaaccaggggatcctggtcggccggggcctgtgggagagcagggatttatgggattcattggtctggtcggggagccaggaatcgtgggagaaaagggtgatcgtggcatgatgggacccccaggcgtgcctggacccaaggggtcgatggtaaggaggtcatcctggaatgccaggtggtatggggacccctggagagcctggaccccagggtcctccaggatctcgaggcccaccaggcatgaggggagcaaagggacgtcggggcccccgaggaccggacggaccagctggggagcaagggtccaggggcctgaagggccctccaggaccccagggcagaccgggccggcctggacagcagggtgtggctggtgagcgaggccacttgggctcgagaggctttcctggcatcccgggtccctcaggccccccaggcaccaagggcctcccaggagaaccgggccctcagggaccccaggggccaattgggcctccaggagagatgggacccaaggccgcctggtgcagtgggagaaccgggccttcctggggaagccgggatgaagggtgaccttggacccctgggcactcctggggagcagggcctcattgggcaacggggagagccaggccttgagggtgacagtggccccatgggacctgatgggctgaagggggacaggggagacccagggcctgatggagaacatggcgagaaaggccaggaagggctgatgggtgaggacgggccccccggcccccctggcgtcactggtgtccggggtcctgaaggaaaatcagggaagcaaggcgagaagggccgcactggagccaagggtgccaagggctancaaggacagctgggtgagatgggcgtccctggagaccctggaccccctggcactccaggccctaaagggtcccggggcagcctgggaccaacgggtgctccgggacgcatgggggcccaaggagaaccgggactggctggttatgatggacacaaaggcattgtgggaccccttggacctcctggaccaaaaggcgggggagcagggcgaggacggcaaggctgaggggccccctgggccacctggagatcggggccctgtgggtgatcgaggagaccgcggggaaccgggagaccctgggtaccctggacaggagggtgtgcaaggcctccgtggaaagccaggccagcagggccaacccgggcatccgggaccccgggggtggccgggacccaaaggatcgaaaggcgcagagggaccaaagggaaagcaaggcaaggcaggggccccaggccggaggggggtccagggcctgcaggggctgccagggccccggggcgtggtggggagacagggcctcgagggcatcgctggaccagatgggcttcctggcagggacgggcaagcaggacagcagggggagcagggagacgatggggaccctggccccatgggccctgctgggaagagaggaaatccaggtgtggccggcttacctggagcacagggacccccaggattcaagggtgagagtgggttacccggacagctgggtccccctggcaagcgaggaacagagggcagaacggggctccctggaaaccagggggagcctgggtccaaaggccagccgggcgactctggcgagatgggcttcccaggaatggcaggtctcttcggacccaagggcccgcctggagacattggcttcaaaggcatccagggccctcgggggccacctggcttgatgggaaaggaaggcatcgtcgggcccctcggaatcctgggaccttcgggactcccgggtccgaagggtgacaaaggcagccgtggggactgggnantgnanggncngggggtcctcccggccccagagggcggcccggccccccgggtcctccagggggtcctatccaattgcaacaagatgatcttggggcagctttccagacgtggatggacaccagtggagcactcaggccagagagttacagctatccagaccggctggtgctggaccagggaggagagatctttaaaaccttacactacctcagcaacctcatccagagcattaagacgcccctgggcaccaaagagaaccccgcccgggtctgcagggacctcatggactgtgagcagaagatggtggatggtacctactgggtggatccaaaccttggctgctcctctgacaccatcgaggtctcctgcaacttcactcatggtggacagacgtgtctcaagcccatcacggcctccaaggtcgagtttgccatcagccgggtccagatgaatttcctgcacctgctaagctccgaggtgacccagcacatcaccatccactgccttaacatgaccgtgtggcaggagggcactgggcagaccccagccaagcaggccgtacgcttccgggcctggaatggacagatttttgaagctgggggtcagttccggcccgaggtgtccatggatggctgcaaggtccaagatggccgctggcatcagacactcttcaccttccggacccaagacccccaacagctgcccatcatcagtgtggacaacctccctcctgcctcatcagggaagcagtaccgcctggaagttggacctgcgtgcttcctctgacctctgacctcgtggccactctaggcctcatggaggagggaagaggaagaggcaaggggagggtactgaggggcagatggctccaggagaggcagctcccctgcccaagggtccttgggcagaccccagctgttgtctgcccagtagaagtgggtgggggtaggaggggatagggtgtccttgggaacaatggatcccagcttagccccaaagaccaaccaaagagccagccagagtaagctggacctgcaacctgcctgagccccgtggcctctcagctctgcggccaccccgttccctccccagcttcctgcccaaagagccccacattcaagccaacttgagggaagggggcgtctcgtcagctggtccctgctagggagctattgatgtgcaatattagaaaggagacatgaaaaaaggagaaaaggaaagacagaagtgtatatatatattatttaaacaaacaaaaagaaggtgcgttactatttttttttcacccgggaaagaggtgagaggatgggaaggagcagccaggcgtgggaagcggcgagatcctcgggctgggggtgcccacgtttgctacctcccactgtgaaatcgctggtgctcacaattgtctctcacagtgtatgtgatttttttaaggaaaaaaaaaaaatccctatttaagattctgaaggtgctaccattattttgccacagactttgaagaaacttttggatgtggggcatcatccgcatctttctctctcctccaaatgacaaagtttggggaatttttgaattttcctagcatcgcccttgtgctcatcaggtaatctgctaaggaggaaaaaagaaaagaaaaaaggaaaaaaaaaaaaaaaaagcaaaacaaaaacaaaaacaaaaaccctaccagaaaccagaagtagagagatttaccatataacttatggactttgaaatgtctgtccttttaaggcagcagggaggcctgggtgcgaacatgttggcttggcccttcacggtcctggagggaggtgaggctggccttggaaggcgtgccctggagaggtcttgggtgaaaacttgaccttgaagaaaccaatcacaaaagcggcgttgggtcagggctaggcttagaggtgaagcatcaacatggaaccatctcaggaagccgcatcgcctcttccgaggtcctcacttccaggagcctgtccttgcaagatgcaatcatcgttcctgctttttcattgtcattaaattctgtagaaacccattgtcattagctccaagtgtaaatttgggtcaaggagacagaataataatgggaatctcggagttcgacaccatagtgacgttcagcgtcctctgaattgtgctacatcagcgaacaagtcggcgcttgaattggattttgaggttattttaaccatggaattatttttatagaaggggaaaatgtatgtgaaagtctctatttgtgtatttctctcctaaagttgtgtctctttgggaattggatttgatttttattatttaatacctcactttggcccgtcccccctcccaacacttctgtatcctcgccctgccgccccagcctggacgctctgcgtggaagtgcgtgtttgtagcagctcgggcctcatctcagcgctcggatccctcctgctgccagaatccactggcctctgtctcattcttgggttttcctgctgtcttcgtttacgtctctgtccacatgtcagtgtattaaaaccccaatgggttccgtttctccttttcccctctggattttaaataaatatttaaaactgaggcaatggaatgaca

SEQ ID NO: 438604 - DNA, 5135 bp, Homo sapiens
  misc_feature (1577)..(1577): n is a, c, g, or t
  misc_feature (2579)..(2579): n is a, c, g, or t
  misc_feature (2581)..(2581): n is a, c, g, or t
  misc_feature (2584)..(2584): n is a, c, g, or t
  misc_feature (2586)..(2586): n is a, c, g, or t
  misc_feature (2589)..(2589): n is a, c, g, or t
  misc_feature (2591)..(2591): n is a, c, g, or t
gcttgaaagaatgacatttgaggccaggctcaagactgcagtcccagcgctttgggaggccgagatgtggacatcctccagcggctgggcctcagctggacgaaggccgggagccctgcacccccgggagtcattcctttccagtcgggcttcatctttacgcagcgggcccggctccaggctcccacgggcaccatcattcctgccgccttgggcacagagctggcactggtgctgagcctctgctcccaccgggtgaaccatgccttcctcttcgctgtccgcagccggaaacgcaagctgcagctgggcctgcagttcctccccggcaagacggtcgtccacctcgggtcccggcgctcagtggccttcgacctcgacatgcacgacgggcgctggcaccacctggccctcgagctccgaggccgcacagtcactctggtgactgcctgcgggcagcgccgggtgcctgtcctgctgcctttccacagggaccctgcactcgaccctgggggctccttcctctttgggaagatgaacccgcatgcagtccagtttgaaggtgctctctgccagttcagtatctaccctgtgacgcaggtcgctcacaattactgtacccacctgaggaagcagtgtggacaggctgacacgtaccagtccccactgggacctctcttctcccaagactctggcagaccttttaccttccagtccgacctcgccctgctaggcctggagaacttgaccactgccacaccagccctggggtcactgccagcaggcaggggacccagggggactgtggcacccgccacgcccaccaagccccaaaggactagccccacaaaccctcaccagcatatggcggtgggaggcccagcccaaaccccgctgctacctgccaagctgtcagccagtaacgcacttgatcccatgctcccagcctctgttggcggctctaccagaacgcctcgccctgcggccgctcaaccatcacagaagatcacagccaccaaaatccccaaaagcctccctaccaagccttcggccccttctacttcaattgtgcccatcaaaagcccccatcctacccagaaaacagctccatcttcatttacaaagtcagccctacccactcagaagcaagtgccacctacttcccgtccagttcctgccagagtctcccgtcccgcagagaagcccatccagaggaacccgggaatgcccaggcccccacgccgcctggtgcagtgggagaaccgggccttcctggggaagccgggatgaagggtgaccttggacccctgggcactcctggggagcagggcctcattgggcaacggggagagccaggccttgagggtgacagtggccccatgggacctgatgggctgaagggggacaggggagacccagggcctgatggagaacatggcgagaaaggccaggaagggctgatgggtgaggacgggccccccggcccccctggcgtcactggtgtccggggtcctgaaggaaaatcagggaagcaaggcgagaagggccgcactggagccaagggtgccaagggctancaaggacagctgggtgagatgggcgtccctggagaccctggaccccctggcactccaggccctaaagggtcccggggcagcctgggaccaacgggtgctccgggacgcatgggggcccaaggagaaccgggactggctggttatgatggacacaaaggcattgtgggaccccttggacctcctggaccaaaaggcgggggagcagggcgaggacggcaaggctgaggggccccctgggccacctggagatcggggccctgtgggtgatcgaggagaccgcggggaaccgggagaccctgggtaccctggacaggagggtgtgcaaggcctccgtggaaagccaggccagcagggccaacccgggcatccgggaccccgggggtggccgggacccaaaggatcgaaaggcgcagagggaccaaagggaaagcaaggcaaggcaggggccccaggccggaggggggtccagggcctgcaggggctgccagggccccggggcgtggtggggagacagggcctcgagggcatcgctggaccagatgggcttcctggcagggacgggcaagcaggacagcagggggagcagggagacgatggggaccctggccccatgggccctgctgggaagagaggaaatccaggtgtggccggcttacctggagcacagggacccccaggattcaagggtgagagtgggttacccggacagctgggtccccctggcaagcgaggaacagagggcagaacggggctccctggaaaccagggggagcctgggtccaaaggccagccgggcgactctggcgagatgggcttcccaggaatggcaggtctcttcggacccaagggcccgcctggagacattggcttcaaaggcatccagggccctcgggggccacctggcttgatgggaaaggaaggcatcgtcgggcccctcggaatcctgggaccttcgggactcccgggtccgaagggtgacaaaggcagccgtggggactgggnantgnanggncngggggtcctcccggccccagagggcggcccggccccccgggtcctccagggggtcctatccaattgcaacaagatgatcttggggcagctttccagacgtggatggacaccagtggagcactcaggccagagagttacagctatccagaccggctggtgctggaccagggaggagagatctttaccaaagagaaccccgcccgggtctgcagggacctcatggactgtgagcagaagatggtggatggtacctactgggtggatccaaaccttggctgctcctctgacaccatcgaggtctcctgcaacttcactcatggtggacagacgtgtctcaagcccatcacggcctccaaggtcgagtttgccatcagccgggtccagatgaatttcctgcacctgctaagctccgaggtgacccagcacatcaccatccactgccttaacatgaccgtgtggcaggagggcactgggcagaccccagccaagcaggccgtacgcttccgggcctggaatggacagatttttgaagctgggggtcagttccggcccgaggtgtccatggatggctgcaaggtccaagatggccgctggcatcagacactcttcaccttccggacccaagacccccaacagctgcccatcatcagtgtggacaacctccctcctgcctcatcagggaagcagtaccgcctggaagttggacctgcgtgcttcctctgacctctgacctcgtggccactctaggcctcatggaggagggaagaggaagaggcaaggggagggtactgaggggcagatggctccaggagaggcagctcccctgcccaagggtccttgggcagaccccagctgttgtctgcccagtagaagtgggtgggggtaggaggggatagggtgtccttgggaacaatggatcccagcttagccccaaagaccaaccaaagagccagccagagtaagctggacctgcaacctgcctgagccccgtggcctctcagctctgcggccaccccgttccctccccagcttcctgcccaaagagccccacattcaagccaacttgagggaagggggcgtctcgtcagctggtccctgctagggagctattgatgtgcaatattagaaaggagacatgaaaaaaggagaaaaggaaagacagaagtgtatatatatattatttaaacaaacaaaaagaaggtgcgttactatttttttttcacccgggaaagaggtgagaggatgggaaggagcagccaggcgtgggaagcggcgagatcctcgggctgggggtgcccacgtttgctacctcccactgtgaaatcgctggtgctcacaattgtctctcacagtgtatgtgatttttttaaggaaaaaaaaaaaatccctatttaagattctgaaggtgctaccattattttgccacagactttgaagaaacttttggatgtggggcatcatccgcatctttctctctcctccaaatgacaaagtttggggaatttttgaattttcctagcatcgcccttgtgctcatcaggtaatctgctaaggaggaaaaaagaaaagaaaaaaggaaaaaaaaaaaaaaaaagcaaaacaaaaacaaaaacaaaaaccctaccagaaaccagaagtagagagatttaccatataacttatggactttgaaatgtctgtccttttaaggcagcagggaggcctgggtgcgaacatgttggcttggcccttcacggtcctggagggaggtgaggctggccttggaaggcgtgccctggagaggtcttgggtgaaaacttgaccttgaagaaaccaatcacaaaagcggcgttgggtcagggctaggcttagaggtgaagcatcaacatggaaccatctcaggaagccgcatcgcctcttccgaggtcctcacttccaggagcctgtccttgcaagatgcaatcatcgttcctgctttttcattgtcattaaattctgtagaaacccattgtcattagctccaagtgtaaatttgggtcaaggagacagaataataatgggaatctcggagttcgacaccatagtgacgttcagcgtcctctgaattgtgctacatcagcgaacaagtcggcgcttgaattggattttgaggttattttaaccatggaattatttttatagaaggggaaaatgtatgtgaaagtctctatttgtgtatttctctcctaaagttgtgtctctttgggaattggatttgatttttattatttaatacctcactttggcccgtcccccctcccaacacttctgtatcctcgccctgccgccccagcctggacgctctgcgtggaagtgcgtgtttgtagcagctcgggcctcatctcagcgctcggatccctcctgctgccagaatccactggcctctgtctcattcttgggttttcctgctgtcttcgtttacgtctctgtccacatgtcagtgtattaaaaccccaatgggttccgtttctccttttcccctctggattttaaataaatatttaaaactgaggcaatggaatgaca

SEQ ID NO: 438605 - DNA, 7219 bp, Homo sapiens
  misc_feature (1541)..(1541): n is a, c, g, or t
  misc_feature (1762)..(1762): n is a, c, g, or t
  misc_feature (1833)..(1833): n is a, c, g, or t
  misc_feature (2129)..(2129): n is a, c, g, or t
  misc_feature (3660)..(3660): n is a, c, g, or t
  misc_feature (4662)..(4662): n is a, c, g, or t
  misc_feature (4664)..(4664): n is a, c, g, or t
  misc_feature (4667)..(4667): n is a, c, g, or t
  misc_feature (4669)..(4669): n is a, c, g, or t
  misc_feature (4672)..(4672): n is a, c, g, or t
  misc_feature (4674)..(4674): n is a, c, g, or t
gcttgaaagaatgacatttgaggccaggctcaagactgcagtcccagcgctttgggaggccgagatgtggacatcctccagcggctgggcctcagctggacgaaggccgggagccctgcacccccgggagtcattcctttccagtcgggcttcatctttacgcagcgggcccggctccaggctcccacgggcaccatcattcctgccgccttgggcacagagctggcactggtgctgagcctctgctcccaccgggtgaaccatgccttcctcttcgctgtccgcagccggaaacgcaagctgcagctgggcctgcagttcctccccggcaagacggtcgtccacctcgggtcccggcgctcagtggccttcgacctcgacatgcacgacgggcgctggcaccacctggccctcgagctccgaggccgcacagtcactctggtgactgcctgcgggcagcgccgggtgcctgtcctgctgcctttccacagggaccctgcactcgaccctgggggctccttcctctttgggaagatgaacccgcatgcagtccagtttgaaggtgctctctgccagttcagtatctaccctgtgacgcaggtcgctcacaattactgtacccacctgaggaagcagtgtggacaggctgacacgtaccagtccccactgggacctctcttctcccaagactctggcagaccttttaccttccagtccgacctcgccctgctaggcctggagaacttgaccactgccacaccagccctggggtcactgccagcaggcaggggacccagggggactgtggcacccgccacgcccaccaagccccaaaggactagccccacaaaccctcaccagcatatggcggtgggaggcccagcccaaaccccgctgctacctgccaagctgtcagccagtaacgcacttgatcccatgctcccagcctctgttggcggctctaccagaacgcctcgccctgcggccgctcaaccatcacagaagatcacagccaccaaaatccccaaaagcctccctaccaagccttcggccccttctacttcaattgtgcccatcaaaagcccccatcctacccagaaaacagctccatcttcatttacaaagtcagccctacccactcagaagcaagtgccacctacttcccgtccagttcctgccagagtctcccgtcccgcagagaagcccatccagaggaacccgggaatgcccaggcccccaccgcccagcacccggcccctacctcctaccaccagctcctctaaaaaacccattcccacactagctcggactgaggccaagataaccagccatgccagtaagccggcctctgcccgcaccagcacccacaaacctcccccatttactgctttatcctcatctcctgcccctactcctggttctaccaggagtactcggccaccagccacgatggtacctccaacttcgggcaccagcactcccagaacagcacctgccgtccccactcctggctcagctcccactggaagcaagaagcccantggatcggaagcctcaaagaaagccggacccaagagcagcccccggaagcctgtccccctcagacctgggaaggcagccagggatgtccccttgagcgatctgacaaccaggcctagccccagacagccccagcccagtcagcagaccaccccggccctggtattggccccggcgcaattcctgtcctccagcccccggcccacgagcagtggctattcgntcttccacctggcaggatctacgcctttccctctgctgatggggcctccgggacccaagggagactgtggnttgccgggtccccctgggctacctgggctacctggaatccctggtgcacgtgggcctcggggtcctcctgggccttatggaaatccaggtctccccggccctcctggagccaaaggtgacatgggcttgcctgggctctccgggaatccaggacctccgggacgaaagggacacaagggctatcctggaccggcagggcaccccggagaacaggggcagccaggacctgagggcagcccaggggccaaaggttaccctggcaggcaggggttacctggaccggtaggagatcccgnccccaaaggcagcaggggctacattgggctcccagggctcttcggcctgccagggtctgatggagaacgaggcctgcctggcgttcctggcaagaggggcaagatgggtatgccggggtttcctggagtctttggggaaagaggccctcctggactggatggaaatcctggagaactgggcctgccaggcccccctggagtccccggcctcattggtgacttaggagtgttgggtccgattggctacccgggacccaagggcatgaagggactgatgggcagcgtgggggagcccggactgaaagggtgaacaaggggttccaggtgtgtcaggagatcccggattccaaggagacaaggggagccaggggttgccagggttccccggtgcacgggggaagccagggcctctgggcaaagtcggagacaaaggatccattgggtttcccgggccccctggacccgagggattcccaggagacatcggcccccctggcgacaatggcccagaaggcatgaagggtaagcctggagcccgaggcctgccgggaccccgtgggcagctggggcccgagggagatgagggacccatggggccgccaggggcccctggcttggagggtcagcctggcaggaaggggtttcctgggaggcccggcctggatggcgtgaagggggaaccaggggatcctggtcggccggggcctgtgggagagcagggatttatgggattcattggtctggtcggggagccaggaatcgtgggagaaaagggtgatcgtggcatgatgggacccccaggcgtgcctggacccaaggggtcgatggtaaggaggtcatcctggaatgccaggtggtatggggacccctggagagcctggaccccagggtcctccaggatctcgaggcccaccaggcatgaggggagcaaagggacgtcggggcccccgaggaccggacggaccagctggggagcaagggtccaggggcctgaagggccctccaggaccccagggcagaccgggccggcctggacagcagggtgtggctggtgagcgaggccacttgggctcgagaggctttcctggcatcccgggtccctcaggccccccaggcaccaagggcctcccaggagaaccgggccctcagggaccccaggggccaattgggcctccaggagagatgggacccaaggccgcctggtgcagtgggagaaccgggccttcctggggaagccgggatgaagggtgaccttggacccctgggcactcctggggagcagggcctcattgggcaacggggagagccaggccttgagggtgacagtggccccatgggacctgatgggctgaagggggacaggggagacccagggcctgatggagaacatggcgagaaaggccaggaagggctgatgggtgaggacgggccccccggcccccctggcgtcactggtgtccggggtcctgaaggaaaatcagggaagcaaggcgagaagggccgcactggagccaagggtgccaagggctancaaggacagctgggtgagatgggcgtccctggagaccctggaccccctggcactccaggccctaaagggtcccggggcagcctgggaccaacgggtgctccgggacgcatgggggcccaaggagaaccgggactggctggttatgatggacacaaaggcattgtgggaccccttggacctcctggaccaaaaggcgggggagcagggcgaggacggcaaggctgaggggccccctgggccacctggagatcggggccctgtgggtgatcgaggagaccgcggggaaccgggagaccctgggtaccctggacaggagggtgtgcaaggcctccgtggaaagccaggccagcagggccaacccgggcatccgggaccccgggggtggccgggacccaaaggatcgaaaggcgcagagggaccaaagggaaagcaaggcaaggcaggggccccaggccggaggggggtccagggcctgcaggggctgccagggccccggggcgtggtggggagacagggcctcgagggcatcgctggaccagatgggcttcctggcagggacgggcaagcaggacagcagggggagcagggagacgatggggaccctggccccatgggccctgctgggaagagaggaaatccaggtgtggccggcttacctggagcacagggacccccaggattcaagggtgagagtgggttacccggacagctgggtccccctggcaagcgaggaacagagggcagaacggggctccctggaaaccagggggagcctgggtccaaaggccagccgggcgactctggcgagatgggcttcccaggaatggcaggtctcttcggacccaagggcccgcctggagacattggcttcaaaggcatccagggccctcgggggccacctggcttgatgggaaaggaaggcatcgtcgggcccctcggaatcctgggaccttcgggactcccgggtccgaagggtgacaaaggcagccgtggggactgggnantgnanggncngggggtcctcccggccccagagggcggcccggccccccgggtcctccagggggtcctatccaattgcaacaagatgatcttggggcagctttccagacgtggatggacaccagtggagcactcaggccagagagttacagctatccagaccggctggtgctggaccagggaggagagatctttaaaaccttacactacctcagcaacctcatccagagcattaagacgcccctgggcaccaaagagaaccccgcccgggtctgcagggacctcatggactgtgagcagaagatggtggatggtacctactgggtggatccaaaccttggctgctcctctgacaccatcgaggtctcctgcaacttcactcatggtggacagacgtgtctcaagcccatcacggcctccaaggtcgagtttgccatcagccgggtccagatgaatttcctgcacctgctaagctccgaggtgacccagcacatcaccatccactgccttaacatgaccgtgtggcaggagggcactgggcagaccccagccaagcaggccgtacgcttccgggcctggaatggacagatttttgaagctgggggtcagttccggcccgaggtgtccatggatggctgcaaggtccaagatggccgctggcatcagacactcttcaccttccggacccaagacccccaacagctgcccatcatcagtgtggacaacctccctcctgcctcatcagggaagcagtaccgcctggaagttggacctgcgtgcttcctctgacctctgacctcgtggccactctaggcctcatggaggagggaagaggaagaggcaaggggagggtactgaggggcagatggctccaggagaggcagctcccctgcccaagggtccttgggcagaccccagctgttgtctgcccagtagaagtgggtgggggtaggaggggatagggtgtccttgggaacaatggatcccagcttagccccaaagaccaaccaaagagccagccagagtaagctggacctgcaacctgcctgagccccgtggcctctcagctctgcggccaccccgttccctccccagcttcctgcccaaagagccccacattcaagccaacttgagggaagggggcgtctcgtcagctggtccctgctagggagctattgatgtgcaatattagaaaggagacatgaaaaaaggagaaaaggaaagacagaagtgtatatatatattatttaaacaaacaaaaagaaggtgcgttactatttttttttcacccgggaaagaggtgagaggatgggaaggagcagccaggcgtgggaagcggcgagatcctcgggctgggggtgcccacgtttgctacctcccactgtgaaatcgctggtgctcacaattgtctctcacagtgtatgtgatttttttaaggaaaaaaaaaaaatccctatttaagattctgaaggtgctaccattattttgccacagactttgaagaaacttttggatgtggggcatcatccgcatctttctctctcctccaaatgacaaagtttggggaatttttgaattttcctagcatcgcccttgtgctcatcaggtaatctgctaaggaggaaaaaagaaaagaaaaaaggaaaaaaaaaaaaaaaaagcaaaacaaaaacaaaaacaaaaaccctaccagaaaccagaagtagagagatttaccatataacttatggactttgaaatgtctgtccttttaaggcagcagggaggcctgggtgcgaacatgttggcttggcccttcacggtcctggagggaggtgaggctggccttggaaggcgtgccctggagaggtcttgggtgaaaacttgaccttgaagaaaccaatcacaaaagcggcgttgggtcagggctaggcttagaggtgaagcatcaacatggaaccatctcaggaagccgcatcgcctcttccgaggtcctcacttccaggagcctgtccttgcaagatgcaatcatcgttcctgctttttcattgtcattaaattctgtagaaacccattgtcattagctccaagtgtaaatttgggtcaaggagacagaataataatgggaatctcggagttcgacaccatagtgacgttcagcgtcctctgaattgtgctacatcagcgaacaagtcggcgcttgaattggattttgaggttattttaaccatggaattatttttatagaaggggtttgggaattggatttgatttttattatttaatacctcactttggcccgtcccccctcccaacacttctgtatcctcgccctgccgccccagcctggacgctctgcgtggaagtgcgtgtttgtagcagctcgggcctcatctcagcgctcggatccctcctgctgccagaatccactggcctctgtctcattcttgggttttcctgctgtcttcgtttacgtctctgtccacatgtcagtgtattaaaaccccaatgggttccgtttctccttttcccctctggattttaaataaatatttaaaactgaggcaatggaatgaca

SEQ ID NO: 438606 - DNA, 5078 bp, Homo sapiens
  misc_feature (1577)..(1577): n is a, c, g, or t
  misc_feature (2579)..(2579): n is a, c, g, or t
  misc_feature (2581)..(2581): n is a, c, g, or t
  misc_feature (2584)..(2584): n is a, c, g, or t
  misc_feature (2586)..(2586): n is a, c, g, or t
  misc_feature (2589)..(2589): n is a, c, g, or t
  misc_feature (2591)..(2591): n is a, c, g, or t
gcttgaaagaatgacatttgaggccaggctcaagactgcagtcccagcgctttgggaggccgagatgtggacatcctccagcggctgggcctcagctggacgaaggccgggagccctgcacccccgggagtcattcctttccagtcgggcttcatctttacgcagcgggcccggctccaggctcccacgggcaccatcattcctgccgccttgggcacagagctggcactggtgctgagcctctgctcccaccgggtgaaccatgccttcctcttcgctgtccgcagccggaaacgcaagctgcagctgggcctgcagttcctccccggcaagacggtcgtccacctcgggtcccggcgctcagtggccttcgacctcgacatgcacgacgggcgctggcaccacctggccctcgagctccgaggccgcacagtcactctggtgactgcctgcgggcagcgccgggtgcctgtcctgctgcctttccacagggaccctgcactcgaccctgggggctccttcctctttgggaagatgaacccgcatgcagtccagtttgaaggtgctctctgccagttcagtatctaccctgtgacgcaggtcgctcacaattactgtacccacctgaggaagcagtgtggacaggctgacacgtaccagtccccactgggacctctcttctcccaagactctggcagaccttttaccttccagtccgacctcgccctgctaggcctggagaacttgaccactgccacaccagccctggggtcactgccagcaggcaggggacccagggggactgtggcacccgccacgcccaccaagccccaaaggactagccccacaaaccctcaccagcatatggcggtgggaggcccagcccaaaccccgctgctacctgccaagctgtcagccagtaacgcacttgatcccatgctcccagcctctgttggcggctctaccagaacgcctcgccctgcggccgctcaaccatcacagaagatcacagccaccaaaatccccaaaagcctccctaccaagccttcggccccttctacttcaattgtgcccatcaaaagcccccatcctacccagaaaacagctccatcttcatttacaaagtcagccctacccactcagaagcaagtgccacctacttcccgtccagttcctgccagagtctcccgtcccgcagagaagcccatccagaggaacccgggaatgcccaggcccccacgccgcctggtgcagtgggagaaccgggccttcctggggaagccgggatgaagggtgaccttggacccctgggcactcctggggagcagggcctcattgggcaacggggagagccaggccttgagggtgacagtggccccatgggacctgatgggctgaagggggacaggggagacccagggcctgatggagaacatggcgagaaaggccaggaagggctgatgggtgaggacgggccccccggcccccctggcgtcactggtgtccggggtcctgaaggaaaatcagggaagcaaggcgagaagggccgcactggagccaagggtgccaagggctancaaggacagctgggtgagatgggcgtccctggagaccctggaccccctggcactccaggccctaaagggtcccggggcagcctgggaccaacgggtgctccgggacgcatgggggcccaaggagaaccgggactggctggttatgatggacacaaaggcattgtgggaccccttggacctcctggaccaaaaggcgggggagcagggcgaggacggcaaggctgaggggccccctgggccacctggagatcggggccctgtgggtgatcgaggagaccgcggggaaccgggagaccctgggtaccctggacaggagggtgtgcaaggcctccgtggaaagccaggccagcagggccaacccgggcatccgggaccccgggggtggccgggacccaaaggatcgaaaggcgcagagggaccaaagggaaagcaaggcaaggcaggggccccaggccggaggggggtccagggcctgcaggggctgccagggccccggggcgtggtggggagacagggcctcgagggcatcgctggaccagatgggcttcctggcagggacgggcaagcaggacagcagggggagcagggagacgatggggaccctggccccatgggccctgctgggaagagaggaaatccaggtgtggccggcttacctggagcacagggacccccaggattcaagggtgagagtgggttacccggacagctgggtccccctggcaagcgaggaacagagggcagaacggggctccctggaaaccagggggagcctgggtccaaaggccagccgggcgactctggcgagatgggcttcccaggaatggcaggtctcttcggacccaagggcccgcctggagacattggcttcaaaggcatccagggccctcgggggccacctggcttgatgggaaaggaaggcatcgtcgggcccctcggaatcctgggaccttcgggactcccgggtccgaagggtgacaaaggcagccgtggggactgggnantgnanggncngggggtcctcccggccccagagggcggcccggccccccgggtcctccagggggtcctatccaattgcaacaagatgatcttggggcagctttccagacgtggatggacaccagtggagcactcaggccagagagttacagctatccagaccggctggtgctggaccagggaggagagatctttaccaaagagaaccccgcccgggtctgcagggacctcatggactgtgagcagaagatggtggatggtacctactgggtggatccaaaccttggctgctcctctgacaccatcgaggtctcctgcaacttcactcatggtggacagacgtgtctcaagcccatcacggcctccaaggtcgagtttgccatcagccgggtccagatgaatttcctgcacctgctaagctccgaggtgacccagcacatcaccatccactgccttaacatgaccgtgtggcaggagggcactgggcagaccccagccaagcaggccgtacgcttccgggcctggaatggacagatttttgaagctgggggtcagttccggcccgaggtgtccatggatggctgcaaggtccaagatggccgctggcatcagacactcttcaccttccggacccaagacccccaacagctgcccatcatcagtgtggacaacctccctcctgcctcatcagggaagcagtaccgcctggaagttggacctgcgtgcttcctctgacctctgacctcgtggccactctaggcctcatggaggagggaagaggaagaggcaaggggagggtactgaggggcagatggctccaggagaggcagctcccctgcccaagggtccttgggcagaccccagctgttgtctgcccagtagaagtgggtgggggtaggaggggatagggtgtccttgggaacaatggatcccagcttagccccaaagaccaaccaaagagccagccagagtaagctggacctgcaacctgcctgagccccgtggcctctcagctctgcggccaccccgttccctccccagcttcctgcccaaagagccccacattcaagccaacttgagggaagggggcgtctcgtcagctggtccctgctagggagctattgatgtgcaatattagaaaggagacatgaaaaaaggagaaaaggaaagacagaagtgtatatatatattatttaaacaagaaggagcagccaggcgtgggaagcggcgagatcctcgggctgggggtgcccacgtttgctacctcccactgtgaaatcgctggtgctcacaattgtctctcacagtgtatgtgatttttttaaggaaaaaaaaaaaatccctatttaagattctgaaggtgctaccattattttgccacagactttgaagaaacttttggatgtggggcatcatccgcatctttctctctcctccaaatgacaaagtttggggaatttttgaattttcctagcatcgcccttgtgctcatcaggtaatctgctaaggaggaaaaaagaaaagaaaaaaggaaaaaaaaaaaaaaaaagcaaaacaaaaacaaaaacaaaaaccctaccagaaaccagaagtagagagatttaccatataacttatggactttgaaatgtctgtccttttaaggcagcagggaggcctgggtgcgaacatgttggcttggcccttcacggtcctggagggaggtgaggctggccttggaaggcgtgccctggagaggtcttgggtgaaaacttgaccttgaagaaaccaatcacaaaagcggcgttgggtcagggctaggcttagaggtgaagcatcaacatggaaccatctcaggaagccgcatcgcctcttccgaggtcctcacttccaggagcctgtccttgcaagatgcaatcatcgttcctgctttttcattgtcattaaattctgtagaaacccattgtcattagctccaagtgtaaatttgggtcaaggagacagaataataatgggaatctcggagttcgacaccatagtgacgttcagcgtcctctgaattgtgctacatcagcgaacaagtcggcgcttgaattggattttgaggttattttaaccatggaattatttttatagaaggggaaaatgtatgtgaaagtctctatttgtgtatttctctcctaaagttgtgtctctttgggaattggatttgatttttattatttaatacctcactttggcccgtcccccctcccaacacttctgtatcctcgccctgccgccccagcctggacgctctgcgtggaagtgcgtgtttgtagcagctcgggcctcatctcagcgctcggatccctcctgctgccagaatccactggcctctgtctcattcttgggttttcctgctgtcttcgtttacgtctctgtccacatgtcagtgtattaaaaccccaatgggttccgtttctccttttcccctctggattttaaataaatatttaaaactgaggcaatggaatgaca

SEQ ID NO: 438607 - DNA, 6491 bp, Homo sapiens
  misc_feature (1541)..(1541): n is a, c, g, or t
  misc_feature (1762)..(1762): n is a, c, g, or t
  misc_feature (1833)..(1833): n is a, c, g, or t
  misc_feature (2129)..(2129): n is a, c, g, or t
  misc_feature (3660)..(3660): n is a, c, g, or t
  misc_feature (4662)..(4662): n is a, c, g, or t
  misc_feature (4664)..(4664): n is a, c, g, or t
  misc_feature (4667)..(4667): n is a, c, g, or t
  misc_feature (4669)..(4669): n is a, c, g, or t
  misc_feature (4672)..(4672): n is a, c, g, or t
  misc_feature (4674)..(4674): n is a, c, g, or t
gcttgaaagaatgacatttgaggccaggctcaagactgcagtcccagcgctttgggaggccgagatgtggacatcctccagcggctgggcctcagctggacgaaggccgggagccctgcacccccgggagtcattcctttccagtcgggcttcatctttacgcagcgggcccggctccaggctcccacgggcaccatcattcctgccgccttgggcacagagctggcactggtgctgagcctctgctcccaccgggtgaaccatgccttcctcttcgctgtccgcagccggaaacgcaagctgcagctgggcctgcagttcctccccggcaagacggtcgtccacctcgggtcccggcgctcagtggccttcgacctcgacatgcacgacgggcgctggcaccacctggccctcgagctccgaggccgcacagtcactctggtgactgcctgcgggcagcgccgggtgcctgtcctgctgcctttccacagggaccctgcactcgaccctgggggctccttcctctttgggaagatgaacccgcatgcagtccagtttgaaggtgctctctgccagttcagtatctaccctgtgacgcaggtcgctcacaattactgtacccacctgaggaagcagtgtggacaggctgacacgtaccagtccccactgggacctctcttctcccaagactctggcagaccttttaccttccagtccgacctcgccctgctaggcctggagaacttgaccactgccacaccagccctggggtcactgccagcaggcaggggacccagggggactgtggcacccgccacgcccaccaagccccaaaggactagccccacaaaccctcaccagcatatggcggtgggaggcccagcccaaaccccgctgctacctgccaagctgtcagccagtaacgcacttgatcccatgctcccagcctctgttggcggctctaccagaacgcctcgccctgcggccgctcaaccatcacagaagatcacagccaccaaaatccccaaaagcctccctaccaagccttcggccccttctacttcaattgtgcccatcaaaagcccccatcctacccagaaaacagctccatcttcatttacaaagtcagccctacccactcagaagcaagtgccacctacttcccgtccagttcctgccagagtctcccgtcccgcagagaagcccatccagaggaacccgggaatgcccaggcccccaccgcccagcacccggcccctacctcctaccaccagctcctctaaaaaacccattcccacactagctcggactgaggccaagataaccagccatgccagtaagccggcctctgcccgcaccagcacccacaaacctcccccatttactgctttatcctcatctcctgcccctactcctggttctaccaggagtactcggccaccagccacgatggtacctccaacttcgggcaccagcactcccagaacagcacctgccgtccccactcctggctcagctcccactggaagcaagaagcccantggatcggaagcctcaaagaaagccggacccaagagcagcccccggaagcctgtccccctcagacctgggaaggcagccagggatgtccccttgagcgatctgacaaccaggcctagccccagacagccccagcccagtcagcagaccaccccggccctggtattggccccggcgcaattcctgtcctccagcccccggcccacgagcagtggctattcgntcttccacctggcaggatctacgcctttccctctgctgatggggcctccgggacccaagggagactgtggnttgccgggtccccctgggctacctgggctacctggaatccctggtgcacgtgggcctcggggtcctcctgggccttatggaaatccaggtctccccggccctcctggagccaaaggtgacatgggcttgcctgggctctccgggaatccaggacctccgggacgaaagggacacaagggctatcctggaccggcagggcaccccggagaacaggggcagccaggacctgagggcagcccaggggccaaaggttaccctggcaggcaggggttacctggaccggtaggagatcccgnccccaaaggcagcaggggctacattgggctcccagggctcttcggcctgccagggtctgatggagaacgaggcctgcctggcgttcctggcaagaggggcaagatgggtatgccggggtttcctggagtctttggggaaagaggccctcctggactggatggaaatcctggagaactgggcctgccaggcccccctggagtccccggcctcattggtgacttaggagtgttgggtccgattggctacccgggacccaagggcatgaagggactgatgggcagcgtgggggagcccggactgaaagggtgaacaaggggttccaggtgtgtcaggagatcccggattccaaggagacaaggggagccaggggttgccagggttccccggtgcacgggggaagccagggcctctgggcaaagtcggagacaaaggatccattgggtttcccgggccccctggacccgagggattcccaggagacatcggcccccctggcgacaatggcccagaaggcatgaagggtaagcctggagcccgaggcctgccgggaccccgtgggcagctggggcccgagggagatgagggacccatggggccgccaggggcccctggcttggagggtcagcctggcaggaaggggtttcctgggaggcccggcctggatggcgtgaagggggaaccaggggatcctggtcggccggggcctgtgggagagcagggatttatgggattcattggtctggtcggggagccaggaatcgtgggagaaaagggtgatcgtggcatgatgggacccccaggcgtgcctggacccaaggggtcgatggtaaggaggtcatcctggaatgccaggtggtatggggacccctggagagcctggaccccagggtcctccaggatctcgaggcccaccaggcatgaggggagcaaagggacgtcggggcccccgaggaccggacggaccagctggggagcaagggtccaggggcctgaagggccctccaggaccccagggcagaccgggccggcctggacagcagggtgtggctggtgagcgaggccacttgggctcgagaggctttcctggcatcccgggtccctcaggccccccaggcaccaagggcctcccaggagaaccgggccctcagggaccccaggggccaattgggcctccaggagagatgggacccaaggccgcctggtgcagtgggagaaccgggccttcctggggaagccgggatgaagggtgaccttggacccctgggcactcctggggagcagggcctcattgggcaacggggagagccaggccttgagggtgacagtggccccatgggacctgatgggctgaagggggacaggggagacccagggcctgatggagaacatggcgagaaaggccaggaagggctgatgggtgaggacgggccccccggcccccctggcgtcactggtgtccggggtcctgaaggaaaatcagggaagcaaggcgagaagggccgcactggagccaagggtgccaagggctancaaggacagctgggtgagatgggcgtccctggagaccctggaccccctggcactccaggccctaaagggtcccggggcagcctgggaccaacgggtgctccgggacgcatgggggcccaaggagaaccgggactggctggttatgatggacacaaaggcattgtgggaccccttggacctcctggaccaaaaggcgggggagcagggcgaggacggcaaggctgaggggccccctgggccacctggagatcggggccctgtgggtgatcgaggagaccgcggggaaccgggagaccctgggtaccctggacaggagggtgtgcaaggcctccgtggaaagccaggccagcagggccaacccgggcatccgggaccccgggggtggccgggacccaaaggatcgaaaggcgcagagggaccaaagggaaagcaaggcaaggcaggggccccaggccggaggggggtccagggcctgcaggggctgccagggccccggggcgtggtggggagacagggcctcgagggcatcgctggaccagatgggcttcctggcagggacgggcaagcaggacagcagggggagcagggagacgatggggaccctggccccatgggccctgctgggaagagaggaaatccaggtgtggccggcttacctggagcacagggacccccaggattcaagggtgagagtgggttacccggacagctgggtccccctggcaagcgaggaacagagggcagaacggggctccctggaaaccagggggagcctgggtccaaaggccagccgggcgactctggcgagatgggcttcccaggaatggcaggtctcttcggacccaagggcccgcctggagacattggcttcaaaggcatccagggccctcgggggccacctggcttgatgggaaaggaaggcatcgtcgggcccctcggaatcctgggaccttcgggactcccgggtccgaagggtgacaaaggcagccgtggggactgggnantgnanggncngggggtcctcccggccccagagggcggcccggccccccgggtcctccagggggtcctatccaattgcaacaagatgatcttggggcagctttccagacgtggatggacaccagtggagcactcaggccagagagttacagctatccagaccggctggtgctggaccagggaggagagatctttaaaaccttacactacctcagcaacctcatccagagcattaagacgcccctgggcaccaaagagaaccccgcccgggtctgcagggacctcatggactgtgagcagaagatggtggatggtacctactgggtggatccaaaccttggctgctcctctgacaccatcgaggtctcctgcaacttcactcatggtggacagacgtgtctcaagcccatcacggcctccaaggtcgagtttgccatcagccgggtccagatgaatttcctgcacctgctaagctccgaggtgacccagcacatcaccatccactgccttaacatgaccgtgtggcaggagggcactgggcagaccccagccaagcaggccgtacgcttccgggcctggaatggacagatttttgaagctgggggtcagttccggcccgaggtgtccatggatggctgcaaggtccaagatggccgctggcatcagacactcttcaccttccggacccaagacccccaacagctgcccatcatcagtgtggacaacctccctcctgcctcatcagggaagcagtaccgcctggaagttggacctgcgtgcttcctctgacctctgacctcgtggccactctaggcctcatggaggagggaagaggaagaggcaaggggagggtactgaggggcagatggctccaggagaggcagctcccctgcccaagggtccttgggcagaccccagctgttgtctgcccagtagaagtgggtgggggtaggaggggatagggtgtccttgggaacaatggatcccagcttagccccaaagaccaaccaaagagccagccagagtaagctggacctgcaacctgcctgagccccgtggcctctcagctctgcggccaccccgttccctccccagcttcctgcccaaagagccccacattcaagccaacttgagggaagggggcgtctcgtcagctggtccctgctagggagctattgatgtgcaatattagaaaggagacatgaaaaaaggagaaaaggaaagacagaagtgtatatatatattatttaaacaaacaaaaagaaggtgcgttactatttttttttcacccgggaaagaggtgagaggatgggaaggagcagccaggcgtgggaagcggcgagatcctcgggctgggggtgcccacgtttgctacctcccactgtgaaatcgctggtgctcacaattgtctctcacagtgtatgtgatttttttaaggaaaaaaaaaaaatccctatttaagattctgaaggtgctaccattattttgccacagactttgaagaaacttttggatgtggggcatcatccgcatctttctctctcctccaaatgacaaagtttggggaatttttgaattttcctagcatcgcccttgtgctcatcaggtaatctgctaaggaggaaaaaagaaaagaaaaaaggaaaaaaaaaaaaaaaaagcaaaacaaaaacaaaaacaaaaaccctgccgaccaaagagaccattgagcaggaaaagcggagtgaaatttcctaaaatcctggaggatttcctacccccgtcctcttcgagaccccagtcgtgatgtggaggaagagccacctgcaagatggacacgagccacaagc

SEQ ID NO: 438608 - DNA, 767 bp, Homo sapiens
cagaacacttgcctgatacgatcgagctcgtacccctagtggaaagcgagtgggtcagtcagggctaggcttagaggtgaagcatcaacatggaaccatctcaggaagccgcatcgcctcttccgaggtcctcacttccaggagcctgtccttgcaagatgcaatcatcgttcctgctttttcattgtcattaaattctgtagaaacccattgtcattagctccaagtgtaaatttgggtcaaggagacagaataataatgggaatctcggagttcgacaccatagtgacgttcagcgtcctctgaattgtgctacatcagcgaacaagtcggcgcttgaattggattttgaggttattttaaccatggaattatttttatagaaggggaaaatgtatgtgaaagtctctatttgtgtatttctctcctaaagttgtgtctctttgggaattggatttgatttttattatttaatacctcactttggcccgtcccccctcccaacacttctgtatcctcgccctgccgccccagcctggacgctctgcgtggaagtgcgtgtttgtagcagctcgggcctcatctcagcgctcggatccctcctgctgccagaatccactggcctctgtctcattcttgggttttcctgctgtcttcgtttacgtctctgtccacatgtcagtgtattaaaaccccaatgggttccgtttctccttttcccctctggattttaaataaatatttaaaactgaggcaatggaatgaca

SEQ ID NO: 438609 - DNA, 457 bp, Homo sapiens
aatgcgagaggagagacagagaccttcctctttgggaggtgaaagtcttgtcacccctaccccaccaggcctccatttgttgccccagcattctgcaatctcgggtaccctgtggaatcactgttctggctctcccaggccccctccgcctcctcctgccttagaaccccttcccactttgactggtaattttttgtgtgtttctttaagggtgagagtgggttacccggacagctgggtccccctggcaagcgaggaacagagggcagaacggggctccctggaaaccagggggagcctgggtccaaaggccagccggtgagtgagcgccaaagaatacacatgcccacgcactcacacatgcacacactcacatacacctacatgtacaaacacatgcacactcatacacacacacaaacacactgacccagaagccacctccttgctctgtgac

SEQ ID NO: 438610 - DNA, 2638 bp, Homo sapiens
agcattgtgggattggatgagtctcaagatggacaaccgggatgttgcaggaaaggctaaccggtggtttggggttgctccccctaaatctggaaaaatgaacatgaacatccttcaccaggaagagctcatcgctcagaagaaacgggaaattgaagccaaaatggaacagaaagccaagcagaatcaggtggccagccctcagcccccacatcctggcgaaatcacaaatgcacacaactcttcctgcatttccaacaagtttgccaacgatggtagcttcttgcagcagtttctgaagttgcagaaggcacagaccagcacagacgccccgaccagtgcgcccagcgcccctcccagcacacccacccccagcgctgggaagaggtccctgctcatcagcaggcggacaggcctggggctggccagcctgccgggccctgtgaagagctactcccacgccaagcagctgcccgtggcgcaccgcccgagtgtcttccagtcccctgacgaggacgaggaggaggactatgagcagtggctggagatcaaagtttcacccccagagggagccgagactcggaaagtgatagagaaattggcccgctttgtggcagaaggaggccccgagttagaaaaagtagctatggaggactacaaggataacccagcatttgcatttttgcacgataagaatagcagggaattcctctactacaggaagaaggtggctgagataagaaaggaagcacagaagtcgcaggcagcctctcagaaagaaattaggctgttgggtgtggtgagttgagcccagtactgacagcctgcttaaagtttcacccccagaggacgaagaggtcaagaaccttgcagaaaagttggccaggttcatagcggacgggggtcccgaggtggaaaccattgccctccagaacaaccgtgagaaccaggcattcagctttctgtatgagcccaatagccaagggtacaagtactaccgacagaagctggaggagttccggaaagccaaggccagctccacaggcagcttcacagcacctgatcccggcctgaagcgcaagtcccctcctgaggccctgtcagggtccttacccccagccaccacctgccccgcctcgtccacgcctgcgcccactatcatccctgctccagctgcccccgggaagccagcctccgcagccaccgtgaagaggaagcggaagagccggtgggggcctgaagaggataaggtagagctcccacctgctgaactggtgcagagggacgtggatgcctctccctcgcctctgtcagttcaggacctcaaggggctcggctatgagaaggggaagcctgtgggtctagtgggcgtcacagagctttcagacgcccagaagaagcagctgaaggagcagcaggagatgcagcagatgtacgacatgatcatgcagcacaagcgggccatgcaggacatgcagctgctgtgggagaaggcagtccaacagcaccagcacggctatgacagtgatgaggaggtggacagcgagctgggcacctgggagcaccagctgcggcgcatggagatggataagaccagggaatgggccgagcagctgacaaagatgggccggggcaagcacttcatcggagacttcctgcctccagacgagctggaaaagtttatggagaccttcaaggccctgaaggagggccgtgagcctgactactcagagtacaaggagttcaagctgactgtggagaacatcggctaccagatgctgatgaagatgggctggaaggagggcgaggggctgggctcagagggccagggcatcaagaacccagtgaacaagggcaccaccacagtggacggcgctggcttcggcattgaccggccggcggagctctccaaggaggacgacgagtatgaggcgttccgcaagaggatgatgctggcctaccgcttccggcccaaccccctgaacaatcccagacggccttactactgagtgttctggaaatacatactttctgaatgaccaaccgtccctggactgtggaatgttccggcctgcatttctgcccaccccttccgttgtcacgagtgccgtgccgtgtaataaagtcccagtgctcatccaccaaaagatgcctggtcctgttgcaggaagcccctcctgttagcagcgggatgcaagatgctgtctcggggctctccttattggcctgtggagtctccatccccgctcagcctgggttgcactggaggggaggaagaaagctgttttcagcatagtaaagctggaaggccaggtgcagtgtctcacccctgtcatcccagcactttgagaggccaaggcgggcggatcactggaggtcaggagtttaagaccagcctggccaacatggtgaaatcctgtctctactaaaaatataaaattagctgggcatggtggtgcacacctgtcgtctcagctactcgggaggcagaggcaggagaatggcttgaacctgggaagcggttgcagtgagccaagattgcgcctttgcactccagcctgggcaagagagcaagactctgtctcaaataataataataataataaagctggagacttggccacacctgggctaaagg

SEQ ID NO: 438611 - DNA, 2143 bp, Homo sapiens
agcattgtgggattggatgagtctcaagatggacaaccgggatgttgcaggaaaggctaaccggtggtttggggttgctccccctaaatctggaaaaatgaacatgaacatccttcaccaggaagagctcatcgctcagaagaaacgggaaattgaagccaaaatggaacagaaagccaagcagaatcaggtggccagccctcagcccccacatcctggcgaaatcacaaatgcacacaactcttcctgcatttccaacaagtttgccaacgatggtagcttcttgcagcagtttctgaagttgcagaaggcacagaccagcacagacgccccgaccagtgcgcccagcgcccctcccagcacacccacccccagcgctgggaagaggtccctgctcatcagcaggcggacaggcctggggctggccagcctgccgggccctgtgaagagctactcccacgccaagcagctgcccgtggcgcaccgcccgagtgtcttccagtcccctgacgaggacgaggaggaggactatgagcagtggctggagatcaaagtttcacccccagagggagccgagactcggaaagtgatagagaaattggcccgctttgtggcagaaggaggccccgagttagaaaaagtagctatggaggactacaaggataacccagcatttgcatttttgcacgataagaatagcagggaattcctctactacaggaagaaggtggctgagataagaaaggaagcacagaagtcgcaggcagcctctcagaaagaaattaggctgttgggtgtggtgagttgagcccagtactgacagcctgcttaaagtttcacccccagaggacgaagaggtcaagaaccttgcagaaaagttggccaggttcatagcggacgggggtcccgaggtggaaaccattgccctccagaacaaccgtgagaaccaggcattcagctttctgtatgagcccaatagccaagggtacaagtactaccgacagaagctggaggagttccggaaagccaaggccagctccacaggcagcttcacagcacctgatcccggcctgaagcgcaagtcccctcctgaggccctgtcagggtccttacccccagccaccacctgccccgcctcgtccacgcctgcgcccactatcatccctgctccagctgcccccgggaagccagcctccgcagccaccgtgaagaggaagcggaagagccggtgggggcctgaagaggataaggtagagctcccacctgctgaactggtgcagagggacgtggatgcctctccctcgcctctgtcagttcaggacctcaaggggctcggctatgagaaggggaagcctgtgggtctagtgggcgtcacagagctttcagacgcccagaagaagcagctgaaggagcagcaggagatgcagcagatgtacgacatgatcatgcagcacaagcgggccatgcaggacatgcagctgctgtgggagaaggcagtccaacagcaccagcacggctatgacagtgatgaggaggtggacagcgagctgggcacctgggagcaccagctgcggcgcatggagatggataagaccagggaatgggccgagcagctgacaaagatgggccggggcaagcacttcatcggagacttcctgcctccagacgagctggaaaagtttatggagaccttcaaggccctgaaggagggccgtgagcctgactactcagagtacaaggagttcaagctgactgtggagaacatcggctaccagatgctgatgaagatgggctggaaggagggcgaggggctgggctcagagggccagggcatcaagaacccagtgaacaagggcaccaccacagtggacggcgctggcttcggcattgaccggccggcggagctctccaaggaggacgacgagtatgaggcgttccgcaagaggatgatgctggcctaccgcttccggcccaaccccctgaacaatcccagacggccttactactgagtgttctggaaatacatactttctgaatgaccaaccgtccctggactgtggaatgttccggcctgcatttctgcccaccccttccgttgtcacgagtgccgtgccgtgtaataaagtcccagtgctcatccacc

SEQ ID NO: 438612 - DNA, 2703 bp, Homo sapiens
agcattgtgggattggatgagtctcaagatggacaaccgggatgttgcaggaaaggctaaccggtggtttggggttgctccccctaaatctggaaaaatgaacatgaacatccttcaccaggaagagctcatcgctcagaagaaacgggaaattgaagccaaaatggaacagaaagccaagcagaatcaggtggccagccctcagcccccacatcctggcgaaatcacaaatgcacacaactcttcctgcatttccaacaagtttgccaacgatggtagcttcttgcagcagtttctgaagttgcagaaggcacagaccagcacagacgccccgaccagtgcgcccagcgcccctcccagcacacccacccccagcgctgggaagaggtccctgctcatcagcaggcggacaggcctggggctggccagcctgccgggccctgtgaagagctactcccacgccaagcagctgcccgtggcgcaccgcccgagtgtcttccagtcccctgacgaggacgaggaggaggactatgagcagtggctggagatcaaagagagagtgtgcctattgactgtggggtgtgtgagttgaaccccagtactgacagcctccttaaagtttcacccccagagggagccgagactcggaaagtgatagagaaattggcccgctttgtggcagaaggaggccccgagttagaaaaagtagctatggaggactacaaggataacccagcatttgcatttttgcacgataagaatagcagggaattcctctactacaggaagaaggtggctgagataagaaaggaagcacagaagtcgcaggcagcctctcagaaagaaattaggctgttgggtgtggtgagttgagcccagtactgacagcctgcttaaagtttcacccccagaggacgaagaggtcaagaaccttgcagaaaagttggccaggttcatagcggacgggggtcccgaggtggaaaccattgccctccagaacaaccgtgagaaccaggcattcagctttctgtatgagcccaatagccaagggtacaagtactaccgacagaagctggaggagttccggaaagccaaggccagctccacaggcagcttcacagcacctgatcccggcctgaagcgcaagtcccctcctgaggccctgtcagggtccttacccccagccaccacctgccccgcctcgtccacgcctgcgcccactatcatccctgctccagctgcccccgggaagccagcctccgcagccaccgtgaagaggaagcggaagagccggtgggggcctgaagaggataaggtagagctcccacctgctgaactggtgcagagggacgtggatgcctctccctcgcctctgtcagttcaggacctcaaggggctcggctatgagaaggggaagcctgtgggtctagtgggcgtcacagagctttcagacgcccagaagaagcagctgaaggagcagcaggagatgcagcagatgtacgacatgatcatgcagcacaagcgggccatgcaggacatgcagctgctgtgggagaaggcagtccaacagcaccagcacggctatgacagtgatgaggaggtggacagcgagctgggcacctgggagcaccagctgcggcgcatggagatggataagaccagggaatgggccgagcagctgacaaagatgggccggggcaagcacttcatcggagacttcctgcctccagacgagctggaaaagtttatggagaccttcaaggccctgaaggagggccgtgagcctgactactcagagtacaaggagttcaagctgactgtggagaacatcggctaccagatgctgatgaagatgggctggaaggagggcgaggggctgggctcagagggccagggcatcaagaacccagtgaacaagggcaccaccacagtggacggcgctggcttcggcattgaccggccggcggagctctccaaggaggacgacgagtatgaggcgttccgcaagaggatgatgctggcctaccgcttccggcccaaccccctgaacaatcccagacggccttactactgagtgttctggaaatacatactttctgaatgaccaaccgtccctggactgtggaatgttccggcctgcatttctgcccaccccttccgttgtcacgagtgccgtgccgtgtaataaagtcccagtgctcatccaccaaaagatgcctggtcctgttgcaggaagcccctcctgttagcagcgggatgcaagatgctgtctcggggctctccttattggcctgtggagtctccatccccgctcagcctgggttgcactggaggggaggaagaaagctgttttcagcatagtaaagctggaaggccaggtgcagtgtctcacccctgtcatcccagcactttgagaggccaaggcgggcggatcactggaggtcaggagtttaagaccagcctggccaacatggtgaaatcctgtctctactaaaaatataaaattagctgggcatggtggtgcacacctgtcgtctcagctactcgggaggcagaggcaggagaatggcttgaacctgggaagcggttgcagtgagccaagattgcgcctttgcactccagcctgggcaagagagcaagactctgtctcaaataataataataataataaagctggagacttggccacacctgggctaaagg

SEQ ID NO: 438613 - DNA, 2534 bp, Homo sapiens
agcattgtgggattggatgagtctcaagatggacaaccgggatgttgcaggaaaggctaaccggtggtttggggttgctccccctaaatctggaaaaatgaacatgaacatccttcaccaggaagagctcatcgctcagaagaaacgggaaattgaagccaaaatggaacagaaagccaagcagaatcaggtggccagccctcagcccccacatcctggcgaacgccccgaccagtgcgcccagcgcccctcccagcacacccacccccagcgctgggaagaggtccctgctcatcagcaggcggacaggcctggggctggccagcctgccgggccctgtgaagagctactcccacgccaagcagctgcccgtggcgcaccgcccgagtgtcttccagtcccctgacgaggacgaggaggaggactatgagcagtggctggagatcaaagtttcacccccagagggagccgagactcggaaagtgatagagaaattggcccgctttgtggcagaaggaggccccgagttagaaaaagtagctatggaggactacaaggataacccagcatttgcatttttgcacgataagaatagcagggaattcctctactacaggaagaaggtggctgagataagaaaggaagcacagaagtcgcaggcagcctctcagaaagaaattaggctgttgggtgtggtgagttgagcccagtactgacagcctgcttaaagtttcacccccagaggacgaagaggtcaagaaccttgcagaaaagttggccaggttcatagcggacgggggtcccgaggtggaaaccattgccctccagaacaaccgtgagaaccaggcattcagctttctgtatgagcccaatagccaagggtacaagtactaccgacagaagctggaggagttccggaaagccaaggccagctccacaggcagcttcacagcacctgatcccggcctgaagcgcaagtcccctcctgaggccctgtcagggtccttacccccagccaccacctgccccgcctcgtccacgcctgcgcccactatcatccctgctccagctgcccccgggaagccagcctccgcagccaccgtgaagaggaagcggaagagccggtgggggcctgaagaggataaggtagagctcccacctgctgaactggtgcagagggacgtggatgcctctccctcgcctctgtcagttcaggacctcaaggggctcggctatgagaaggggaagcctgtgggtctagtgggcgtcacagagctttcagacgcccagaagaagcagctgaaggagcagcaggagatgcagcagatgtacgacatgatcatgcagcacaagcgggccatgcaggacatgcagctgctgtgggagaaggcagtccaacagcaccagcacggctatgacagtgatgaggaggtggacagcgagctgggcacctgggagcaccagctgcggcgcatggagatggataagaccagggaatgggccgagcagctgacaaagatgggccggggcaagcacttcatcggagacttcctgcctccagacgagctggaaaagtttatggagaccttcaaggccctgaaggagggccgtgagcctgactactcagagtacaaggagttcaagctgactgtggagaacatcggctaccagatgctgatgaagatgggctggaaggagggcgaggggctgggctcagagggccagggcatcaagaacccagtgaacaagggcaccaccacagtggacggcgctggcttcggcattgaccggccggcggagctctccaaggaggacgacgagtatgaggcgttccgcaagaggatgatgctggcctaccgcttccggcccaaccccctgaacaatcccagacggccttactactgagtgttctggaaatacatactttctgaatgaccaaccgtccctggactgtggaatgttccggcctgcatttctgcccaccccttccgttgtcacgagtgccgtgccgtgtaataaagtcccagtgctcatccaccaaaagatgcctggtcctgttgcaggaagcccctcctgttagcagcgggatgcaagatgctgtctcggggctctccttattggcctgtggagtctccatccccgctcagcctgggttgcactggaggggaggaagaaagctgttttcagcatagtaaagctggaaggccaggtgcagtgtctcacccctgtcatcccagcactttgagaggccaaggcgggcggatcactggaggtcaggagtttaagaccagcctggccaacatggtgaaatcctgtctctactaaaaatataaaattagctgggcatggtggtgcacacctgtcgtctcagctactcgggaggcagaggcaggagaatggcttgaacctgggaagcggttgcagtgagccaagattgcgcctttgcactccagcctgggcaagagagcaagactctgtctcaaataataataataataataaagctggagacttggccacacctgggctaaagg

SEQ ID NO: 438614 - DNA, 2567 bp, Homo sapiens
agcattgtgggattggatgagtctcaagatggacaaccgggatgttgcaggaagagctcatcgctcagaagaaacgggaaattgaagccaaaatggaacagaaagccaagcagaatcaggtggccagccctcagcccccacatcctggcgaaatcacaaatgcacacaactcttcctgcatttccaacaagtttgccaacgatggtagcttcttgcagcagtttctgaagttgcagaaggcacagaccagcacagacgccccgaccagtgcgcccagcgcccctcccagcacacccacccccagcgctgggaagaggtccctgctcatcagcaggcggacaggcctggggctggccagcctgccgggccctgtgaagagctactcccacgccaagcagctgcccgtggcgcaccgcccgagtgtcttccagtcccctgacgaggacgaggaggaggactatgagcagtggctggagatcaaagtttcacccccagagggagccgagactcggaaagtgatagagaaattggcccgctttgtggcagaaggaggccccgagttagaaaaagtagctatggaggactacaaggataacccagcatttgcatttttgcacgataagaatagcagggaattcctctactacaggaagaaggtggctgagataagaaaggaagcacagaagtcgcaggcagcctctcagaaagaaattaggctgttgggtgtggtgagttgagcccagtactgacagcctgcttaaagtttcacccccagaggacgaagaggtcaagaaccttgcagaaaagttggccaggttcatagcggacgggggtcccgaggtggaaaccattgccctccagaacaaccgtgagaaccaggcattcagctttctgtatgagcccaatagccaagggtacaagtactaccgacagaagctggaggagttccggaaagccaaggccagctccacaggcagcttcacagcacctgatcccggcctgaagcgcaagtcccctcctgaggccctgtcagggtccttacccccagccaccacctgccccgcctcgtccacgcctgcgcccactatcatccctgctccagctgcccccgggaagccagcctccgcagccaccgtgaagaggaagcggaagagccggtgggggcctgaagaggataaggtagagctcccacctgctgaactggtgcagagggacgtggatgcctctccctcgcctctgtcagttcaggacctcaaggggctcggctatgagaaggggaagcctgtgggtctagtgggcgtcacagagctttcagacgcccagaagaagcagctgaaggagcagcaggagatgcagcagatgtacgacatgatcatgcagcacaagcgggccatgcaggacatgcagctgctgtgggagaaggcagtccaacagcaccagcacggctatgacagtgatgaggaggtggacagcgagctgggcacctgggagcaccagctgcggcgcatggagatggataagaccagggaatgggccgagcagctgacaaagatgggccggggcaagcacttcatcggagacttcctgcctccagacgagctggaaaagtttatggagaccttcaaggccctgaaggagggccgtgagcctgactactcagagtacaaggagttcaagctgactgtggagaacatcggctaccagatgctgatgaagatgggctggaaggagggcgaggggctgggctcagagggccagggcatcaagaacccagtgaacaagggcaccaccacagtggacggcgctggcttcggcattgaccggccggcggagctctccaaggaggacgacgagtatgaggcgttccgcaagaggatgatgctggcctaccgcttccggcccaaccccctgaacaatcccagacggccttactactgagtgttctggaaatacatactttctgaatgaccaaccgtccctggactgtggaatgttccggcctgcatttctgcccaccccttccgttgtcacgagtgccgtgccgtgtaataaagtcccagtgctcatccaccaaaagatgcctggtcctgttgcaggaagcccctcctgttagcagcgggatgcaagatgctgtctcggggctctccttattggcctgtggagtctccatccccgctcagcctgggttgcactggaggggaggaagaaagctgttttcagcatagtaaagctggaaggccaggtgcagtgtctcacccctgtcatcccagcactttgagaggccaaggcgggcggatcactggaggtcaggagtttaagaccagcctggccaacatggtgaaatcctgtctctactaaaaatataaaattagctgggcatggtggtgcacacctgtcgtctcagctactcgggaggcagaggcaggagaatggcttgaacctgggaagcggttgcagtgagccaagattgcgcctttgcactccagcctgggcaagagagcaagactctgtctcaaataataataataataataaagctggagacttggccacacctgggctaaagg

SEQ ID NO: 438615 - DNA, 1605 bp, Homo sapiens
agcattgtgggattggatgagtctcaagatggacaaccgggatgttgcaggaaaggctaaccggtggtttggggttgctccccctaaatctggaaaaatgaacatgaacatccttcaccaggaagagctcatcgctcagaagaaacgggaaattgaagccaaaatggaacagaaagccaagcagaatcaggtggccagccctcagcccccacatcctggcgaaatcacaaatgcacacaactcttcctgcatttccaacaagtttgccaacgatggtagcttcttgcagcagtttctgaagttgcagaaggcacagaccagcacagacgccccgaccagtgcgcccagcgcccctcccagcacacccacccccagcgctgggaagaggtccctgctcatcagcaggcggacaggcctggggctggccagcctgccgggccctgtgaagagctactcccacgccaagcagctgcccgtggcgcaccgcccgagtgtcttccagtcccctgacgaggacgaggaggaggactatgagcagtggctggagatcaaagtttcacccccagagggagccgagactcggaaagtgatagagaaattggcccgctttgtggcagaaggaggccccgagttagaaaaagtagctatggaggactacaaggataacccagcatttgcatttttgcacgataagaatagcagggaattcctctactacaggaagaaggtggctgagataagaaaggaagcacagaagtcgcaggcagcctctcagaaagtttcacccccagaggacgaagaggtcaagaaccttgcagaaaagttggccaggttcatagcggacgggggtcccgaggtggaaaccattgccctccagaacaaccgtgagaaccaggcattcagctttctgtatgagcccaatagccaagggtacaagtactaccgacagaagctggaggagttccggaaagccaaggccagctccacaggcagcttcacagcacctgatcccggcctgaagcgcaagtcccctcctgaggccctgtcagggtccttaccccaatgggccgagcagctgacaaagatgggccggggcaagcacttcatcggagacttcctgcctccagacgagctggaaaagtttatggagaccttcaaggccctgaaggagggccgtgagcctgactactcagagtacaaggagttcaagctgactgtggagaacatcggctaccagatgctgatgaagatgggctggaaggagggcgaggggctgggctcagagggccagggcatcaagaacccagtgaacaagggcaccaccacagtggacggcgctggcttcggcattgaccggccggcggagctctccaaggaggacgacgagtatgaggcgttccgcaagaggatgatgctggcctaccgcttccggcccaaccccctgaacaatcccagacggccttactactgagtgttctggaaatacatactttctgaatgaccaaccgtccctggactgtggaatgttccggcctgcatttctgcccaccccttccgttgtcacgagtgccgtgccgtgtaataaagtcccagtgctcatccacc

SEQ ID NO: 438616 - DNA, 1682 bp, Homo sapiens
gcaacggatgattctagaggatcccgaacgggtgatgcgtttgctgcacagtcgcacgtgtggggctgggtgcttgctagtgtgggccggatgctgttccaagcgttttctgattctcaccagaagtgacaagtggctcccatgtggcacggagacttgctttcgggtccctgctcgccagcctgcctttttttgcacgatagaagctgcagggatatgcctgtcacagatacttattttcccctctcttctgcaaacttcctcctctccagatttttgcacgataagaatagcagggaattcctctactacaggaagaaggtggctgagataagaaaggaagcacagaagtcgcaggcagcctctcagaaagtttcacccccagaggacgaagaggtcaagaaccttgcagaaaagttggccaggttcatagcggacgggggtcccgaggtggaaaccattgccctccagaacaaccgtgagaaccaggcattcagctttctgtatgagcccaatagccaagggtacaagtactaccgacagaagctggaggagttccggaaagccaaggccagctccacaggcagcttcacagcacctgatcccggcctgaagcgcaagtcccctcctgaggccctgtcagggtccttacccccagccaccacctgccccgcctcgtccacgcctgcgcccactatcatccctgctccagctgcccccgggaagccagcctccgcagccaccgtgaagaggaagcggaagagccggtgggggcctgaagaggataaggtagagctcccacctgctgaactggtgcagagggacgtggatgcctctccctcgcctctgtcagttcaggacctcaaggggctcggctatgagaaggggaagcctgtgggtctagtgggcgtcacagagctttcagacgcccagaagaagcagctgaaggagcagcaggagatgcagcagatgtacgacatgatcatgcagcacaagcgggccatgcaggacatgcagctgctgtgggagaaggcagtccaacagcaccagcacggctatgacagtgatgaggaggtggacagcgagctgggcacctgggagcaccagctgcggcgcatggagatggataagaccagggaatgggccgagcagctgacaaagatgggccggggcaagcacttcatcggagacttcctgcctccagacgagctggaaaagtttatggagaccttcaaggccctgaaggagggccgtgagcctgactactcagagtacaaggagttcaagctgactgtggagaacatcggctaccagatgctgatgaagatgggctggaaggagggcgaggggctgggctcagagggccagggcatcaagaacccagtgaacaagggcaccaccacagtggacggcgctggcttcggcattgaccggccggcggagctctccaaggaggacgacgagtatgaggcgttccgcaagaggatgatgctggcctaccgcttccggcccaaccccctgaacaatcccagacggccttactactgagtgttctggaaatacatactttctgaatgaccaaccgtccctggactgtggaatgttccggcctgcatttctgcccaccccttccgttgtcacgagtgccgtgccgtgtaataaagtcccagtgctcatccacc

SEQ ID NO: 438617 - DNA, 1402 bp, Homo sapiens
agcattgtgggattggatgagtctcaagatggacaaccgggatgttgcaggaaaggctaaccggtggtttggggttgctccccctaaatctggaaaaatgaacatgaacatccttcaccaggaagagctcatcgctcagaagaaacgggaaattgaagccaaaatggaacagaaagccaagcagaatcaggtggccagccctcagcccccacatcctggcgaaatcacaaatgcacacaactcttcctgcatttccaacaagtttgccaacgatggtagcttcttgcagcagtttctgaagttgcagaaggcacagaccagcacagacgccccgaccagtgcgcccagcgcccctcccagcacacccacccccagcgctgggaagaggtccctgctcatcagcaggcggacaggcctggggctggccagcctgccgggccctgtgaagagctactcccacgccaagcagctgcccgtggcgcaccgcccgagtgtcttccagtcccctgacgaggacgaggaggaggactatgagcagtggctggagatcaaagtttcacccccagagggagccgagactcggaaagtgatagagaaattggcccgctttgtggcagaaggaggccccgagttagaaaaagtagctatggaggactacaaggataacccagcatttgcatttttgcacgataagaatagcagggaattcctctactacaggaagaaggtggctgagataagaaaggaagcacagaagtcgcaggcagcctctcagaaagtttcacccccagaggacgaagaggtcaagaaccttgcagaaaagttggccaggttcatagcggacgggggtcccgaggtggaaaccattgccctccagaacaaccgtgagaaccaggcattcagctttctgtatgagcccaatagccaagggtacaagtactaccgacagaagctggaggagttccggaaagccaaggccagctccacaggcagcttcacagcacctgatcccggcctgaagcgcaagtcccctcctgaggccctgtcagggtccttacccccagccaccacctgccccgcctcgtccacgcctgcgcccactatcatccctgctccagctgcccccgggaagccagcctccgcagccaccgtgaagaggaagcggaagagccggtgggggcctgaagaggataaggtagagctcccacctgctgaactggtgcagagggacgtggatgcctctccctcgcctctgtcagttcaggacctcaaggggctcggctatgagaaggggaagcctgtgggtctagtggggccttcacaaaaaccttttcaataccgcctccaaaaaaaagaccaattttgtaaaggaagccaagccatgggaagaatgtccagccca

SEQ ID NO: 438618 - DNA, 1112 bp, Homo sapiens
taggctagtacgaggctgggtgttaatcggccgaggcggctgaagcgcaagtcccctcctgaggccctgtcagggtccttacccccagccaccacctgccccgcctcgtccacgcctgcgcccactatcatccctgctccagctgcccccgggaagccagcctccgcagccaccgtgaagaggaagcggaagagccggtgggggcctgaagaggataaggtagagctcccacctgctgaactggtgcagagggacgtggatgcctctccctcgcctctgtcagttcaggacctcaaggggctcggctatgagaaggggaagcctgtgggtctagtgggcgtcacagagctttcagacgcccagaagaagcagctgaaggagcagcaggagatgcagcagatgtacgacatgatcatgcagcacaagcgggccatgcaggacatgcagctgctgtgggagaaggcagtccaacagcaccagcacggctatgacagtgatgaggaggtggacagcgagctgggcacctgggagcaccagctgcggcgcatggagatggataagaccagggaatgggccgagcagctgacaaagatgggccggggcaagcacttcatcggagacttcctgcctccagacgagctggaaaagtttatggagaccttcaaggccctgaaggagggccgtgagcctgactactcagagtacaaggagttcaagctgactgtggagaacatcggctaccagatgctgatgaagatgggctggaaggagggcgaggggctgggctcagagggccagggcatcaagaacccagtgaacaagggcaccaccacagtggacggcgctggcttcggcattgaccggccggcggagctctccaaggaggacgacgagtatgaggcgttccgcaagaggatgatgctggcctaccgcttccggcccaaccccctgaacaatcccagacggccttactactgagtgttctggaaatacatactttctgaatgaccaaccgtccctggactgtggaatgttccggcctgcatttctgcccaccccttccgttgtcacgagtgccgtgccgtgtaataaagtcccagtgctcatccacc

SEQ ID NO: 438619 - DNA, 1664 bp, Homo sapiens
agcattgtgggattggatgagtctcaagatggacaaccgggatgttgcaggaaaggctaaccggtggtttggggttgctccccctaaatctggaaaaatgaacatgaacatccttcaccaggaagagctcatcgctcagaagaaacgggaaattgaagccaaaatggaacagaaagccaagcagaatcaggtggccagccctcagcccccacatcctggcgaaatcacaaatgcacacaactcttcctgcatttccaacaagtttgccaacgatggtagcttcttgcagcagtttctgaagttgcagaaggcacagaccagcacagacgccccgaccagtgcgcccagcgcccctcccagcacacccacccccagcgctgggaagaggtccctgctcatcagcaggcggacaggcctggggctggccagcctgccgggccctgtgaagagctactcccacgccaagcagctgcccgtggcgcaccgcccgagtgtcttccagtcccctgacgaggacgaggaggaggactatgagcagtggctggagatcaaagtttcacccccagagggagccgagactcggaaagtgatagagaaattggcccgctttgtggcagaaggaggccccgagttagaaaaagtagctatggaggactacaaggataacccagcatttgcatttttgcacgataagaatagcagggaattcctctactacaggaagaaggtggctgagataagaaaggaagcacagaagtcgcaggcagcctctcagaaagtttcacccccagaggacgaagaggtcaagaaccttgcagaaaagttggccaggttcatagcggacgggggtcccgaggtggaaaccattgccctccagaacaaccgtgagaaccaggcattcagctttctgtatgagcccaatagccaaggctctccaaggaggacgacgagtatgaggcgttccgcaagaggatgatgctggcctaccgcttccggcccaaccccctgaacaatcccagacggccttactactgagtgttctggaaatacatactttctgaatgaccaaccgtccctggactgtggaatgttccggcctgcatttctgcccaccccttccgttgtcacgagtgccgtgccgtgtaataaagtcccagtgctcatccaccaaaagatgcctggtcctgttgcaggaagcccctcctgttagcagcgggatgcaagatgctgtctcggggctctccttattggcctgtggagtctccatccccgctcagcctgggttgcactggaggggaggaagaaagctgttttcagcatagtaaagctggaaggccaggtgcagtgtctcacccctgtcatcccagcactttgagaggccaaggcgggcggatcactggaggtcaggagtttaagaccagcctggccaacatggtgaaatcctgtctctactaaaaatataaaattagctgggcatggtggtgcacacctgtcgtctcagctactcgggaggcagaggcaggagaatggcttgaacctgggaagcggttgcagtgagccaagattgcgcctttgcactccagcctgggcaagagagcaagactctgtctcaaataataataataataataaagctggagacttggccacacctgggctaaagg

SEQ ID NO: 438620 - DNA, 1653 bp, Homo sapiens
ccacgcgtccgctcaagatggacaaccgggatgttgcaggaaaggctaaccggtggtttggggttgctccccctaaatctggaaaaatgaacatgaacatccttcaccaggaagagctcatcgctcagaagaaacgggaaattgaagccaaaatggaacagaaagccaagcagaatcaggtggccagccctcagcccccacatcctggcgaaatcacaaatgcacacaactcttcctgcatttccaacaagtttgccaacgatggtagcttcttgcagcagtttctgaagttgcagaaggcacagaccagcacagacgccccgaccagtgcgcccagcgcccctcccagcacacccacccccagcgctgggaagaggtccctgctcatcagcaggcggacaggcctggggctggccagcctgccgggccctgtgaagagctactcccacgccaagcagctgcccgtggcgcaccgcccgagtgtcttccagtcccctgacgaggacgaggaggaggactatgagcagtggctggagatcaaagtttcacccccagagggagccgagactcggaaagtgatagagaaattggcccgctttgtggcagaaggaggccccgagttagaaaaagtagctatggaggactacaaggataacccagcatttgcatttttgcacgataagaatagcagggaattcctctactacaggaagaaggtggctgagataagaaaggaagcacagaagtcgcaggcagcctctcagaaagtttcacccccagaggacgaagaggtcaagaaccttgcagaaaagttggccaggttcatagcggacgggggtcccgaggtggaaaccattgccctccagaacaaccgtgagaaccaggcattcagctttctgtatgagcccaatagccaaggctctccaaggaggacgacgagtatgaggcgttccgcaagaggatgatgctggcctaccgcttccggcccaaccccctgaacaatcccagacggccttactactgagtgttctggaaatacatactttctgaatgaccaaccgtccctggactgtggaatgttccggcctgcatttctgcccaccccttccgttgtcacgagtgccgtgccgtgtaataaagtcccagtgctcatccaccaaaagatgcctggtcctgttgcaggaagcccctcctgttagcagcgggatgcaagatgctgtctcggggctctccttattggcctgtggagtctccatccccgctcagcctgggttgcactggaggggaggaagaaagctgttttcagcatagtaaagctggaaggccaggtgcagtgtctcacccctgtcatcccagcactttgagaggccaaggcgggcggatcactggaggtcaggagtttaagaccagcctggccaacatggtgaaatcctgtctctactaaaaatataaaattagctgggcatggtggtgcacacctgtcgtctcagctactcgggaggcagaggcaggagaatggcttgaacctgggaagcggttgcagtgagccaagattgcgcctttgcactccagcctgggcaagagagcaagactctgtctcaaataataataataataataaagctggagacttggccacacctgggctaaagg

SEQ ID NO: 438621 - DNA, 1530 bp, Homo sapiens
agcattgtgggattggatgagtctcaagatggacaaccgggatgttgcaggaaaggctaaccggtggtttggggttgctccccctaaatctggaaaaatgaacatgaacatccttcaccaggaagagctcatcgctcagaagaaacgggaaattgaagccaaaatggaacagaaagccaagcagaatcaggtggccagccctcagcccccacatcctggcgaaatcacaaatgcacacaactcttcctgcatttccaacaagtttgccaacgatggtagcttcttgcagcagtttctgaagttgcagaaggcacagaccagcacagacgccccgaccagtgcgcccagcgcccctcccagcacacccacccccagcgctgggaagaggtccctgctcatcagcaggcggacaggcctggggctggccagcctgccgggccctgtgaagagctactcccacgccaagcagctgcccgtggcgcaccgcccgagtgtcttccagtcccctgacgaggacgaggaggaggactatgagcagtggctggagatcaaagtttcacccccagagggagccgagactcggaaagtgatagagaaattggcccgctttgtggcagaaggaggccccgagttagaaaaagtagctatggagaacatcggctaccagatgctgatgaagatgggctggaaggagggcgaggggctgggctcagagggccagggcatcaagaacccagtgaacaagggcaccaccacagtggacggcgctggcttcggcattgaccggccggcggagctctccaaggaggacgacgagtatgaggcgttccgcaagaggatgatgctggcctaccgcttccggcccaaccccctgaacaatcccagacggccttactactgagtgttctggaaatacatactttctgaatgaccaaccgtccctggactgtggaatgttccggcctgcatttctgcccaccccttccgttgtcacgagtgccgtgccgtgtaataaagtcccagtgctcatccaccaaaagatgcctggtcctgttgcaggaagcccctcctgttagcagcgggatgcaagatgctgtctcggggctctccttattggcctgtggagtctccatccccgctcagcctgggttgcactggaggggaggaagaaagctgttttcagcatagtaaagctggaaggccaggtgcagtgtctcacccctgtcatcccagcactttgagaggccaaggcgggcggatcactggaggtcaggagtttaagaccagcctggccaacatggtgaaatcctgtctctactaaaaatataaaattagctgggcatggtggtgcacacctgtcgtctcagctactcgggaggcagaggcaggagaatggcttgaacctgggaagcggttgcagtgagccaagattgcgcctttgcactccagcctgggcaagagagcaagactctgtctcaaataataataataataataaagctggagacttggccacacctgggctaaagg

SEQ ID NO: 438622 - DNA, 638 bp, Homo sapiens
gcaattctcctgccccagcctcccgagtagctgggattacaggtgggcgcccccacgcccagctaatttttgtatttttagtagagacggggtttcaccatgttggccaggctggtctcgagctcctgaccttgtgatccgcccacctcagcctcccaaagtgctgggattactggcgtgagccaccacacccagcctctttcagctgttttcttaaagcacacagcaacctacacattcttttgtgataccaggccactgtaagggtggagcagcatgtgactttggtgttattgagatcatccgtgaccattgcagaaaaccactcccatctgtgcagtgagcaccttgaaataggccgtccaggaggcagagggtgcaccttgaaattgtgctaggctctccaaggaggacgacgagtatgaggcgttccgcaagaggatgatgctggcctaccgcttccggcccaaccccctgaacaatcccagacggccttactactgagtgttctggaaatacatactttctgaatgaccaaccgtccctggactgtggaatgttccggcctgcatttctgcccaccccttccgttgtcacgagtgccgtgccgtgtaataaagtcccagtgctcatccacc

SEQ ID NO: 438623 - DNA, 363 bp, Homo sapiens
acttcgcagtagtctcttgaaatctctgggggccagtttggggtcccagtaggtgagagtgctggggtgagttaggggccatgatggacgaggtgatggcctcatcctcatcctcgtcctctggtgccctcactccatctctagccagctcaccctctctgtcctctgtcttggttctagaatcacaaatgcacacaactcttcctgcatttccaacaagtttgccaacgatggtagcttcttgcagcagtttctgaagttgcagaaggcacagaccagcacaggtgagtgtaggcctcccctttccttgtgctgtccttgcatctccccctggggttgctgggcacatgggaagtgatgggt

SEQ ID NO: 438624 - DNA, 325 bp, Homo sapiens
aagggaaggctgtgctgttgaatgcgtttgctgcacagtcgcacgtgtggggctgggtgcttgctagtgtgggccggatgctgttccaagcgttttctgattctcaccagaagtgacaagtggctcccatgtggcacggagacttgctttcgggtccctgctcgccagcctgcctttttttgcacgatagaagctgcagggatatgcctgtcacagatacttattttcccctctcttctgcaaacttcctcctctccagatttttgcacgataagaatagcagggaattcctctactacaggaagaaggtggctgagataagaaa

SEQ ID NO: 438625 - DNA, 2088 bp, Homo sapiens
agcattgtgggattggatgagtctcaagatggacaaccgggatgttgcaggaaaggctaaccggtggtttggggttgctccccctaaatctggaaaaatgaacatgaacatccttcaccaggaagagctcatcgctcagaagaaacgggaaattgaagccaaaatggaacagaaagccaagcagaatcaggtggccagccctcagcccccacatcctggcgaaatcacaaatgcacacaactcttcctgcatttccaacaagtttgccaacgatggtagcttcttgcagcagtttctgaagttgcagaaggcacagaccagcacagacgccccgaccagtgcgcccagcgcccctcccagcacacccacccccagcgctgggaagaggtccctgctcatcagcaggcggacaggcctggggctggccagcctgccgggccctgtgaagagctactcccacgccaagcagctgcccgtggcgcaccgcccgagtgtcttccagtcccctgacgaggacgaggaggaggactatgagcagtggctggagatcaaagtttcacccccagagggagccgagactcggaaagtgatagagaaattggcccgctttgtggcagaaggaggccccgagttagaaaaagtagctatggaggactacaaggataacccagcatttgcatttttgcacgataagaatagcagggaattcctctactacaggaagaaggtggctgagataagaaaggaagcacagaagtcgcaggcagcctctcagaaagtttcacccccagaggacgaagaggtcaagaaccttgcagaaaagttggccaggttcatagcggacgggggtcccgaggtggaaaccattgccctccagaacaaccgtgagaaccaggcattcagctttctgtatgagcccaatagccaagggtacaagtactaccgacagaagctggaggagttccggaaagccaaggccagctccacaggcagcttcacagcacctgatcccggcctgaagcgcaagtcccctcctgaggccctgtcagggtccttacccccagccaccacctgccccgcctcgtccacgcctgcgcccactatcatccctgctccagctgcccccgggaagccagcctccgcagccaccgtgaagaggaagcggaagagccggtgggggcctgaagaggataaggtagagctcccacctgctgaactggtgcagagggacgtggatgcctctccctcgcctctgtcagttcaggacctcaaggggctcggctatgagaaggggaagcctgtgggtctagtgggcgtcacagagctttcagacgcccagaagaagcagctgaaggagcagcaggagatgcagcagatgtacgacatgatcatgcagcacaagcgggccatgcaggacatgcagctgctgtgggagaaggcagtccaacagcaccagcacggctatgacagtgatgaggaggtggacagcgagctgggcacctgggagcaccagctgcggcgcatggagatggataagaccagggaatgggccgagcagctgacaaagatgggccggggcaagcacttcatcggagacttcctgcctccagacgagctggaaaagtttatggagaccttcaaggccctgaaggagggccgtgagcctgactactcagagtacaaggagttcaagctgactgtggagaacatcggctaccagatgctgatgaagatgggctggaaggagggcgaggggctgggctcagagggccagggcatcaagaacccagtgaacaagggcaccaccacagtggacggcgctggcttcggcattgaccggccggcggagctctccaaggaggacgacgagtatgaggcgttccgcaagaggatgatgctggcctaccgcttccggcccaaccccctgaacaatcccagacggccttactactgagtgttctggaaatacatactttctgaatgaccaaccgtccctggactgtggaatgttccggcctgcatttctgcccaccccttccgttgtcacgagtgccgtgccgtgtaataaagtcccagtgctcatccacc

SEQ ID NO: 438626 - DNA, 2077 bp, Homo sapiens
ccacgcgtccgctcaagatggacaaccgggatgttgcaggaaaggctaaccggtggtttggggttgctccccctaaatctggaaaaatgaacatgaacatccttcaccaggaagagctcatcgctcagaagaaacgggaaattgaagccaaaatggaacagaaagccaagcagaatcaggtggccagccctcagcccccacatcctggcgaaatcacaaatgcacacaactcttcctgcatttccaacaagtttgccaacgatggtagcttcttgcagcagtttctgaagttgcagaaggcacagaccagcacagacgccccgaccagtgcgcccagcgcccctcccagcacacccacccccagcgctgggaagaggtccctgctcatcagcaggcggacaggcctggggctggccagcctgccgggccctgtgaagagctactcccacgccaagcagctgcccgtggcgcaccgcccgagtgtcttccagtcccctgacgaggacgaggaggaggactatgagcagtggctggagatcaaagtttcacccccagagggagccgagactcggaaagtgatagagaaattggcccgctttgtggcagaaggaggccccgagttagaaaaagtagctatggaggactacaaggataacccagcatttgcatttttgcacgataagaatagcagggaattcctctactacaggaagaaggtggctgagataagaaaggaagcacagaagtcgcaggcagcctctcagaaagtttcacccccagaggacgaagaggtcaagaaccttgcagaaaagttggccaggttcatagcggacgggggtcccgaggtggaaaccattgccctccagaacaaccgtgagaaccaggcattcagctttctgtatgagcccaatagccaagggtacaagtactaccgacagaagctggaggagttccggaaagccaaggccagctccacaggcagcttcacagcacctgatcccggcctgaagcgcaagtcccctcctgaggccctgtcagggtccttacccccagccaccacctgccccgcctcgtccacgcctgcgcccactatcatccctgctccagctgcccccgggaagccagcctccgcagccaccgtgaagaggaagcggaagagccggtgggggcctgaagaggataaggtagagctcccacctgctgaactggtgcagagggacgtggatgcctctccctcgcctctgtcagttcaggacctcaaggggctcggctatgagaaggggaagcctgtgggtctagtgggcgtcacagagctttcagacgcccagaagaagcagctgaaggagcagcaggagatgcagcagatgtacgacatgatcatgcagcacaagcgggccatgcaggacatgcagctgctgtgggagaaggcagtccaacagcaccagcacggctatgacagtgatgaggaggtggacagcgagctgggcacctgggagcaccagctgcggcgcatggagatggataagaccagggaatgggccgagcagctgacaaagatgggccggggcaagcacttcatcggagacttcctgcctccagacgagctggaaaagtttatggagaccttcaaggccctgaaggagggccgtgagcctgactactcagagtacaaggagttcaagctgactgtggagaacatcggctaccagatgctgatgaagatgggctggaaggagggcgaggggctgggctcagagggccagggcatcaagaacccagtgaacaagggcaccaccacagtggacggcgctggcttcggcattgaccggccggcggagctctccaaggaggacgacgagtatgaggcgttccgcaagaggatgatgctggcctaccgcttccggcccaaccccctgaacaatcccagacggccttactactgagtgttctggaaatacatactttctgaatgaccaaccgtccctggactgtggaatgttccggcctgcatttctgcccaccccttccgttgtcacgagtgccgtgccgtgtaataaagtcccagtgctcatccacc

SEQ ID NO: 438627 - DNA, 2017 bp, Homo sapiens
agcattgtgggattggatgagtctcaagatggacaaccgggatgttgcaggaagagctcatcgctcagaagaaacgggaaattgaagccaaaatggaacagaaagccaagcagaatcaggtggccagccctcagcccccacatcctggcgaaatcacaaatgcacacaactcttcctgcatttccaacaagtttgccaacgatggtagcttcttgcagcagtttctgaagttgcagaaggcacagaccagcacagacgccccgaccagtgcgcccagcgcccctcccagcacacccacccccagcgctgggaagaggtccctgctcatcagcaggcggacaggcctggggctggccagcctgccgggccctgtgaagagctactcccacgccaagcagctgcccgtggcgcaccgcccgagtgtcttccagtcccctgacgaggacgaggaggaggactatgagcagtggctggagatcaaagtttcacccccagagggagccgagactcggaaagtgatagagaaattggcccgctttgtggcagaaggaggccccgagttagaaaaagtagctatggaggactacaaggataacccagcatttgcatttttgcacgataagaatagcagggaattcctctactacaggaagaaggtggctgagataagaaaggaagcacagaagtcgcaggcagcctctcagaaagtttcacccccagaggacgaagaggtcaagaaccttgcagaaaagttggccaggttcatagcggacgggggtcccgaggtggaaaccattgccctccagaacaaccgtgagaaccaggcattcagctttctgtatgagcccaatagccaagggtacaagtactaccgacagaagctggaggagttccggaaagccaaggccagctccacaggcagcttcacagcacctgatcccggcctgaagcgcaagtcccctcctgaggccctgtcagggtccttacccccagccaccacctgccccgcctcgtccacgcctgcgcccactatcatccctgctccagctgcccccgggaagccagcctccgcagccaccgtgaagaggaagcggaagagccggtgggggcctgaagaggataaggtagagctcccacctgctgaactggtgcagagggacgtggatgcctctccctcgcctctgtcagttcaggacctcaaggggctcggctatgagaaggggaagcctgtgggtctagtgggcgtcacagagctttcagacgcccagaagaagcagctgaaggagcagcaggagatgcagcagatgtacgacatgatcatgcagcacaagcgggccatgcaggacatgcagctgctgtgggagaaggcagtccaacagcaccagcacggctatgacagtgatgaggaggtggacagcgagctgggcacctgggagcaccagctgcggcgcatggagatggataagaccagggaatgggccgagcagctgacaaagatgggccggggcaagcacttcatcggagacttcctgcctccagacgagctggaaaagtttatggagaccttcaaggccctgaaggagggccgtgagcctgactactcagagtacaaggagttcaagctgactgtggagaacatcggctaccagatgctgatgaagatgggctggaaggagggcgaggggctgggctcagagggccagggcatcaagaacccagtgaacaagggcaccaccacagtggacggcgctggcttcggcattgaccggccggcggagctctccaaggaggacgacgagtatgaggcgttccgcaagaggatgatgctggcctaccgcttccggcccaaccccctgaacaatcccagacggccttactactgagtgttctggaaatacatactttctgaatgaccaaccgtccctggactgtggaatgttccggcctgcatttctgcccaccccttccgttgtcacgagtgccgtgccgtgtaataaagtcccagtgctcatccacc

SEQ ID NO: 438628 - DNA, 1481 bp, Homo sapiens
agcattgtgggattggatgagtctcaagatggacaaccgggatgttgcaggaaaggctaaccggtggtttggggttgctccccctaaatctggaaaaatgaacatgaacatccttcaccaggaagagctcatcgctcagaagaaacgggaaattgaagccaaaatggaacagaaagccaagcagaatcaggtggccagccctcagcccccacatcctggcgaaatcacaaatgcacacaactcttcctgcatttccaacaagtttgccaacgatggtagcttcttgcagcagtttctgaagttgcagaaggcacagaccagcacagacgccccgaccagtgcgcccagcgcccctcccagcacacccacccccagcgctgggaagaggtccctgctcatcagcaggcggacaggcctggggctggccagcctgccgggccctgtgaagagctactcccacgccaagcagctgcccgtggcgcaccgcccgagtgtcttccagtcccctgacgaggacgaggaggaggactatgagcagtggctggagatcaaagtttcacccccagagggagccgagactcggaaagtgatagagaaattggcccgctttgtggcagaaggaggccccgagttagaaaaagtagctatggaggactacaaggataacccagcatttgcatttttgcacgataagaatagcagggaattcctctactacaggaagaaggtggctgagataagaaaggaagcacagaagtcgcaggcagcctctcagaaagctttctgtatgagcccaatagccaagggtacaagtactaccgacagaagctggaggagttccggaaagccaaggccagctccacaggcagcttcacagcacctgatcccggcctgaagcgcaagtcccctcctgaggccctgtcagggtccttaccccaatgggccgagcagctgacaaagatgggccggggcaagcacttcatcggagacttcctgcctccagacgagctggaaaagtttatggagaccttcaaggccctgaaggagggccgtgagcctgactactcagagtacaaggagttcaagctgactgtggagaacatcggctaccagatgctgatgaagatgggctggaaggagggcgaggggctgggctcagagggccagggcatcaagaacccagtgaacaagggcaccaccacagtggacggcgctggcttcggcattgaccggccggcggagctctccaaggaggacgacgagtatgaggcgttccgcaagaggatgatgctggcctaccgcttccggcccaaccccctgaacaatcccagacggccttactactgagtgttctggaaatacatactttctgaatgaccaaccgtccctggactgtggaatgttccggcctgcatttctgcccaccccttccgttgtcacgagtgccgtgccgtgtaataaagtcccagtgctcatccacc

SEQ ID NO: 438629 - DNA, 1590 bp, Homo sapiens
agcattgtgggattggatgagtctcaagatggacaaccgggatgttgcaggaaaggctaaccggtggtttggggttgctccccctaaatctggaaaaatgaacatgaacatccttcaccaggaagagctcatcgctcagaagaaacgggaaattgaagccaaaatggaacagaaagccaagcagaatcaggtggccagccctcagcccccacatcctggcgaaatcacaaatgcacacaactcttcctgcatttccaacaagtttgccaacgatggtagcttcttgcagcagtttctgaagttgcagaaggcacagaccagcacagacgccccgaccagtgcgcccagcgcccctcccagcacacccacccccagcgctgggaagaggtccctgctcatcagcaggcggacaggcctggggctggccagcctgccgggccctgtgaagagctactcccacgccaagcagctgcccgtggcgcaccgcccgagtgtcttccagtcccctgacgaggacgaggaggaggactatgagcagtggctggagatcaaagtttcacccccagagggagccgagactcggaaagtgatagagaaattggcccgctttgtggcagaaggaggccccgagttagaaaaagtagctatggaggactacaaggataacccagcatttgcatttttgcacgataagaatagcagggaattcctctactacaggaagaaggtggctgagataagaaaggaagcacagaagtcgcaggcagcctctcagaaagtttcacccccagaggacgaagaggtcaagaaccttgcagaaaagttggccaggttcatagcggacgggggtcccgaggtggaaaccattgccctccagaacaaccgtgagaaccaggcattcagctttctgtatgagcccaatagccaagggtacaagtactaccgacagaagctggaggagttccggaaagccaaggccagctccacaggcagcttcacagcacctgatcccggcctgaagcgcaagtcccctcctgaggccctgtcagggtccttacccccagccaccacctgccccgcctcgtccacgcctgcgcccactatcatccctgctccagctgcccccgggaagccagcctccgcagccaccgtgaagaggaagcggaagagccggtgggggcctgaagaggataaggtagagctcccacctgctgaactggtgcagagggacgtggatgcctctccctcgcctctgtcagttcaggacctcaaggggctcggctatgagaaggggaagcctgtgggtctagtgggcgtcacagagctttcagacgcccagaagaagcagctgaaggagcagcaggagatgcagcagatgtacgacatgatcatgcagcacaagcgggccatgcaggacatgcagctgctgtgggagaaggcagtccaacagcaccagcacggctatgacagtgatgaggaggtggacagcgagctgggcacctgggagcaaccaacctggcgggcgcccatgggaagaatgggattaaagaaccaagggaaattggggccccaagccaagctttgaacaaa

SEQ ID NO: 438630 - DNA, 1174 bp, Homo sapiens
gatgggcggatcatgaagatcagtgagatagggcaatatgggtgcagcccctatctctacgaggaaatacaaagtgcagcttcacagcacctgatcccggcctgaagcgcaagtcccctcctgaggccctgtcagggtccttacccccagccaccacctgccccgcctcgtccacgcctgcgcccactatcatccctgctccagctgcccccgggaagccagcctccgcagccaccgtgaagaggaagcggaagagccggtgggggcctgaagaggataaggtagagctcccacctgctgaactggtgcagagggacgtggatgcctctccctcgcctctgtcagttcaggacctcaaggggctcggctatgagaaggggaagcctgtgggtctagtgggcgtcacagagctttcagacgcccagaagaagcagctgaaggagcagcaggagatgcagcagatgtacgacatgatcatgcagcacaagcgggccatgcaggacatgcagctgctgtgggagaaggcagtccaacagcaccagcacggctatgacagtgatgaggaggtggacagcgagctgggcacctgggagcaccagctgcggcgcatggagatggataagaccagggaatgggccgagcagctgacaaagatgggccggggcaagcacttcatcggagacttcctgcctccagacgagctggaaaagtttatggagaccttcaaggccctgaaggagggccgtgagcctgactactcagagtacaaggagttcaagctgactgtggagaacatcggctaccagatgctgatgaagatgggctggaaggagggcgaggggctgggctcagagggccagggcatcaagaacccagtgaacaagggcaccaccacagtggacggcgctggcttcggcattgaccggccggcggagctctccaaggaggacgacgagtatgaggcgttccgcaagaggatgatgctggcctaccgcttccggcccaaccccctgaacaatcccagacggccttactactgagtgttctggaaatacatactttctgaatgaccaaccgtccctggactgtggaatgttccggcctgcatttctgcccaccccttccgttgtcacgagtgccgtgccgtgtaataaagtcccagtgctcatccacc

SEQ ID NO: 438631 - DNA, 1357 bp, Homo sapiens
agcattgtgggattggatgagtctcaagatggacaaccgggatgttgcaggaaaggctaaccggtggtttggggttgctccccctaaatctggaaaaatgaacatgaacatccttcaccaggaagagctcatcgctcagaagaaacgggaaattgaagccaaaatggaacagaaagccaagcagaatcaggtggccagccctcagcccccacatcctggcgaaatcacaaatgcacacaactcttcctgcatttccaacaagtttgccaacgatggtagcttcttgcagcagtttctgaagttgcagaaggcacagaccagcacagacgccccgaccagtgcgcccagcgcccctcccagcacacccacccccagcgctgggaagaggtccctgctcatcagcaggcggacaggcctggggctggccagcctgccgggccctgtgaagagctactcccacgccaagcagctgcccgtggcgcaccgcccgagtgtcttccagtcccctgacgaggacgaggaggaggactatgagcagtggctggagatcaaagatttttgcacgataagaatagcagggaattcctctactacaggaagaaggtggctgagataagaaaggaagcacagaagtcgcaggcagcctctcagaaagctttctgtatgagcccaatagccaagggtacaagtactaccgacagaagctggaggagttccggaaagccaaggccagctccacaggcagcttcacagcacctgatcccggcctgaagcgcaagtcccctcctgaggccctgtcagggtccttaccccaatgggccgagcagctgacaaagatgggccggggcaagcacttcatcggagacttcctgcctccagacgagctggaaaagtttatggagaccttcaaggccctgaaggagggccgtgagcctgactactcagagtacaaggagttcaagctgactgtggagaacatcggctaccagatgctgatgaagatgggctggaaggagggcgaggggctgggctcagagggccagggcatcaagaacccagtgaacaagggcaccaccacagtggacggcgctggcttcggcattgaccggccggcggagctctccaaggaggacgacgagtatgaggcgttccgcaagaggatgatgctggcctaccgcttccggcccaaccccctgaacaatcccagacggccttactactgagtgttctggaaatacatactttctgaatgaccaaccgtccctggactgtggaatgttccggcctgcatttctgcccaccccttccgttgtcacgagtgccgtgccgtgtaataaagtcccagtgctcatccacc

SEQ ID NO: 438632 - DNA, 584 bp, Homo sapiens
ccccgtcccagaaggcgcatggagatggataagaccagggaatgggccgagcagctgacaaagatgggccggggcaagcacttcatcggagacttcctgcctccagacgagctggaaaagtttatggagaccttcaaggccctgaaggagggccgtgagcctgactactcagagtacaaggagttcaagctgactgtggagaacatcggctaccagatgctgatgaagatgggctggaaggagggcgaggggctgggctcagagggccagggcatcaagaacccagtgaacaagggcaccaccacagtggacggcgctggcttcggcattgaccggccggcggagctctccaaggaggacgacgagtatgaggcgttccgcaagaggatgatgctggcctaccgcttccggcccaaccccctgaacaatcccagacggccttactactgagtgttctggaaatacatactttctgaatgaccaaccgtccctggactgtggaatgttccggcctgcatttctgcccaccccttccgttgtcacgagtgccgtgccgtgtaataaagtcccagtgctcatccacc

SEQ ID NO: 438633 - DNA, 821 bp, Homo sapiens
attcctttcaattttaggtaaaagaaacctttttaccagatagtgacgagtggctaccatgattaataagtgactagacctcatggtcctcctcatactaaaaggtgaacagtgcaagctgtcggtggatctaccattctggggtcttggggacagtggccctcttctcacagctcccggtgaatgctgcaatgatcattggtaggactgttaggctttgtttctcaagaggataatctgattgggaaaagaataagagtgcagctgcagcccatccttgtgaagaaggtaccagtgcgctctcaaagccaagtcttgaaaataatagcgaatgctgtattggataacagccatgccagatacagagaagccacagatggcattgtcaccagaaaatggaagcacaaagcgctttgggtaacagcaattcaagaatgactgcagagaaaatctattaagaaattcaaatgcagatttcaatatttactccttttcattctcttcctctctctctcgctcacttgctctttttctctctcccaccttgtttttctcgctctccttttttttgcatacagtttctcagtaaaatacatttgattaaattttataacaaacaagcttatgaaatgcagatatacaaaaaggaaaacataagaagcatgcataattctaccactgaaaaatactactaaaatttggtatttaaacttttgaatgtttgtcactgcacttgcatgtgtgtgtaaatataatctccaactctgcagagaaatacaagaattgttatgaaccttaataaactcccaaaagatttcaaa

SEQ ID NO: 438634 - DNA, 723 bp, Homo sapiens
ttaagaaagctaaatataaacttttattacatcccaatgcaagatgtttccaatacaatctatttccttcaaaggtggggtggagaatgaggggtggggtttgggccacatatttttatgtttacattttatttcagattggaaaatttgtatttcactgtcaaatcaagtaagaacacatttattacttagtgttgcttgaaataatatctacaatgtttaaagtttcatttaaaagcataaacttcttttaagctcaaagttaaaaacacaaatataaactgcatttcatgttctgttaatatttagctgtgtggcaatggatgagtattttttctctgtgaggctttgttttctcatctggcaaatgaggaaattgatgcagatcatcttcaagttcccttcatgatatttaatataactatttatgtcatgcttgtaaatagtaggtgatgatgaaggttactgttccccacaggtgaatgctgcaatgatcattggtaggactgttaggctttgtttctcaagaggataatctgattgggaaaagaataagagtgcagctgcagcccatccttgtgaagaaggtaccagtgcgctctcaaagccaagtcttgaaaataatagcgaatgctgtattggataacagccatgccaggtgattcatagatttatcttatttaatcatggtaagaagcttccaaaagagtttctttgaactga

SEQ ID NO: 438635 - DNA, 883 bp, Homo sapiens
  misc_feature (757)..(757): n is a, c, g, or t
  misc_feature (759)..(759): n is a, c, g, or t
  misc_feature (763)..(763): n is a, c, g, or t
  misc_feature (854)..(854): n is a, c, g, or t
  misc_feature (882)..(883): n is a, c, g, or t
aggccgagcgcgggcctagcgcgcatacgccgagccggcgagccggtctttgagcgctaacgtctttctgtctccccgcggtggtgatgacggtgaaaactgaggctgctaagggcaccctcacttactccaggatgaggggcatggtggcaattctcatcgctttcatgaagcagaggaggatgggtctgaacgactttattcagaagattgccaataactcctatgcatgcaaacaccctgaagttcagtccatcttgaagatctcccaacctcaggagcctgagcttatgaatgccaacccttctcctccaccaagtccttctcagcaaatcaaccttggcccgtcgtccaatcctcatgctaaaccatctgactttcacttcttgaaagtgatcggaaagggcagttttggaaaggttcttctagcaagacacaaggcagaagaagtgttctatgcagtcaaagttttacagaagaaagcaatcctgaaaaagaaagaggagaagcatattatgtcggagcggaatgttctgttgaagaatgtgaagcaccctttcctggtgggccttcacttctctttccagactgctgacaaattgtactttgtcctagactacattaatggtggagagttgttctaccatctccagagggaacgctgcttcctggaaccacgggctcgtttctatgctgctgaaatagccagtgccttgggctacctgcattcactgaacatcgtttatagagagacttnanaccngaggaatattttgcctagaattcaacaaggggacacaatttgcccttaactgggactttcgggactcccggcaaagggggaaacaattggnaccaacaaacagggacaaacaatccaann

SEQ ID NO: 438636 - DNA, 2400 bp, Homo sapiens
aggccgagcgcgggcctagcgcgcatacgccgagccggcgagccggtctttgagcgctaacgtctttctgtctccccgcggtggtgatgacggtgaaaactgaggctgctaagggcaccctcacttactccaggatgaggggcatggtggcaattctcatcgctttcatgaagcagaggaggatgggtctgaacgactttattcagaagattgccaataactcctatgcatgcaaacaccctgaagttcagtccatcttgaagatctcccaacctcaggagcctgagcttatgaatgccaacccttctcctccaccaagtccttctcagcaaatcaaccttggcccgtcgtccaatcctcatgctaaaccatctgactttcacttcttgaaagtgatcggaaagggcagttttggaaaggttcttctagcaagacacaaggcagaagaagtgttctatgcagtcaaagttttacagaagaaagcaatcctgaaaaagaaagaggagaagcatattatgtcggagcggaatgttctgttgaagaatgtgaagcaccctttcctggtgggccttcacttctctttccagactgctgacaaattgtactttgtcctagactacattaatggtggagagttgttctaccatctccagagggaacgctgcttcctggaaccacgggctcgtttctatgctgctgaaatagccagtgccttgggctacctgcattcactgaacatcgtttatagagacttaaaaccagagaatattttgctagattcacagggacacattgtccttactgacttcggactctgcaaggagaacattgaacacaacagcacaacatccaccttctgtggcacgccggagtatctcgcacctgaggtgcttcataagcagccttatgacaggactgtggactggtggtgcctgggagctgtcttgtatgagatgctgtatggcctgccgcctttttatagccgaaacacagctgaaatgtacgacaacattctgaacaagcctctccagctgaaaccaaatattacaaattccgcaagacacctcctggagggcctcctgcagaaggacaggacaaagcggctcggggccaaggatgacttcatggagattaagagtcatgtcttcttctccttaattaactgggatgatctcattaataagaagattactcccccttttaacccaaatgtgagtgggcccaacgacctacggcactttgaccccgagtttaccgaagagcctgtccccaactccattggcaagtcccctgacagcgtcctcgtcacagccagcgtcaaggaagctgccgaggctttcctaggcttttcctatgcgcctcccacggactctttcctctgaaccctgttagggcttggttttaaaggattttatgtgtgtttccgaatgttttagttagccttttggtggagccgccagctgacaggacatcttacaagagaatttgcacatctctggaagcttagcaatcttattgcacactgttcgctggaagctttttgaagagcacattctcctcagtgagctcatgaggttttcatttttattcttccttccaacgtggtgctatctctgaaacgagcgttagagtgccgccttagacggaggcaggagtttcgttagaaagcggacgctgttctaaaaaaggtctcctgcagatctgtctgggctgtgatgacgaatattatgaaatgtgccttttctgaagagattgtgttagctccaaagcttttcctatcgcagtgtttcagttctttattttcccttgtggatatgctgtgtgaaccgtcgtgtgagtgtggtatgcctgatcacagatggattttgttataagcatcaatgtgacacttgcaggacactacaacgtgggacattgtttgtttcttccatatttggaagataaatttatgtgtagacttttttgtaagatacggttaataactaaaatttattgaaatggtcttgcaatgactcgtattcagatgcttaaagaaagcattgctgctacaaatatttctatttttagaaagggtttttatggaccaatgccccagttgtcagtcagagccgttggtgtttttcattgtttaaaatgtcacctgtaaaatgggcattatttatgtttttttttttgcattcctgataattgtatgtattgtataaagaacgtctgtacattgggttataacactagtatatttaaacttacaggcttatttgtaatgtaaaccaccattttaatgtactgtaattaacatggttataatacgtacaatccttccctcatcccatcacacaactttttttgtgtgtgataaactgattttggtttgcaataaaaccttgaaaaatatttaca

SEQ ID NO: 438637 - DNA, 2790 bp, Homo sapiens
aggccgagcgcgggcctagcgcgcatacgccgagccggcgagccggtctttgagcgctaacgtctttctgtctccccgcggtggtgatgacggtgaaaactgaggctgctaagggcaccctcacttactccaggatgaggggcatggtggcaattctcatcgctttcatgaagcagaggaggatgggtctgaacgactttattcagaagattgccaataactcctatgcatgcaaacaccctgaagttcagtccatcttgaagatctcccaacctcaggagcctgagcttatgaatgccaacccttctcctccaccaagtccttctcagcaaatcaaccttggcccgtcgtccaatcctcatgctaaaccatctgactttcacttcttgaaagtgatcggaaagggcagttttggaaaggttcttctagcaagacacaaggcagaagaagtgttctatgcagtcaaagttttacagaagaaagcaatcctgaaaaagaaagaggagaagcatattatgtcggagcggaatgttctgttgaagaatgtgaagcaccctttcctggtgggccttcacttctctttccagactgctgacaaattgtactttgtcctagactacattaatggtggagagttgttctaccatctccagagggaacgctgcttcctggaaccacgggctcgtttctatgctgctgaaatagccagtgccttgggctacctgcattcactgaacatcgtttatagagacttaaaaccagagaatattttgctagattcacagggacacattgtccttactgacttcggactctgcaaggagaacattgaacacaacagcacaacatccaccttctgtggcacgccggagtatctcgcacctgaggtgcttcataagcagccttatgacaggactgtggactggtggtgcctgggagctgtcttgtatgagatgctgtatggcctgccgcctttttatagccgaaacacagctgaaatgtacgacaacattctgaacaagcctctccagctgaaaccaaatattacaaattccgcaagacacctcctggagggcctcctgcagaaggacaggacaaagcggctcggggccaaggatgacttcatggagattaagagtcatgtcttcttctccttaattaactgggatgatctcattaataagaagattactcccccttttaacccaaatgtggtgagtatctgtctctcttctaagtatagagaagcccaaagggcatttattttaattcagaattgtctgggggagggttggaaggaatacattggcagatgttttctccataaacctgttattttacctacataaaaagcacatttttgtgtcccaacaaggctcccataatttttagacacatttatcaattcgaagcaccaaaaggcaacaagtgaacattattcttatgtttaactgtgtgtagccttttgagattttgtgcttgaagtgggtgattatggaagttgatataagacttaaacttggtatttaaagcctggtcaagatttccctgtcctgtgtctagtgtgagttcttgacaagagtgtttttcccttcccgtcacagagtgggcccaacgacctacggcactttgaccccgagtttaccgaagagcctgtccccaactccattggcaagtcccctgacagcgtcctcgtcacagccagcgtcaaggaagctgccgaggctttcctaggcttttcctatgcgcctcccacggactctttcctctgaaccctgttagggcttggttttaaaggattttatgtgtgtttccgaatgttttagttagccttttggtggagccgccagctgacaggacatcttacaagagaatttgcacatctctggaagcttagcaatcttattgcacactgttcgctggaagctttttgaagagcacattctcctcagtgagctcatgaggttttcatttttattcttccttccaacgtggtgctatctctgaaacgagcgttagagtgccgccttagacggaggcaggagtttcgttagaaagcggacgctgttctaaaaaaggtctcctgcagatctgtctgggctgtgatgacgaatattatgaaatgtgccttttctgaagagattgtgttagctccaaagcttttcctatcgcagtgtttcagttctttattttcccttgtggatatgctgtgtgaaccgtcgtgtgagtgtggtatgcctgatcacagatggattttgttataagcatcaatgtgacacttgcaggacactacaacgtgggacattgtttgtttcttccatatttggaagataaatttatgtgtagacttttttgtaagatacggttaataactaaaatttattgaaatggtcttgcaatgactcgtattcagatgcttaaagaaagcattgctgctacaaatatttctatttttagaaagggtttttatggaccaatgccccagttgtcagtcagagccgttggtgtttttcattgtttaaaatgtcacctgtaaaatgggcattatttatgtttttttttttgcattcctgataattgtatgtattgtataaagaacgtctgtacattgggttataacactagtatatttaaacttacaggcttatttgtaatgtaaaccaccattttaatgtactgtaattaacatggttataatacgtacaatccttccctcatcccatcacacaactttttttgtgtgtgataaactgattttggtttgcaataaaaccttgaaaaatatttaca

SEQ ID NO: 438638 - DNA, 2843 bp, Homo sapiens
aggccgagcgcgggcctagcgcgcatacgccgagccggcgagccggtctttgagcgctaacgtctttctgtctccccgcggtggtgatgacggtgaaaactgaggctgctaagggcaccctcacttactccaggatgaggggcatggtggcaattctcatcgctttcatgaagcagaggaggatgggtctgaacgactttattcagaagattgccaataactcctatgcatgcaaacaccctgaagttcagtccatcttgaagatctcccaacctcaggagcctgagcttatgaatgccaacccttctcctccaccaagtccttctcagcaaatcaaccttggcccgtcgtccaatcctcatgctaaaccatctgactttcacttcttgaaagtgatcggaaagggcagttttggaaaggttcttctagcaagacacaaggcagaagaagtgttctatgcagtcaaagttttacagaagaaagcaatcctgaaaaagaaagaggagaagcatattatgtcggagcggaatgttctgttgaagaatgtgaagcaccctttcctggtgggccttcacttctctttccagactgctgacaaattgtactttgtcctagactacattaatggtggagagttgttctaccatctccagagggaacgctgcttcctggaaccacgggctcgtttctatgctgctgaaatagccagtgccttgggctacctgcattcactgaacatcgtttatagagacttaaaaccagagaatattttgctagattcacagggacacattgtccttactgacttcggactctgcaaggagaacattgaacacaacagcacaacatccaccttctgtggcacgccggagtatctcgcacctgaggtgcttcataagcagccttatgacaggactgtggactggtggtgcctgggagctgtcttgtatgagatgctgtatggcctgccgcctttttatagccgaaacacagctgaaatgtacgacaacattctgaacaagcctctccagctgaaaccaaatattacaaattccgcaagacacctcctggagggcctcctgcagaaggacaggacaaagcggctcggggccaaggatgacttcgtgagtgatgttttcctgtcctcctgggccggccgggacgtgcactagacctccctgcccttattgaatgcacctgtctaaattaatcttgggtttcttatcaacagatggagattaagagtcatgtcttcttctccttaattaactgggatgatctcattaataagaagattactcccccttttaacccaaatgtggtgagtatctgtctctcttctaagtatagagaagcccaaagggcatttattttaattcagaattgtctgggggagggttggaaggaatacattggcagatgttttctccataaacctgttattttacctacataaaaagcacatttttgtgtcccaacaaggctcccataatttttagacacatttatcaattcgaagcaccattttgtgcttgaagtgggtgattatggaagttgatataagacttaaacttggtatttaaagcctggtcaagatttccctgtcctgtgtctagtgtgagttcttgacaagagtgtttttcccttcccgtcacagagtgggcccaacgacctacggcactttgaccccgagtttaccgaagagcctgtccccaactccattggcaagtcccctgacagcgtcctcgtcacagccagcgtcaaggaagctgccgaggctttcctaggcttttcctatgcgcctcccacggactctttcctctgaaccctgttagggcttggttttaaaggattttatgtgtgtttccgaatgttttagttagccttttggtggagccgccagctgacaggacatcttacaagagaatttgcacatctctggaagcttagcaatcttattgcacactgttcgctggaagctttttgaagagcacattctcctcagtgagctcatgaggttttcatttttattcttccttccaacgtggtgctatctctgaaacgagcgttagagtgccgccttagacggaggcaggagtttcgttagaaagcggacgctgttctaaaaaaggtctcctgcagatctgtctgggctgtgatgacgaatattatgaaatgtgccttttctgaagagattgtgttagctccaaagcttttcctatcgcagtgtttcagttctttattttcccttgtggatatgctgtgtgaaccgtcgtgtgagtgtggtatgcctgatcacagatggattttgttataagcatcaatgtgacacttgcaggacactacaacgtgggacattgtttgtttcttccatatttggaagataaatttatgtgtagacttttttgtaagatacggttaataactaaaatttattgaaatggtcttgcaatgactcgtattcagatgcttaaagaaagcattgctgctacaaatatttctatttttagaaagggtttttatggaccaatgccccagttgtcagtcagagccgttggtgtttttcattgtttaaaatgtcacctgtaaaatgggcattatttatgtttttttttttgcattcctgataattgtatgtattgtataaagaacgtctgtacattgggttataacactagtatatttaaacttacaggcttatttgtaatgtaaaccaccattttaatgtactgtaattaacatggttataatacgtacaatccttccctcatcccatcacacaactttttttgtgtgtgataaactgattttggtttgcaataaaaccttgaaaaatatttaca

SEQ ID NO: 438639 - DNA, 2533 bp, Homo sapiens
ccaaaagcacaaaaaaggcgttttcggaagcgacccgaccgtgcacaagggccatttgtttgttttgggactcggggcaggaaatcttgcccggcctgagtcacggcggctccttcaaggaaacgtcagtgctcgccggtcgctctcgtctgccgcgcgccccgccgcccgctgcccatgggggagatgcagggcgcgctggccagagcccggctcgagtccctgctgcggccccgccacaaaaagagggccgaggcgcagaaaaggagcgagtccttcctgctgagcggactggctttcatgaagcagaggaggatgggtctgaacgactttattcagaagattgccaataactcctatgcatgcaaacaccctgaagttcagtccatcttgaagatctcccaacctcaggagcctgagcttatgaatgccaacccttctcctccaccaagtccttctcagcaaatcaaccttggcccgtcgtccaatcctcatgctaaaccatctgactttcacttcttgaaagtgatcggaaagggcagttttggaaaggttcttctagcaagacacaaggcagaagaagtgttctatgcagtcaaagttttacagaagaaagcaatcctgaaaaagaaagaggagaagcatattatgtcggagcggaatgttctgttgaagaatgtgaagcaccctttcctggtgggccttcacttctctttccagactgctgacaaattgtactttgtcctagactacattaatggtggagagttgttctaccatctccagagggaacgctgcttcctggaaccacgggctcgtttctatgctgctgaaatagccagtgccttgggctacctgcattcactgaacatcgtttatagagacttaaaaccagagaatattttgctagattcacagggacacattgtccttactgacttcggactctgcaaggagaacattgaacacaacagcacaacatccaccttctgtggcacgccggagtatctcgcacctgaggtgcttcataagcagccttatgacaggactgtggactggtggtgcctgggagctgtcttgtatgagatgctgtatggcctgccgcctttttatagccgaaacacagctgaaatgtacgacaacattctgaacaagcctctccagctgaaaccaaatattacaaattccgcaagacacctcctggagggcctcctgcagaaggacaggacaaagcggctcggggccaaggatgacttcatggagattaagagtcatgtcttcttctccttaattaactgggatgatctcattaataagaagattactcccccttttaacccaaatgtgagtgggcccaacgacctacggcactttgaccccgagtttaccgaagagcctgtccccaactccattggcaagtcccctgacagcgtcctcgtcacagccagcgtcaaggaagctgccgaggctttcctaggcttttcctatgcgcctcccacggactctttcctctgaaccctgttagggcttggttttaaaggattttatgtgtgtttccgaatgttttagttagccttttggtggagccgccagctgacaggacatcttacaagagaatttgcacatctctggaagcttagcaatcttattgcacactgttcgctggaagctttttgaagagcacattctcctcagtgagctcatgaggttttcatttttattcttccttccaacgtggtgctatctctgaaacgagcgttagagtgccgccttagacggaggcaggagtttcgttagaaagcggacgctgttctaaaaaaggtctcctgcagatctgtctgggctgtgatgacgaatattatgaaatgtgccttttctgaagagattgtgttagctccaaagcttttcctatcgcagtgtttcagttctttattttcccttgtggatatgctgtgtgaaccgtcgtgtgagtgtggtatgcctgatcacagatggattttgttataagcatcaatgtgacacttgcaggacactacaacgtgggacattgtttgtttcttccatatttggaagataaatttatgtgtagacttttttgtaagatacggttaataactaaaatttattgaaatggtcttgcaatgactcgtattcagatgcttaaagaaagcattgctgctacaaatatttctatttttagaaagggtttttatggaccaatgccccagttgtcagtcagagccgttggtgtttttcattgtttaaaatgtcacctgtaaaatgggcattatttatgtttttttttttgcattcctgataattgtatgtattgtataaagaacgtctgtacattgggttataacactagtatatttaaacttacaggcttatttgtaatgtaaaccaccattttaatgtactgtaattaacatggttataatacgtacaatccttccctcatcccatcacacaactttttttgtgtgtgataaactgattttggtttgcaataaaaccttgaaaaatatttaca

SEQ ID NO: 438640 - DNA, 2750 bp, Homo sapiens
aggccgagcgcgggcctagcgcgcatacgccgagccggcgagccggtctttgagcgctaacgtctttctgtctccccgcggtggtgatgacggtgaaaactgaggctgctaagggcaccctcacttactccaggatgaggggcatggtggcaattctcatcggtgagtgcaggaatcttgcgggacttctgctccaggagacgcaaagtggaaattttttgaaagtcccggatcagattagtgtgtgtggcgccggacgttatgaagccgtctaaacgtttctttatttctcctccttcatccacagctttcatgaagcagaggaggatgggtctgaacgactttattcagaagattgccaataactcctatgcatgcaaacagtaagtttgaccggatttgaggaaataactagtatagtttgaatttgccagcggtaaacattctcatcacggcgtttatcgggaaggcgaagacttcttctggggtggggatctcatttctccttaaattctaatatatttgacacattttaaacattaaagttaatttgctgatttggcttgaactggagatgtaagataaatgccctgaagttcagtccatcttgaagatctcccaacctcaggagcctgagcttatgaatgccaacccttctcctccaccaagtccttctcagcaaatcaaccttggcccgtcgtccaatcctcatgctaaaccatctgactttcacttcttgaaagtgatcggaaagggcagttttggaaaggttcttctagcaagacacaaggcagaagaagtgttctatgcagtcaaagttttacagaagaaagcaatcctgaaaaagaaagaggagaagcatattatgtcggagcggaatgttctgttgaagaatgtgaagcaccctttcctggtgggccttcacttctctttccagactgctgacaaattgtactttgtcctagactacattaatggtggagagttgttctaccatctccagagggaacgctgcttcctggaaccacgggctcgtttctatgctgctgaaatagccagtgccttgggctacctgcattcactgaacatcgtttatagagacttaaaaccagagaatattttgctagattcacagggacacattgtccttactgacttcggactctgcaaggagaacattgaacacaacagcacaacatccaccttctgtggcacgccggagtatctcgcacctgaggtgcttcataagcagccttatgacaggactgtggactggtggtgcctgggagctgtcttgtatgagatgctgtatggcctgccgcctttttatagccgaaacacagctgaaatgtacgacaacattctgaacaagcctctccagctgaaaccaaatattacaaattccgcaagacacctcctggagggcctcctgcagaaggacaggacaaagcggctcggggccaaggatgacttcatggagattaagagtcatgtcttcttctccttaattaactgggatgatctcattaataagaagattactcccccttttaacccaaatgtgagtgggcccaacgacctacggcactttgaccccgagtttaccgaagagcctgtccccaactccattggcaagtcccctgacagcgtcctcgtcacagccagcgtcaaggaagctgccgaggctttcctaggcttttcctatgcgcctcccacggactctttcctctgaaccctgttagggcttggttttaaaggattttatgtgtgtttccgaatgttttagttagccttttggtggagccgccagctgacaggacatcttacaagagaatttgcacatctctggaagcttagcaatcttattgcacactgttcgctggaagctttttgaagagcacattctcctcagtgagctcatgaggttttcatttttattcttccttccaacgtggtgctatctctgaaacgagcgttagagtgccgccttagacggaggcaggagtttcgttagaaagcggacgctgttctaaaaaaggtctcctgcagatctgtctgggctgtgatgacgaatattatgaaatgtgccttttctgaagagattgtgttagctccaaagcttttcctatcgcagtgtttcagttctttattttcccttgtggatatgctgtgtgaaccgtcgtgtgagtgtggtatgcctgatcacagatggattttgttataagcatcaatgtgacacttgcaggacactacaacgtgggacattgtttgtttcttccatatttggaagataaatttatgtgtagacttttttgtaagatacggttaataactaaaatttattgaaatggtcttgcaatgactcgtattcagatgcttaaagaaagcattgctgctacaaatatttctatttttagaaagggtttttatggaccaatgccccagttgtcagtcagagccgttggtgtttttcattgtttaaaatgtcacctgtaaaatgggcattatttatgtttttttttttgcattcctgataattgtatgtattgtataaagaacgtctgtacattgggttataacactagtatatttaaacttacaggcttatttgtaatgtaaaccaccattttaatgtactgtaattaacatggttataatacgtacaatccttccctcatcccatcacacaactttttttgtgtgtgataaactgattttggtttgcaataaaaccttgaaaaatatttaca

SEQ ID NO: 438641 - DNA, 2346 bp, Homo sapiens
aggccgagcgcgggcctagcgcgcatacgccgagccggcgagccggtctttgagcgctaacgtctttctgtctccccgcggtggtgatgacggtgaaaactgaggctgctaagggcaccctcacttactccaggatgaggggcatggtggcaattctcatcgctttcatgaagcagaggaggatgggtctgaacgactttattcagaagattgccaataactcctatgcatgcaaacaccctgaagttcagtccatcttgaagatctcccaacctcaggagcctgagcttatgaatgccaacccttctcctccaccaagtccttctcagcaaatcaaccttggcccgtcgtccaatcctcatgctaaaccatctgactttcacttcttgaaagtgatcggaaagggcagttttggaaaggttcttctagcaagacacaaggcagaagaagtgttctatgcagtcaaagttttacagaagaaagcaatcctgaaaaagaaagaggagaagcatattatgtcggagcggaatgttctgttgaagaatgtgaagcaccctttcctggtgggccttcacttctctttccagactgctgacaaattgtactttgtcctagactacattaatggtggagagttgttctaccatctccagagggaacgctgcttcctggaaccacgggctcgtttctatgctgctgaaatagccagtgccttgggctacctgcattcactgaacatcgtttatagagacttaaaaccagagaatattttgctagattcacagggacacattgtccttactgacttcggactctgcaaggagaacattgaacacaacagcacaacatccaccttctgtggcacgccggagtatctcgcacctgaggtgcttcataagcagccttatgacaggactgtggactggtggtgcctgggagctgtcttgtatgagatgctgtatggcctgccgcctttttatagccgaaacacagctgaaatgtacgacaacattctgaacaagcctctccagctgaaaccaaatattacaaattccgcaagacacctcctggagggcctcctgcagaaggacaggacaaagcggctcggggccaaggatgacttcatggagattaagagtcatgtcttcttctccttaattaactgggatgatctcattaataagaagattactcccccttttaacccaaatgtgagtgggcccaacgacctacggcactttgaccccgagtttaccgaagagcctgtccccaactccattggcaagtcccctgacagcgtcctcgtcacagccagcgtcaaggaagctgccgaggctttcctaggcttttcctatgcgcctcccacggactctttcctctgaaccctgttagggcttggttttaaaggattttatgtgtgtttccgaatgttttagttagccttttggtggagccgccagctgacaggacatcttacaagagaatttgcacatctctggaagcttagcaatcttattgcacactgttcgctggaagctttttgaagagcacattctcctcagtgagctcatgaggttttcatttttattcttccttccaacgtggtgctatctctgaaacgagcgttagagtgccgccttagacggaggcaggagtttcgttagaaagcggacgctgttctaaccttttctgaagagattgtgttagctccaaagcttttcctatcgcagtgtttcagttctttattttcccttgtggatatgctgtgtgaaccgtcgtgtgagtgtggtatgcctgatcacagatggattttgttataagcatcaatgtgacacttgcaggacactacaacgtgggacattgtttgtttcttccatatttggaagataaatttatgtgtagacttttttgtaagatacggttaataactaaaatttattgaaatggtcttgcaatgactcgtattcagatgcttaaagaaagcattgctgctacaaatatttctatttttagaaagggtttttatggaccaatgccccagttgtcagtcagagccgttggtgtttttcattgtttaaaatgtcacctgtaaaatgggcattatttatgtttttttttttgcattcctgataattgtatgtattgtataaagaacgtctgtacattgggttataacactagtatatttaaacttacaggcttatttgtaatgtaaaccaccattttaatgtactgtaattaacatggttataatacgtacaatccttccctcatcccatcacacaactttttttgtgtgtgataaactgattttggtttgcaataaaaccttgaaaaatatttaca

SEQ ID NO: 438642 - DNA, 2648 bp, Homo sapiens
aggccgagcgcgggcctagcgcgcatacgccgagccggcgagccggtctttgagcgctaacgtctttctgtctccccgcggtggtgatgacggtgaaaactgaggctgctaagggcaccctcacttactccaggatgaggggcatggtggcaattctcatcgctttcatgaagcagaggaggatgggtctgaacgactttattcagaagattgccaataactcctatgcatgcaaacaccctgaagttcagtccatcttgaagatctcccaacctcaggagcctgagcttatgaatgccaacccttctcctccaccaagtccttctcagcaaatcaaccttggcccgtcgtccaatcctcatgctaaaccatctgactttcacttcttgaaagtgatcggaaagggcagttttggaaaggttcttctagcaagacacaaggcagaagaagtgttctatgcagtcaaagttttacagaagaaagcaatcctgaaaaagaaagaggagaagcatattatgtcggagcggaatgttctgttgaagaatgtgaagcaccctttcctggtgggccttcacttctctttccagactgctgacaaattgtactttgtcctagactacattaatggtggagaggtgagcaggggggatagaagtcaactcttagtgtctctgcacagcctgctttgttttagtttgagaaaaaagttttcaaagatttttggtggggagaatgttaccagaattagcatttccttcaacctgtcaggtttatagttaatagattacttggggccacttcctgcagttgttcttttgctgtgtatgtcaaaactaattaaattcatttgcaacccagaatgactttgttctgtctcctgcagttgttctaccatctccagagggaacgctgcttcctggaaccacgggctcgtttctatgctgctgaaatagccagtgccttgggctacctgcattcactgaacatcgtttatagagacttaaaaccagagaatattttgctagattcacagggacacattgtccttactgacttcggactctgcaaggagaacattgaacacaacagcacaacatccaccttctgtggcacgccggagtatctcgcacctgaggtgcttcataagcagccttatgacaggactgtggactggtggtgcctgggagctgtcttgtatgagatgctgtatggcctgccgcctttttatagccgaaacacagctgaaatgtacgacaacattctgaacaagcctctccagctgaaaccaaatattacaaattccgcaagacacctcctggagggcctcctgcagaaggacaggacaaagcggctcggggccaaggatgacttcatggagattaagagtcatgtcttcttctccttaattaactgggatgatctcattaataagaagattactcccccttttaacccaaatgtgagtgggcccaacgacctacggcactttgaccccgagtttaccgaagagcctgtccccaactccattggcaagtcccctgacagcgtcctcgtcacagccagcgtcaaggaagctgccgaggctttcctaggcttttcctatgcgcctcccacggactctttcctctgaaccctgttagggcttggttttaaaggattttatgtgtgtttccgaatgttttagttagccttttggtggagccgccagctgacaggacatcttacaagagaatttgcacatctctggaagcttagcaatcttattgcacactgttcgctggaagctttttgaagagcacattctcctcagtgagctcatgaggttttcatttttattcttccttccaacgtggtgctatctctgaaacgagcgttagagtgccgccttagacggaggcaggagtttcgttagaaagcggacgctgttctaaaaaaggtctcctgcagatctgtctgggctgtgatgacgaatattatgaaatgtgccttttctgaagagattgtgttagctccaaagcttttcctatcgcagtgtttcagttctttattttcccttgtggatatgctgtgtgaaccgtcgtgtgagtgtggtatgcctgatcacagatggattttgttataagcatcaatgtgacacttgcaggacactacaacgtgggacattgtttgtttcttccatatttggaagataaatttatgtgtagacttttttgtaagatacggttaataactaaaatttattgaaatggtcttgcaatgactcgtattcagatgcttaaagaaagcattgctgctacaaatatttctatttttagaaagggtttttatggaccaatgccccagttgtcagtcagagccgttggtgtttttcattgtttaaaatgtcacctgtaaaatgggcattatttatgtttttttttttgcattcctgataattgtatgtattgtataaagaacgtctgtacattgggttataacactagtatatttaaacttacaggcttatttgtaatgtaaaccaccattttaatgtactgtaattaacatggttataatacgtacaatccttccctcatcccatcacacaactttttttgtgtgtgataaactgattttggtttgcaataaaaccttgaaaaatatttaca

SEQ ID NO: 438643 - DNA, 2006 bp, Homo sapiens
tgatttttttaaattgaaatttcaggttcttctagcaagacacaaggcagaagaagtgttctatgcagtcaaagttttacagaagaaagcaatcctgaaaaagaaagaggagaagcatattatgtcggagcggaatgttctgttgaagaatgtgaagcaccctttcctggtgggccttcacttctctttccagactgctgacaaattgtactttgtcctagactacattaatggtggagagttgttctaccatctccagagggaacgctgcttcctggaaccacgggctcgtttctatgctgctgaaatagccagtgccttgggctacctgcattcactgaacatcgtttatagagacttaaaaccagagaatattttgctagattcacagggacacattgtccttactgacttcggactctgcaaggagaacattgaacacaacagcacaacatccaccttctgtggcacgccggagtatctcgcacctgaggtgcttcataagcagccttatgacaggactgtggactggtggtgcctgggagctgtcttgtatgagatgctgtatggcctgccgcctttttatagccgaaacacagctgaaatgtacgacaacattctgaacaagcctctccagctgaaaccaaatattacaaattccgcaagacacctcctggagggcctcctgcagaaggacaggacaaagcggctcggggccaaggatgacttcatggagattaagagtcatgtcttcttctccttaattaactgggatgatctcattaataagaagattactcccccttttaacccaaatgtgagtgggcccaacgacctacggcactttgaccccgagtttaccgaagagcctgtccccaactccattggcaagtcccctgacagcgtcctcgtcacagccagcgtcaaggaagctgccgaggctttcctaggcttttcctatgcgcctcccacggactctttcctctgaaccctgttagggcttggttttaaaggattttatgtgtgtttccgaatgttttagttagccttttggtggagccgccagctgacaggacatcttacaagagaatttgcacatctctggaagcttagcaatcttattgcacactgttcgctggaagctttttgaagagcacattctcctcagtgagctcatgaggttttcatttttattcttccttccaacgtggtgctatctctgaaacgagcgttagagtgccgccttagacggaggcaggagtttcgttagaaagcggacgctgttctaaaaaaggtctcctgcagatctgtctgggctgtgatgacgaatattatgaaatgtgccttttctgaagagattgtgttagctccaaagcttttcctatcgcagtgtttcagttctttattttcccttgtggatatgctgtgtgaaccgtcgtgtgagtgtggtatgcctgatcacagatggattttgttataagcatcaatgtgacacttgcaggacactacaacgtgggacattgtttgtttcttccatatttggaagataaatttatgtgtagacttttttgtaagatacggttaataactaaaatttattgaaatggtcttgcaatgactcgtattcagatgcttaaagaaagcattgctgctacaaatatttctatttttagaaagggtttttatggaccaatgccccagttgtcagtcagagccgttggtgtttttcattgtttaaaatgtcacctgtaaaatgggcattatttatgtttttttttttgcattcctgataattgtatgtattgtataaagaacgtctgtacattgggttataacactagtatatttaaacttacaggcttatttgtaatgtaaaccaccattttaatgtactgtaattaacatggttataatacgtacaatccttccctcatcccatcacacaactttttttgtgtgtgataaactgattttggtttgcaataaaaccttgaaaaatatttaca

SEQ ID NO: 438644 - DNA, 2447 bp, Homo sapiens
ttaatggggtttattattttccttaactgactaatgtattggggtattttcagtttaaacagtgaattatccgggtagaagtcggtagagccagaaactcacttttgatgttggtgtgcccctagtggcgagctggattctaaatcgtgccctttattccctgcagccctgaagttcagtccatcttgaagatctcccaacctcaggagcctgagcttatgaatgccaacccttctcctccaccaagtccttctcagcaaatcaaccttggcccgtcgtccaatcctcatgctaaaccatctgactttcacttcttgaaagtgatcggaaagggcagttttggaaaggttcttctagcaagacacaaggcagaagaagtgttctatgcagtcaaagttttacagaagaaagcaatcctgaaaaagaaagaggtatgagatgtgcttgatggggctggcattggcggtagacactccttgaataatcttgattctggaatgttggtgccaagttgaaacatgccactaaatctgaatcgtcattttcctaggagaagcatattatgtcggagcggaatgttctgttgaagaatgtgaagcaccctttcctggtgggccttcacttctctttccagactgctgacaaattgtactttgtcctagactacattaatggtggagagttgttctaccatctccagagggaacgctgcttcctggaaccacgggctcgtttctatgctgctgaaatagccagtgccttgggctacctgcattcactgaacatcgtttatagagacttaaaaccagagaatattttgctagattcacagggacacattgtccttactgacttcggactctgcaaggagaacattgaacacaacagcacaacatccaccttctgtggcacgccggagtatctcgcacctgaggtgcttcataagcagccttatgacaggactgtggactggtggtgcctgggagctgtcttgtatgagatgctgtatggcctgccgcctttttatagccgaaacacagctgaaatgtacgacaacattctgaacaagcctctccagctgaaaccaaatattacaaattccgcaagacacctcctggagggcctcctgcagaaggacaggacaaagcggctcggggccaaggatgacttcatggagattaagagtcatgtcttcttctccttaattaactgggatgatctcattaataagaagattactcccccttttaacccaaatgtgagtgggcccaacgacctacggcactttgaccccgagtttaccgaagagcctgtccccaactccattggcaagtcccctgacagcgtcctcgtcacagccagcgtcaaggaagctgccgaggctttcctaggcttttcctatgcgcctcccacggactctttcctctgaaccctgttagggcttggttttaaaggattttatgtgtgtttccgaatgttttagttagccttttggtggagccgccagctgacaggacatcttacaagagaatttgcacatctctggaagcttagcaatcttattgcacactgttcgctggaagctttttgaagagcacattctcctcagtgagctcatgaggttttcatttttattcttccttccaacgtggtgctatctctgaaacgagcgttagagtgccgccttagacggaggcaggagtttcgttagaaagcggacgctgttctaaaaaaggtctcctgcagatctgtctgggctgtgatgacgaatattatgaaatgtgccttttctgaagagattgtgttagctccaaagcttttcctatcgcagtgtttcagttctttattttcccttgtggatatgctgtgtgaaccgtcgtgtgagtgtggtatgcctgatcacagatggattttgttataagcatcaatgtgacacttgcaggacactacaacgtgggacattgtttgtttcttccatatttggaagataaatttatgtgtagacttttttgtaagatacggttaataactaaaatttattgaaatggtcttgcaatgactcgtattcagatgcttaaagaaagcattgctgctacaaatatttctatttttagaaagggtttttatggaccaatgccccagttgtcagtcagagccgttggtgtttttcattgtttaaaatgtcacctgtaaaatgggcattatttatgtttttttttttgcattcctgataattgtatgtattgtataaagaacgtctgtacattgggttataacactagtatatttaaacttacaggcttatttgtaatgtaaaccaccattttaatgtactgtaattaacatggttataatacgtacaatccttccctcatcccatcacacaactttttttgtgtgtgataaactgattttggtttgcaataaaaccttgaaaaatatttaca

SEQ ID NO: 438645 - DNA, 1586 bp, Homo sapiens
agaggagaggggggagaggcagggcaacccataggctaggtaacgaggcccgggtggttatctcgcacctgaggtgcttcataagcagccttatgacaggactgtggactggtggtgcctgggagctgtcttgtatgagatgctgtatggcctgccgcctttttatagccgaaacacagctgaaatgtacgacaacattctgaacaagcctctccagctgaaaccaaatattacaaattccgcaagacacctcctggagggcctcctgcagaaggacaggacaaagcggctcggggccaaggatgacttcatggagattaagagtcatgtcttcttctccttaattaactgggatgatctcattaataagaagattactcccccttttaacccaaatgtgagtgggcccaacgacctacggcactttgaccccgagtttaccgaagagcctgtccccaactccattggcaagtcccctgacagcgtcctcgtcacagccagcgtcaaggaagctgccgaggctttcctaggcttttcctatgcgcctcccacggactctttcctctgaaccctgttagggcttggttttaaaggattttatgtgtgtttccgaatgttttagttagccttttggtggagccgccagctgacaggacatcttacaagagaatttgcacatctctggaagcttagcaatcttattgcacactgttcgctggaagctttttgaagagcacattctcctcagtgagctcatgaggttttcatttttattcttccttccaacgtggtgctatctctgaaacgagcgttagagtgccgccttagacggaggcaggagtttcgttagaaagcggacgctgttctaaaaaaggtctcctgcagatctgtctgggctgtgatgacgaatattatgaaatgtgccttttctgaagagattgtgttagctccaaagcttttcctatcgcagtgtttcagttctttattttcccttgtggatatgctgtgtgaaccgtcgtgtgagtgtggtatgcctgatcacagatggattttgttataagcatcaatgtgacacttgcaggacactacaacgtgggacattgtttgtttcttccatatttggaagataaatttatgtgtagacttttttgtaagatacggttaataactaaaatttattgaaatggtcttgcaatgactcgtattcagatgcttaaagaaagcattgctgctacaaatatttctatttttagaaagggtttttatggaccaatgccccagttgtcagtcagagccgttggtgtttttcattgtttaaaatgtcacctgtaaaatgggcattatttatgtttttttttttgcattcctgataattgtatgtattgtataaagaacgtctgtacattgggttataacactagtatatttaaacttacaggcttatttgtaatgtaaaccaccattttaatgtactgtaattaacatggttataatacgtacaatccttccctcatcccatcacacaactttttttgtgtgtgataaactgattttggtttgcaataaaaccttgaaaaatatttaca

SEQ ID NO: 438646 - DNA, 2327 bp, Homo sapiens
aggccgagcgcgggcctagcgcgcatacgccgagccggcgagccggtctttgagcgctaacgtctttctgtctccccgcggtggtgatgacggtgaaaactgaggctgctaagggcaccctcacttactccaggatgaggggcatggtggcaattctcatcgctttcatgaagcagaggaggatgggtctgaacgactttattcagaagattgccaataactcctatgcatgcaaacaccctgaagttcagtccatcttgaagatctcccaacctcaggagcctgagcttatgaatgccaacccttctcctccaccaagtccttctcagcaaatcaaccttggcccgtcgtccaatcctcatgctaaaccatctgactttcacttcttgaaagtgatcggaaagggcagttttggaaaggttcttctagcaagacacaaggcagaagaagtgttctatgcagtcaaagttttacagaagaaagcaatcctgaaaaagaaagaggagaagcatattatgtcggagcggaatgttctgttgaagaatgtgaagcaccctttcctggtgggccttcacttctctttccagactgctgacaaattgtactttgtcctagactacattaatggtggagagttgttctaccatctccagagggaacgctgcttcctggaaccacgggctcgtttctatgctgctgaaatagccagtgccttgggctacctgcattcactgaacatcgtttatagagacttaaaaccagagaatattttgctagattcacagggacacattgtccttactgacttcggactctgcaaggagaacattgaacacaacagcacaacatccaccttctgtggcacgccggagtatctcgcacctgaggtgcttcataagcagccttatgacaggactgtggactggtggtgcctgggagctgtcttgtatgagatgctgtatggcctgccgcctttttatagccgaaacacagctgaaatgtacgacaacattctgaacaagcctctccagctgaaaccaaatattacaaattccgcaagacacctcctggagggcctcctgcagaaggacaggacaaagcggctcggggccaaggatgacttcatggagattaagagtcatgtcttcttctccttaattaactgggatgatctcattaataagaagattactcccccttttaacccaaatgtgagtgggcccaacgacctacggcactttgaccccgagtttaccgaagagcctgtccccaactccattggcaagtcccctgacagcgtcctcgtcacagccagcgtcaaggaagctgccgaggctttcctaggcttttcctatgcgcctcccacggactctttcctctgaaccctgttagggcttggttttaaaggattttatgtgtgtttccgaatgttttagttagccttttggtggagccgccagctgacaggacatcttacaagagaatttgcacatctctggaagcttagcaatcttattgcacactgttcgctggaagctttttgaagagcacattctcctcagtgagctcatgaggttttcatttttattcttccttccaacgtggtgctatctctgaaacgagcgttagagtgccgccttagacggaggcaggagtttcgttagaaagcggacgctgttctaaaaaaggtctcctgcagatctgtctgggctgtgatgacgaatattatgaaatgtgccttttctgaagagattgtgttagctccaaagcttttcctatcgcagtgtttcagttctttattttcccttgtggatatgctgtgtgaaccgtcgtgtgagtgtggtatgcctgatcacagatggattttgttataagcatcaatgtgacacttgcaggacactacaacgtgggacattgtttgtttcttccatatttggaagataaatttatgtgtagacttttttgtaagatacggttaataactaaaatttattgaaatggtcttgcaatgactcgtattcagatgcttaaagaaagcattgctgctacaaatatttctatttttagaaagggtttttatggaccaatgccccagttgtcagtcagagccgttggtgtttttcattgtttaaaatgtcacctgtaaaatgggcattatttatgtttttttttttgcattcctgataattgtatgtattgtatataaccatgttaattacagtacattaaaatggtggtttacattacaaataagcctgtaagtttaaatatactagtgttataacccaatgtacagacgttctttatacaatacatagtcgacgcgg

SEQ ID NO: 438647 - DNA, 2344 bp, Homo sapiens
aggccgagcgcgggcctagcgcgcatacgccgagccggcgagccggtctttgagcgctaacgtctttctgtctccccgcggtggtgatgacggtgaaaactgaggctgctaagggcaccctcacttactccaggatgaggggcatggtggcaattctcatcgctttcatgaagcagaggaggatgggtctgaacgactttattcagaagattgccaataactcctatgcatgcaaacaccctgaagttcagtccatcttgaagatctcccaacctcaggagcctgagcttatgaatgccaacccttctcctccaccaagtccttctcagcaaatcaaccttggcccgtcgtccaatcctcatgctaaaccatctgactttcacttcttgaaagtgatcggaaagggcagttttggaaaggttcttctagcaagacacaaggcagaagaagtgttctatgcagtcaaagttttacagaagaaagcaatcctgaaaaagaaagaggagaagcatattatgtcggagcggaatgttctgttgaagaatgtgaagcaccctttcctggtgggccttcacttctctttccagactgctgacaaattgtactttgtcctagactacattaatggtggagagttgttctaccatctccagagggaacgctgcttcctggaaccacgggctcgtttctatgctgctgaaatagccagtgccttgggctacctgcattcactgaacatcgtttatagagacttaaaaccagagaatattttgctagattcacagggacacattgtccttactgacttcggactctgcaaggagaacattgaacacaacagcacaacatccaccttctgtggcacgccggagtatctcgcacctgaggtgcttcataagcagccttatgacaggactgtggactggtggtgcctgggagctgtcttgtatgagatgctgtatggcctgccgcctttttatagccgaaacacagctgaaatgtacgacaacattctgaacaagcctctccagctgaaaccaaatattacaaattccgcaagacacctcctggagggcctcctgcagaaggacaggacaaagcggctcggggccaaggatgacttcatggagattaagagtcatgtcttcttctccttaattaactgggatgatctcattaataagaagattactcccccttttaacccaaatgtgagtgggcccaacgacctacggcactttgaccccgagtttaccgaagagcctgtccccaactccattggcaagtcccctgacagcgtcctcgtcacagccagcgtcaaggaagctgccgaggctttcctaggcttttcctatgcgcctcccacggactctttcctctgaaccctgttagggcttggttttaaaggattttatgtgtgtttccgaatgttttagttagccttttggtggagccgccagctgacaggacatcttacaagagaatttgcacatctctggaagcttagcaatcttattgcacactgttcgctggaagctttttgaagagcacattctcctcagtgagctcatgaggttttcatttttattcttccttccaacgtggtgctatctctgaaacgagcgttagagtgccgccttagacggaggcaggagtttcgttagaaagcggacgctgttctaaaaaaggtctcctgcagatctgtctgggctgtgatgacgaatattatgaaatgtgccttttctgaagagattgtgttagctccaaagcttttcctatcgcagtgtttcagttctttattttcccttgtggatatgctgtgtgaaccgtcgtgtgagtgtggtatgcctgatcacagatggattttgttataagcatcaatgtgacacttgcaggacactacaacgtgggacattgtttgtttcttccatatttggaagataaatttatgtgtagacttttttgtaagatacggttaataactaaaatttattgaaatggtcttgcaatgactcgtattcagatgcttaaagaaagcattgctgctacaaatatttctatttttagaaagggtttttatggaccaatgccccagttgtcagtcagagccgttgttttgcattcctgataattgtatgtattgtataaagaacgtctgtacattgggttataacactagtatatttaaacttacaggcttatttgtaatgtaaaccaccattttaatgtactgtaattaacatggttataatacgtacaatccttccctcatcccatcacacaactttttttgtgtgtgataaactgattttggtttgcaataaaaccttgaaaaatatttaca

SEQ ID NO: 438648 - DNA, 1040 bp, Homo sapiens
aggccgagcgcgggcctagcgcgcatacgccgagccggcgagccggtctttgagcgctaacgtctttctgtctccccgcggtggtgatgacggtgaaaactgaggctgctaagggcaccctcacttactccaggatgaggggcatggtggcaattctcatcgctttcatgaagcagaggaggatgggtctgaacgactttattcagaagattgccaataactcctatgcatgcaaacaccctgaagttcagtccatcttgaagatctcccaacctcaggagcctgagcttatgaatgccaacccttctcctccaccaagtccttctcagcaaatcaaccttggcccgtcgtccaatcctcatgctaaaccatctgactttcacttcttgaaagtgatcggaaagggcagttttggaaaggttcttctagcaagacacaaggcagaagaagtgttctatgcagtcaaagttttacagaagaaagcaatcctgaaaaagaaagaggagaagcatattatgtcggagcggaatgttctgttgaagaatgtgaagcaccctttcctggtgggccttcacttctctttccagactgctgacaaattgtactttgtcctagactacattaatggtggagagttgttctaccatctccagagggaacgctgcttcctggaaccacgggctcgtttctatgctgctgaaatagccagtgccttgggctacctgcattcactgaacatcgtttatagagaacttaaagaccaggaggaatatcttggctagacttcacagggacgacatgggtcctttactgagcttccggacctctgcaagggagaaacagtctgaagcagcaaacaagcagcaaccattccagccgttcgtgtggggcacggccggaagtaatctcggcagccctgaagggttggcttttcacttaaaggcaaggccctttactgaaccagggaaccttgttggaacgtggggtggggttggcccttggggcaaggcctggtgcctttgggcttacttggacaggaa

SEQ ID NO: 438649 - DNA, 478 bp, Homo sapiens
aggccgagcgcgggcctagcgcgcatacgccgagccggcgagccggtctttgagcgctaacgtctttctgtctccccgcggtggtgatgacggtgaaaactgaggctgctaagggcaccctcacttactccaggatgaggggcatggtggcaattctcatcgctttcatgaagcagaggaggatgggtctgaacgactttattcagaagattgccaataactcctatgcatgcaaacaccctgaagttcagtccatcttgaagatctcccaacctcaggagcctgagcttatgaatgccaacccttctcctccaccaagtccttctcagcaaatcaaccttggcccgtcgtccaatcctcatgctaaaccatctgactttcacttcttgaaagtgatcggaaagggcagttttggaaaggtaatttcaaatctgaagatcttttggtacacttccttcatgtcctcttttgtattctc

SEQ ID NO: 438650 - DNA, 274 bp, Homo sapiens
taatatttttcaaggttttattgcaaaccaaaatcagtttatcacacacaaaaaaagttgtgtgatgggatgagggaaagaacgtctgtacattgggttataacactagtatatttaaacttacaggcttatttgtaatgtaaaccaccattttaatgtactgtaattaacatggttataatacgtacaatccttccctcatcccatcacacaactttttttgtgtgtgataaactgattttggtttgcaataaaaccttgaaaaatatttaca

SEQ ID NO: 438651 - DNA, 764 bp, Homo sapiens
gctcgtttctatgctgctgaaatagccagtgccttgggctacctgcattcactgaacatcgtttatagggtaagcctgagagctcttcaggctaccagttttggtataaaggagacgtagcactggctgtttcatagggccttaaaataatttgtgtttatttgcaacttggttgcctaaaaccagatcccctagcacgtgagctggcttgacttaagtgccaagggggaaccagccaagtaggattgtgcctaatccagaatagatgagcagaacaagggctcccttttttcttcactacacaactacagtgaacctaaaatgcctctaatacctttagcaattatctttaagaggatatcttatgaagtgaaattaacttgtgcaactacttttctattcacttttttacagagacttaaaaccagagaatattttgctagattcacagggacacattgtccttactgacttcggactctgcaaggagaacattgaacacaacagcacaacatccaccttctgtggcacgccggaggtaggcgctgtcttggtttggtgcctggtttacccccgccttccaagagagagatgtacaatcatgcacttaactaccaaaaagagtaaactcctctcagagacttcttaatacagttcagtgcaaataaaatacatttgctgtttgatgtagcatgagaaatcccaagtccttctgttcctttactgaaaagtagctgtttgtaagtaagatctgcatcataaaa

SEQ ID NO: 438652 - DNA, 591 bp, Homo sapiens
agacttcttctggggtggggatctcatttctccttaaattctaatatatttgacacattttaaacattaaagttaatttgctgatttggcttgaactggagatgtaagataaatggttcgtgttggccgaattcacggcctttctccatgagcaacaatccttatttctgtatttaatggggtttattattttccttaactgactaatgtattggggtattttcagtttaaacagtgaattatccgggtagaagtcggtagagccagaaactcacttttgatgttggtgtgcccctagtggcgagctggattctaaatcgtgccctttattccctgcagccctgaagttcagtccatcttgaagatctcccaacctcaggagcctgagcttatgaatgccaacccttctcctccagtaagtttttgtatgtgccgtgcatctgtggagaactgtaagggagtcagttagtattcctacattaatggattaaaatagcatttctagaaattagtatcaaggcaggaatgcttcattatggcataacaagtgatataaatatttaagtattgagtcagagtattattttattt

SEQ ID NO: 438653 - DNA, 426 bp, Homo sapiens
actctacaggatcctggtcatcacacctattaataagaagatactcccccttttaacccaaatgtgagtgggcccaacgacctacggcactttgaccccgagtttaccgaagagcctgtccccaactccattggcaagtcccctgacagcgtcctcgtcacagccagcgtcaaggaagctgccgaggctttcctaggcttttcctatgcgcctcccacggactctttcctctgaaccctgttagggcttggttttaaaggatttcgatgaggtcatcgaaaccctcaccagaggaagttgaggaataaaacacgaccgttagatttcgaagtcactgtgtaccttgtggcaagacttggttgaatccaggtggggaagccagtgagcaacaggttgatgaagggtttgatagacgggtttcgatga

SEQ ID NO: 438654 - DNA, 2859 bp, Homo sapiens
aggccgagcgcgggcctagcgcgcatacgccgagccggcgagccggtctttgagcgctaacgtctttctgtctccccgcggtggtgatgacggtgaaaactgaggctgctaagggcaccctcacttactccaggatgaggggcatggtggcaattctcatcgctttcatgaagcagaggaggatgggtctgaacgactttattcagaagattgccaataactcctatgcatgcaaacaccctgaagttcagtccatcttgaagatctcccaacctcaggagcctgagcttatgaatgccaacccttctcctccaccaagtccttctcagcaaatcaaccttggcccgtcgtccaatcctcatgctaaaccatctgactttcacttcttgaaagtgatcggaaagggcagttttggaaaggttcttctagcaagacacaaggcagaagaagtgttctatgcagtcaaagttttacagaagaaagcaatcctgaaaaagaaagaggagaagcatattatgtcggagcggaatgttctgttgaagaatgtgaagcaccctttcctggtgggccttcacttctctttccagactgctgacaaattgtactttgtcctagactacattaatggtggagagttgttctaccatctccagagggaacgctgcttcctggaaccacgggctcgtttctatgctgctgaaatagccagtgccttgggctacctgcattcactgaacatcgtttatagagacttaaaaccagagaatattttgctagattcacagggacacattgtccttactgacttcggactctgcaaggagaacattgaacacaacagcacaacatccaccttctgtggcacgccggagtatctcgcacctgaggtgcttcataagcagccttatgacaggactgtggactggtggtgcctgggagctgtcttgtatgagatgctgtatggcctggtgagtggcacattgggaaccatggaacactgcctgctccctacaatattgccttcacacagcccatgcttggccatggtgtcttgcccttaccagtacgcttatcaaaagcagctaagaggcatattggttattttatagttcataagaataatcacttacctggttcttttgtgcatttcacattttactagataggaccacattgaacctgtgtggtggtgaaaaactaccacttattaacatctaccccctcaccctccacacacacacacacaaacacacacacgggttgcaaagtagacacttaaatagcaagggaaaagaaagcattgaggtggggagagtttctcaaatcgagcctaatatttattgccgtttatatctttttctctactggtaatgtgtgccatatgaaacttccaattaagtcctaaagtaattttccccttctttcagccgcctttttatagccgaaacacagctgaaatgtacgacaacattctgaacaagcctctccagctgaaaccaaatattacaaattccgcaagacacctcctggagggcctcctgcagaaggacaggacaaagcggctcggggccaaggatgacttcatggagattaagagtcatgtcttcttctccttaattaactgggatgatctcattaataagaagattactcccccttttaacccaaatgtgagtgggcccaacgacctacggcactttgaccccgagtttaccgaagagcctgtccccaactccattggcaagtcccctgacagcgtcctcgtcacagccagcgtcaaggaagctgccgaggctttcctaggcttttcctatgcgcctcccacggactctttcctctgaaccctgttagggcttggttttaaaggattttatgtgtgtttccgaatgttttagttagccttttggtggagccgccagctgacaggacatcttacaagagaatttgcacatctctggaagcttagcaatcttattgcacactgttcgctggaagctttttgaagagcacattctcctcagtgagctcatgaggttttcatttttattcttccttccaacgtggtgctatctctgaaacgagcgttagagtgccgccttagacggaggcaggagtttcgttagaaagcggacgctgttctaaaaaaggtctcctgcagatctgtctgggctgtgatgacgaatattatgaaatgtgccttttctgaagagattgtgttagctccaaagcttttcctatcgcagtgtttcagttctttattttcccttgtggatatgctgtgtgaaccgtcgtgtgagtgtggtatgcctgatcacagatggattttgttataagcatcaatgtgacacttgcaggacactacaacgtgggacattgtttgtttcttccatatttggaagataaatttatgtgtagacttttttgtaagatacggttaataactaaaatttattgaaatggtcttgcaatgactcgtattcagatgcttaaagaaagcattgctgctacaaatatttctatttttagaaagggtttttatggaccaatgccccagttgtcagtcagagccgttggtgtttttcattgtttaaaatgtcacctgtaaaatgggcattatttatgtttttttttttgcattcctgataattgtatgtattgtataaagaacgtctgtacattgggttataacactagtatatttaaacttacaggcttatttgtaatgtaaaccaccattttaatgtactgtaattaacatggttataatacgtacaatccttccctcatcccatcacacaactttttttgtgtgtgataaactgattttggtttgcaataaaaccttgaaaaatatttaca

SEQ ID NO: 438655 - DNA, 2966 bp, Homo sapiens
aggccgagcgcgggcctagcgcgcatacgccgagccggcgagccggtctttgagcgctaacgtctttctgtctccccgcggtggtgatgacggtgaaaactgaggctgctaagggcaccctcacttactccaggatgaggggcatggtggcaattctcatcgctttcatgaagcagaggaggatgggtctgaacgactttattcagaagattgccaataactcctatgcatgcaaacaccctgaagttcagtccatcttgaagatctcccaacctcaggagcctgagcttatgaatgccaacccttctcctccaccaagtccttctcagcaaatcaaccttggcccgtcgtccaatcctcatgctaaaccatctgactttcacttcttgaaagtgatcggaaagggcagttttggaaaggttcttctagcaagacacaaggcagaagaagtgttctatgcagtcaaagttttacagaagaaagcaatcctgaaaaagaaagaggagaagcatattatgtcggagcggaatgttctgttgaagaatgtgaagcaccctttcctggtgggccttcacttctctttccagactgctgacaaattgtactttgtcctagactacattaatggtggagagttgttctaccatctccagagggaacgctgcttcctggaaccacgggctcgtttctatgctgctgaaatagccagtgccttgggctacctgcattcactgaacatcgtttatagagacttaaaaccagagaatattttgctagattcacagggacacattgtccttactgacttcggactctgcaaggagaacattgaacacaacagcacaacatccaccttctgtggcacgccggagtatctcgcacctgaggtgcttcataagcagccttatgacaggactgtggactggtggtgcctgggagctgtcttgtatgagatgctgtatggcctggtgagtggcacattgggaaccatggaacactgcctgctccctacaatattgccttcacacagcccatgcttggccatggtgtcttgcccttaccagtacgcttatcaaaagcagctaagaggcatattggttattttatagttcataagaataatcacttacctggttcttttgtgcatttcacattttactagataggaccacattgaacctgtgtggtggtgaaaaactaccacttattaacatctaccccctcaccctccacacacacacacacaaacacacacacgggttgcaaagtagacacttaaatagcaagggaaaagaaagcattgaggtggggagagtttctcaaatcgagcctaatatttattgccgtttatatctttttctctactggtaatgtgtgccatatgaaacttccaattaagtcctaaagtaattttccccttctttcagccgcctttttatagccgaaacacagctgaaatgtacgacaacattctgaacaagcctctccagctgaaaccaaatattacaaattccgcaagacacctcctggagggcctcctgcagaaggacaggacaaagcggctcggggccaaggatgacttcgtgagtgatgttttcctgtcctcctgggccggccgggacgtgcactagacctccctgcccttattgaatgcacctgtctaaattaatcttgggtttcttatcaacagatggagattaagagtcatgtcttcttctccttaattaactgggatgatctcattaataagaagattactcccccttttaacccaaatgtgagtgggcccaacgacctacggcactttgaccccgagtttaccgaagagcctgtccccaactccattggcaagtcccctgacagcgtcctcgtcacagccagcgtcaaggaagctgccgaggctttcctaggcttttcctatgcgcctcccacggactctttcctctgaaccctgttagggcttggttttaaaggattttatgtgtgtttccgaatgttttagttagccttttggtggagccgccagctgacaggacatcttacaagagaatttgcacatctctggaagcttagcaatcttattgcacactgttcgctggaagctttttgaagagcacattctcctcagtgagctcatgaggttttcatttttattcttccttccaacgtggtgctatctctgaaacgagcgttagagtgccgccttagacggaggcaggagtttcgttagaaagcggacgctgttctaaaaaaggtctcctgcagatctgtctgggctgtgatgacgaatattatgaaatgtgccttttctgaagagattgtgttagctccaaagcttttcctatcgcagtgtttcagttctttattttcccttgtggatatgctgtgtgaaccgtcgtgtgagtgtggtatgcctgatcacagatggattttgttataagcatcaatgtgacacttgcaggacactacaacgtgggacattgtttgtttcttccatatttggaagataaatttatgtgtagacttttttgtaagatacggttaataactaaaatttattgaaatggtcttgcaatgactcgtattcagatgcttaaagaaagcattgctgctacaaatatttctatttttagaaagggtttttatggaccaatgccccagttgtcagtcagagccgttggtgtttttcattgtttaaaatgtcacctgtaaaatgggcattatttatgtttttttttttgcattcctgataattgtatgtattgtataaagaacgtctgtacattgggttataacactagtatatttaaacttacaggcttatttgtaatgtaaaccaccattttaatgtactgtaattaacatggttataatacgtacaatccttccctcatcccatcacacaactttttttgtgtgtgataaactgattttggtttgcaataaaaccttgaaaaatatttaca

SEQ ID NO: 438656 - DNA, 2545 bp, Homo sapiens
aggccgagcgcgggcctagcgcgcatacgccgagccggcgagccggtctttgagcgctaacgtctttctgtctccccgcggtggtgatgacggtgaaaactgaggctgctaagggcaccctcacttactccaggatgaggggcatggtggcaattctcatcggtgagtgcaggaatcttgcgggacttctgctccaggagacgcaaagtggaaattttttgaaagtcccggatcagattagtgtgtgtggcgccggacgttatgaagccgtctaaacgtttctttatttctcctccttcatccacagctttcatgaagcagaggaggatgggtctgaacgactttattcagaagattgccaataactcctatgcatgcaaacaccctgaagttcagtccatcttgaagatctcccaacctcaggagcctgagcttatgaatgccaacccttctcctccaccaagtccttctcagcaaatcaaccttggcccgtcgtccaatcctcatgctaaaccatctgactttcacttcttgaaagtgatcggaaagggcagttttggaaaggttcttctagcaagacacaaggcagaagaagtgttctatgcagtcaaagttttacagaagaaagcaatcctgaaaaagaaagaggagaagcatattatgtcggagcggaatgttctgttgaagaatgtgaagcaccctttcctggtgggccttcacttctctttccagactgctgacaaattgtactttgtcctagactacattaatggtggagagttgttctaccatctccagagggaacgctgcttcctggaaccacgggctcgtttctatgctgctgaaatagccagtgccttgggctacctgcattcactgaacatcgtttatagagacttaaaaccagagaatattttgctagattcacagggacacattgtccttactgacttcggactctgcaaggagaacattgaacacaacagcacaacatccaccttctgtggcacgccggagtatctcgcacctgaggtgcttcataagcagccttatgacaggactgtggactggtggtgcctgggagctgtcttgtatgagatgctgtatggcctgccgcctttttatagccgaaacacagctgaaatgtacgacaacattctgaacaagcctctccagctgaaaccaaatattacaaattccgcaagacacctcctggagggcctcctgcagaaggacaggacaaagcggctcggggccaaggatgacttcatggagattaagagtcatgtcttcttctccttaattaactgggatgatctcattaataagaagattactcccccttttaacccaaatgtgagtgggcccaacgacctacggcactttgaccccgagtttaccgaagagcctgtccccaactccattggcaagtcccctgacagcgtcctcgtcacagccagcgtcaaggaagctgccgaggctttcctaggcttttcctatgcgcctcccacggactctttcctctgaaccctgttagggcttggttttaaaggattttatgtgtgtttccgaatgttttagttagccttttggtggagccgccagctgacaggacatcttacaagagaatttgcacatctctggaagcttagcaatcttattgcacactgttcgctggaagctttttgaagagcacattctcctcagtgagctcatgaggttttcatttttattcttccttccaacgtggtgctatctctgaaacgagcgttagagtgccgccttagacggaggcaggagtttcgttagaaagcggacgctgttctaaaaaaggtctcctgcagatctgtctgggctgtgatgacgaatattatgaaatgtgccttttctgaagagattgtgttagctccaaagcttttcctatcgcagtgtttcagttctttattttcccttgtggatatgctgtgtgaaccgtcgtgtgagtgtggtatgcctgatcacagatggattttgttataagcatcaatgtgacacttgcaggacactacaacgtgggacattgtttgtttcttccatatttggaagataaatttatgtgtagacttttttgtaagatacggttaataactaaaatttattgaaatggtcttgcaatgactcgtattcagatgcttaaagaaagcattgctgctacaaatatttctatttttagaaagggtttttatggaccaatgccccagttgtcagtcagagccgttggtgtttttcattgtttaaaatgtcacctgtaaaatgggcattatttatgtttttttttttgcattcctgataattgtatgtattgtataaagaacgtctgtacattgggttataacactagtatatttaaacttacaggcttatttgtaatgtaaaccaccattttaatgtactgtaattaacatggttataatacgtacaatccttccctcatcccatcacacaactttttttgtgtgtgataaactgattttggtttgcaataaaaccttgaaaaatatttaca

SEQ ID NO: 438657 - DNA, 2328 bp, Homo sapiens
ttaatggggtttattattttccttaactgactaatgtattggggtattttcagtttaaacagtgaattatccgggtagaagtcggtagagccagaaactcacttttgatgttggtgtgcccctagtggcgagctggattctaaatcgtgccctttattccctgcagccctgaagttcagtccatcttgaagatctcccaacctcaggagcctgagcttatgaatgccaacccttctcctccaccaagtccttctcagcaaatcaaccttggcccgtcgtccaatcctcatgctaaaccatctgactttcacttcttgaaagtgatcggaaagggcagttttggaaaggttcttctagcaagacacaaggcagaagaagtgttctatgcagtcaaagttttacagaagaaagcaatcctgaaaaagaaagaggagaagcatattatgtcggagcggaatgttctgttgaagaatgtgaagcaccctttcctggtgggccttcacttctctttccagactgctgacaaattgtactttgtcctagactacattaatggtggagagttgttctaccatctccagagggaacgctgcttcctggaaccacgggctcgtttctatgctgctgaaatagccagtgccttgggctacctgcattcactgaacatcgtttatagagacttaaaaccagagaatattttgctagattcacagggacacattgtccttactgacttcggactctgcaaggagaacattgaacacaacagcacaacatccaccttctgtggcacgccggagtatctcgcacctgaggtgcttcataagcagccttatgacaggactgtggactggtggtgcctgggagctgtcttgtatgagatgctgtatggcctgccgcctttttatagccgaaacacagctgaaatgtacgacaacattctgaacaagcctctccagctgaaaccaaatattacaaattccgcaagacacctcctggagggcctcctgcagaaggacaggacaaagcggctcggggccaaggatgacttcatggagattaagagtcatgtcttcttctccttaattaactgggatgatctcattaataagaagattactcccccttttaacccaaatgtgagtgggcccaacgacctacggcactttgaccccgagtttaccgaagagcctgtccccaactccattggcaagtcccctgacagcgtcctcgtcacagccagcgtcaaggaagctgccgaggctttcctaggcttttcctatgcgcctcccacggactctttcctctgaaccctgttagggcttggttttaaaggattttatgtgtgtttccgaatgttttagttagccttttggtggagccgccagctgacaggacatcttacaagagaatttgcacatctctggaagcttagcaatcttattgcacactgttcgctggaagctttttgaagagcacattctcctcagtgagctcatgaggttttcatttttattcttccttccaacgtggtgctatctctgaaacgagcgttagagtgccgccttagacggaggcaggagtttcgttagaaagcggacgctgttctaaaaaaggtctcctgcagatctgtctgggctgtgatgacgaatattatgaaatgtgccttttctgaagagattgtgttagctccaaagcttttcctatcgcagtgtttcagttctttattttcccttgtggatatgctgtgtgaaccgtcgtgtgagtgtggtatgcctgatcacagatggattttgttataagcatcaatgtgacacttgcaggacactacaacgtgggacattgtttgtttcttccatatttggaagataaatttatgtgtagacttttttgtaagatacggttaataactaaaatttattgaaatggtcttgcaatgactcgtattcagatgcttaaagaaagcattgctgctacaaatatttctatttttagaaagggtttttatggaccaatgccccagttgtcagtcagagccgttggtgtttttcattgtttaaaatgtcacctgtaaaatgggcattatttatgtttttttttttgcattcctgataattgtatgtattgtataaagaacgtctgtacattgggttataacactagtatatttaaacttacaggcttatttgtaatgtaaaccaccattttaatgtactgtaattaacatggttataatacgtacaatccttccctcatcccatcacacaactttttttgtgtgtgataaactgattttggtttgcaataaaaccttgaaaaatatttaca

SEQ ID NO: 438658 - DNA, 2338 bp, Homo sapiens
aggccgagcgcgggcctagcgcgcatacgccgagccggcgagccggtctttgagcgctaacgtctttctgtctccccgcggtggtgatgacggtgaaaactgaggctgctaagggcaccctcacttactccaggatgaggggcatggtggcaattctcatcgctttcatgaagcagaggaggatgggtctgaacgactttattcagaagattgccaataactcctatgcatgcaaacaccctgaagttcagtccatcttgaagatctcccaacctcaggagcctgagcttatgaatgccaacccttctcctccaccaagtccttctcagcaaatcaaccttggcccgtcgtccaatcctcatgctaaaccatctgactttcacttcttgaaagtgatcggaaagggcagttttggaaaggttcttctagcaagacacaaggcagaagaagtgttctatgcagtcaaagttttacagaagaaagcaatcctgaaaaagaaagaggagaagcatattatgtcggagcggaatgttctgttgaagaatgtgaagcaccctttcctggtgggccttcacttctctttccagactgctgacaaattgtactttgtcctagactacattaatggtggagagttgttctaccatctccagagggaacgctgcttcctggaaccacgggctcgtttctatgctgctgaaatagccagtgccttgggctacctgcattcactgaacatcgtttataggactctgcaaggagaacattgaacacaacagcacaacatccaccttctgtggcacgccggagtatctcgcacctgaggtgcttcataagcagccttatgacaggactgtggactggtggtgcctgggagctgtcttgtatgagatgctgtatggcctgccgcctttttatagccgaaacacagctgaaatgtacgacaacattctgaacaagcctctccagctgaaaccaaatattacaaattccgcaagacacctcctggagggcctcctgcagaaggacaggacaaagcggctcggggccaaggatgacttcatggagattaagagtcatgtcttcttctccttaattaactgggatgatctcattaataagaagattactcccccttttaacccaaatgtgagtgggcccaacgacctacggcactttgaccccgagtttaccgaagagcctgtccccaactccattggcaagtcccctgacagcgtcctcgtcacagccagcgtcaaggaagctgccgaggctttcctaggcttttcctatgcgcctcccacggactctttcctctgaaccctgttagggcttggttttaaaggattttatgtgtgtttccgaatgttttagttagccttttggtggagccgccagctgacaggacatcttacaagagaatttgcacatctctggaagcttagcaatcttattgcacactgttcgctggaagctttttgaagagcacattctcctcagtgagctcatgaggttttcatttttattcttccttccaacgtggtgctatctctgaaacgagcgttagagtgccgccttagacggaggcaggagtttcgttagaaagcggacgctgttctaaaaaaggtctcctgcagatctgtctgggctgtgatgacgaatattatgaaatgtgccttttctgaagagattgtgttagctccaaagcttttcctatcgcagtgtttcagttctttattttcccttgtggatatgctgtgtgaaccgtcgtgtgagtgtggtatgcctgatcacagatggattttgttataagcatcaatgtgacacttgcaggacactacaacgtgggacattgtttgtttcttccatatttggaagataaatttatgtgtagacttttttgtaagatacggttaataactaaaatttattgaaatggtcttgcaatgactcgtattcagatgcttaaagaaagcattgctgctacaaatatttctatttttagaaagggtttttatggaccaatgccccagttgtcagtcagagccgttggtgtttttcattgtttaaaatgtcacctgtaaaatgggcattatttatgtttttttttttgcattcctgataattgtatgtattgtataaagaacgtctgtacattgggttataacactagtatatttaaacttacaggcttatttgtaatgtaaaccaccattttaatgtactgtaattaacatggttataatacgtacaatccttccctcatcccatcacacaactttttttgtgtgtgataaactgattttggtttgcaataaaaccttgaaaaatatttaca

SEQ ID NO: 438659 - DNA, 2767 bp, Homo sapiens
aggccgagcgcgggcctagcgcgcatacgccgagccggcgagccggtctttgagcgctaacgtctttctgtctccccgcggtggtgatgacggtgaaaactgaggctgctaagggcaccctcacttactccaggatgaggggcatggtggcaattctcatcgctttcatgaagcagaggaggatgggtctgaacgactttattcagaagattgccaataactcctatgcatgcaaacaccctgaagttcagtccatcttgaagatctcccaacctcaggagcctgagcttatgaatgccaacccttctcctccaccaagtccttctcagcaaatcaaccttggcccgtcgtccaatcctcatgctaaaccatctgactttcacttcttgaaagtgatcggaaagggcagttttggaaaggttcttctagcaagacacaaggcagaagaagtgttctatgcagtcaaagttttacagaagaaagcaatcctgaaaaagaaagaggtatgagatgtgcttgatggggctggcattggcggtagacactccttgaataatcttgattctggaatgttggtgccaagttgaaacatgccactaaatctgaatcgtcattttcctaggagaagcatattatgtcggagcggaatgttctgttgaagaatgtgaagcaccctttcctggtgggccttcacttctctttccagactgctgacaaattgtactttgtcctagactacattaatggtggagaggtgagcaggggggatagaagtcaactcttagtgtctctgcacagcctgctttgttttagtttgagaaaaaagttttcaaagatttttggtggggagaatgttaccagaattagcatttccttcaacctgtcaggtttatagttaatagattacttggggccacttcctgcagttgttcttttgctgtgtatgtcaaaactaattaaattcatttgcaacccagaatgactttgttctgtctcctgcagttgttctaccatctccagagggaacgctgcttcctggaaccacgggctcgtttctatgctgctgaaatagccagtgccttgggctacctgcattcactgaacatcgtttatagagacttaaaaccagagaatattttgctagattcacagggacacattgtccttactgacttcggactctgcaaggagaacattgaacacaacagcacaacatccaccttctgtggcacgccggagtatctcgcacctgaggtgcttcataagcagccttatgacaggactgtggactggtggtgcctgggagctgtcttgtatgagatgctgtatggcctgccgcctttttatagccgaaacacagctgaaatgtacgacaacattctgaacaagcctctccagctgaaaccaaatattacaaattccgcaagacacctcctggagggcctcctgcagaaggacaggacaaagcggctcggggccaaggatgacttcatggagattaagagtcatgtcttcttctccttaattaactgggatgatctcattaataagaagattactcccccttttaacccaaatgtgagtgggcccaacgacctacggcactttgaccccgagtttaccgaagagcctgtccccaactccattggcaagtcccctgacagcgtcctcgtcacagccagcgtcaaggaagctgccgaggctttcctaggcttttcctatgcgcctcccacggactctttcctctgaaccctgttagggcttggttttaaaggattttatgtgtgtttccgaatgttttagttagccttttggtggagccgccagctgacaggacatcttacaagagaatttgcacatctctggaagcttagcaatcttattgcacactgttcgctggaagctttttgaagagcacattctcctcagtgagctcatgaggttttcatttttattcttccttccaacgtggtgctatctctgaaacgagcgttagagtgccgccttagacggaggcaggagtttcgttagaaagcggacgctgttctaaaaaaggtctcctgcagatctgtctgggctgtgatgacgaatattatgaaatgtgccttttctgaagagattgtgttagctccaaagcttttcctatcgcagtgtttcagttctttattttcccttgtggatatgctgtgtgaaccgtcgtgtgagtgtggtatgcctgatcacagatggattttgttataagcatcaatgtgacacttgcaggacactacaacgtgggacattgtttgtttcttccatatttggaagataaatttatgtgtagacttttttgtaagatacggttaataactaaaatttattgaaatggtcttgcaatgactcgtattcagatgcttaaagaaagcattgctgctacaaatatttctatttttagaaagggtttttatggaccaatgccccagttgtcagtcagagccgttggtgtttttcattgtttaaaatgtcacctgtaaaatgggcattatttatgtttttttttttgcattcctgataattgtatgtattgtataaagaacgtctgtacattgggttataacactagtatatttaaacttacaggcttatttgtaatgtaaaccaccattttaatgtactgtaattaacatggttataatacgtacaatccttccctcatcccatcacacaactttttttgtgtgtgataaactgattttggtttgcaataaaaccttgaaaaatatttaca

SEQ ID NO: 438660 - DNA, 2471 bp, Homo sapiens
ccaaaagcacaaaaaaggcgttttcggaagcgacccgaccgtgcacaagggccatttgtttgttttgggactcggggcaggaaatcttgcccggcctgagtcacggcggctccttcaaggaaacgtcagtgctcgccggtcgctctcgtctgccgcgcgccccgccgcccgctgcccatgggggagatgcagggcgcgctggccagagcccggctcgagtccctgctgcggccccgccacaaaaagagggccgaggcgcagaaaaggagcgagtccttcctgctgagcggactggctttcatgaagcagaggaggatgggtctgaacgactttattcagaagattgccaataactcctatgcatgcaaacaccctgaagttcagtccatcttgaagatctcccaacctcaggagcctgagcttatgaatgccaacccttctcctccaccaagtccttctcagcaaatcaaccttggcccgtcgtccaatcctcatgctaaaccatctgactttcacttcttgaaagtgatcggaaagggcagttttggaaaggttcttctagcaagacacaaggcagaagaagtgttctatgcagtcaaagttttacagaagaaagcaatcctgaaaaagaaagaggagaagcatattatgtcggagcggaatgttctgttgaagaatgtgaagcaccctttcctggtgggccttcacttctctttccagactgctgacaaattgtactttgtcctagactacattaatggtggagagttgttctaccatctccagagggaacgctgcttcctggaaccacgggctcgtttctatgctgctgaaatagccagtgccttgggctacctgcattcactgaacatcgtttataggactctgcaaggagaacattgaacacaacagcacaacatccaccttctgtggcacgccggagtatctcgcacctgaggtgcttcataagcagccttatgacaggactgtggactggtggtgcctgggagctgtcttgtatgagatgctgtatggcctgccgcctttttatagccgaaacacagctgaaatgtacgacaacattctgaacaagcctctccagctgaaaccaaatattacaaattccgcaagacacctcctggagggcctcctgcagaaggacaggacaaagcggctcggggccaaggatgacttcatggagattaagagtcatgtcttcttctccttaattaactgggatgatctcattaataagaagattactcccccttttaacccaaatgtgagtgggcccaacgacctacggcactttgaccccgagtttaccgaagagcctgtccccaactccattggcaagtcccctgacagcgtcctcgtcacagccagcgtcaaggaagctgccgaggctttcctaggcttttcctatgcgcctcccacggactctttcctctgaaccctgttagggcttggttttaaaggattttatgtgtgtttccgaatgttttagttagccttttggtggagccgccagctgacaggacatcttacaagagaatttgcacatctctggaagcttagcaatcttattgcacactgttcgctggaagctttttgaagagcacattctcctcagtgagctcatgaggttttcatttttattcttccttccaacgtggtgctatctctgaaacgagcgttagagtgccgccttagacggaggcaggagtttcgttagaaagcggacgctgttctaaaaaaggtctcctgcagatctgtctgggctgtgatgacgaatattatgaaatgtgccttttctgaagagattgtgttagctccaaagcttttcctatcgcagtgtttcagttctttattttcccttgtggatatgctgtgtgaaccgtcgtgtgagtgtggtatgcctgatcacagatggattttgttataagcatcaatgtgacacttgcaggacactacaacgtgggacattgtttgtttcttccatatttggaagataaatttatgtgtagacttttttgtaagatacggttaataactaaaatttattgaaatggtcttgcaatgactcgtattcagatgcttaaagaaagcattgctgctacaaatatttctatttttagaaagggtttttatggaccaatgccccagttgtcagtcagagccgttggtgtttttcattgtttaaaatgtcacctgtaaaatgggcattatttatgtttttttttttgcattcctgataattgtatgtattgtataaagaacgtctgtacattgggttataacactagtatatttaaacttacaggcttatttgtaatgtaaaccaccattttaatgtactgtaattaacatggttataatacgtacaatccttccctcatcccatcacacaactttttttgtgtgtgataaactgattttggtttgcaataaaaccttgaaaaatatttaca

SEQ ID NO: 438661 - DNA, 2389 bp, Homo sapiens
caatcatgcacttaactaccaaaaagagtaaactcctctcagagacttcttaatacagttcagtgcaaataaaatacatttgctgtttgatgtagcatgagaaatcccaagtccttctgttcctttactgaaaagtagctgtttgtaagtaagatctgcatcataaaaactttctaaatccctaagtaagagatatcaagtgcccagcagtttcctaaatgtcagtacacataggtagccagtcaccctcaaaaagtccagcagttttatcaggaaggaatctaaagatatctatcttccaagctggctctgggtctctcagctttttcaaactaaatgtgtggtcgtgggattgcttgctttcgcaggttctaaacgctgtttccctggtctgtttttcagtatctcgcacctgaggtgcttcataagcagccttatgacaggactgtggactggtggtgcctgggagctgtcttgtatgagatgctgtatggcctggtgagtggcacattgggaaccatggaacactgcctgctccctacaatattgccttcacacagcccatgcttggccatggtgtcttgcccttaccagtacgcttatcaaaagcagctaagaggcatattggttattttatagttcataagaataatcacttacctggttcttttgtgcatttcacattttactagataggaccacattgaacctgtgtggtggtgaaaaactaccacttattaacatctaccccctcaccctccacacacacacacacaaacacacacacgggttgcaaagtagacacttaaatagcaagggaaaagaaagcattgaggtggggagagtttctcaaatcgagcctaatatttattgccgtttatatctttttctctactggtaatgtgtgccatatgaaacttccaattaagtcctaaagtaattttccccttctttcagccgcctttttatagccgaaacacagctgaaatgtacgacaacattctgaacaagcctctccagctgaaaccaaatattacaaattccgcaagacacctcctggagggcctcctgcagaaggacaggacaaagcggctcggggccaaggatgacttcatggagattaagagtcatgtcttcttctccttaattaactgggatgatctcattaataagaagattactcccccttttaacccaaatgtgagtgggcccaacgacctacggcactttgaccccgagtttaccgaagagcctgtccccaactccattggcaagtcccctgacagcgtcctcgtcacagccagcgtcaaggaagctgccgaggctttcctaggcttttcctatgcgcctcccacggactctttcctctgaaccctgttagggcttggttttaaaggattttatgtgtgtttccgaatgttttagttagccttttggtggagccgccagctgacaggacatcttacaagagaatttgcacatctctggaagcttagcaatcttattgcacactgttcgctggaagctttttgaagagcacattctcctcagtgagctcatgaggttttcatttttattcttccttccaacgtggtgctatctctgaaacgagcgttagagtgccgccttagacggaggcaggagtttcgttagaaagcggacgctgttctaaaaaaggtctcctgcagatctgtctgggctgtgatgacgaatattatgaaatgtgccttttctgaagagattgtgttagctccaaagcttttcctatcgcagtgtttcagttctttattttcccttgtggatatgctgtgtgaaccgtcgtgtgagtgtggtatgcctgatcacagatggattttgttataagcatcaatgtgacacttgcaggacactacaacgtgggacattgtttgtttcttccatatttggaagataaatttatgtgtagacttttttgtaagatacggttaataactaaaatttattgaaatggtcttgcaatgactcgtattcagatgcttaaagaaagcattgctgctacaaatatttctatttttagaaagggtttttatggaccaatgccccagttgtcagtcagagccgttggtgtttttcattgtttaaaatgtcacctgtaaaatgggcattatttatgtttttttttttgcattcctgataattgtatgtattgtataaagaacgtctgtacattgggttataacactagtatatttaaacttacaggcttatttgtaatgtaaaccaccattttaatgtactgtaattaacatggttataatacgtacaatccttccctcatcccatcacacaactttttttgtgtgtgataaactgattttggtttgcaataaaaccttgaaaaatatttaca

SEQ ID NO: 438662 - DNA, 944 bp, Homo sapiens
aggccgagcgcgggcctagcgcgcatacgccgagccggcgagccggtctttgagcgctaacgtctttctgtctccccgcggtggtgatgacggtgaaaactgaggctgctaagggcaccctcacttactccaggatgaggggcatggtggcaattctcatcgctttcatgaagcagaggaggatgggtctgaacgactttattcagaagattgccaataactcctatgcatgcaaacaccctgaagttcagtccatcttgaagatctcccaacctcaggagcctgagcttatgaatgccaacccttctcctccaccaagtccttctcagcaaatcaaccttggcccgtcgtccaatcctcatgctaaaccatctgactttcacttcttgaaagtgatcggaaagggcagttttggaaaggttcttctagcaagacacaaggcagaagaagtgttctatgcagtcaaagttttacagaagaaagcaatcctgaaaaagaaagaggagaagcatattatgtcggagcggaatgttctgttgaagaatgtgaagcaccctttcctggtgggccttcacttctctttccagactgctgacaaattgtactttgtcctagactacattaatggtggagagttgttctaccatctccagagggaacgctgcttcctggaaccacgggctcgtttctatgctgctgaaatagccagtgccttgggctacctgcattcactgaacatcgtttatagagacttaaaaccagagaatattttgctagattcacagggacacattgtccttactgacttcgcgggggaccttggccaacggaatcccttttggggcgccgggtttcccctggggggttctagcggcttttgaaggctgtgctgggtgcggggcgctgtttgctctcgtggcgcccttttgcgacgcgatgtggcc

SEQ ID NO: 438663 - DNA, 779 bp, Homo sapiens
aggccgagcgcgggcctagcgcgcatacgccgagccggcgagccggtctttgagcgctaacgtctttctgtctccccgcggtggtgatgacggtgaaaactgaggctgctaagggcaccctcacttactccaggatgaggggcatggtggcaattctcatcgctttcatgaagcagaggaggatgggtctgaacgactttattcagaagattgccaataactcctatgcatgcaaacaccctgaagttcagtccatcttgaagatctcccaacctcaggagcctgagcttatgaatgccaacccttctcctccaccaagtccttctcagcaaatcaaccttggcccgtcgtccaatcctcatgctaaaccatctgactttcacttcttgaaagtgatcggaaagggcagttttggaaaggttcttctagcaagacacaaggcagaagaagtgttctatgcagtcaaagttttacagaagaaagcaatcctgaaaaagaaagaggagaagcatattatgtcggagcggaatgttctgttgaagaatgtgaagcaccctttcctggtgggccttcacttctctttccagactgctgacaaattgtactttgtcctagactacattaatggtggagagttgttctaccatctccagagggaacgctgcttcctggaaccacgggctcgtttctatgctgctgaaatagccagtgccttgggctacctgcatgaacacaccacggtgcatgaacacaccacggatgcatgaacacaccacgga

SEQ ID NO: 438664 - DNA, 633 bp, Homo sapiens
aggccgagcgcgggcctagcgcgcatacgccgagccggcgagccggtctttgagcgctaacgtctttctgtctccccgcggtggtgatgacggtgaaaactgaggctgctaagggcaccctcacttactccaggatgaggggcatggtggcaattctcatcggtgagtgcaggaatcttgcgggacttctgctccaggagacgcaaagtggaaattttttgaaagtcccggatcagattagtgtgtgtggcgccggacgttatgaagccgtctaaacgtttctttatttctcctccttcatccacagctttcatgaagcagaggaggatgggtctgaacgactttattcagaagattgccaataactcctatgcatgcaaacagtaagtttgaccggatttgaggaaataactagtatagtttgaatttgccagcggtaaacattctcatcacggcgtttatcgggaaggcgaagacttcttctggggtggggatctcatttctccttaaattctaatatatttgacacattttaaacattaaagttaatttgctgatttggcttgaactggagatgtaagataaatggttcgtgttggccgaattcacggcctttctccatgagcaacaatc

SEQ ID NO: 438665 - DNA, 254 bp, Homo sapiens
ttagctttttgacatcttgcctttctccttaaatctgatcccttgtcactctttttttatttttttgttttttcctctcctgactttcatctgaaaccctgaaccctacaggccatgggagatgacctgtttcccagttttggtcactttttgggccatatttataaccaaaactcttatttaaccagttttcagaaaattctcagcttcttcatcaattgatgaagttatctgactgactttttattccagcc

SEQ ID NO: 438666 - DNA, 2189 bp, Homo sapiens
tgatcactgctgtgccttttagtggtttggggggtaagcagtagaaaagaaggtcaaaatagatttggattaagagtaggcaaaataaacttataacatttaaaaactgaagtatttttaggtttataatattgaaaatcacatacccttagctttttacactttatcagacatttttttaaatttcaagggtatagcaaaatgaaattataactttatgaagaaaagcattgatgaaagtggagaacatgcatttagtctaggggatttgaaactctcccaatactgaagacaaaccctgtcaagaaaaagaagaatttaatattatatagtattttcatatgcagttctttaagctttgtttacttctatacaaatacttttaagtaatgcaagataacatttaatagatggaattgttaaggtaattgcctgtagtcacattgctaaattcattgagagttacacaaaatccagaatatattgtctgttcctaaattatatatatttagattctggaattactaggaggaattagaagtcattcagataaaaattcatacttaacaagagtatctaggaaagagattcagcccatcccaatattgagcagctttccttatcagaaagttttattttctgtttcacagattgctcatgacctttaatacatttttctgaatgaaccctggagggaggtgagaagtagcagttttgttcatctcttctttttgtcctttatctctctgccactgttctcacctcatcctaaaacctggtcaggagggtttgaaacctatcagaactaaaggttaatatctcatctccctcaggcttttttcatttaaaaaaaaaatgggtatattagttaaattagaatacttgttgtagaattattgtcaaaggggaagggaaatacatctaggggaaacatcatgtcttttaggccctttatgtcactgaatgacttaaggctcgacaaatgatattcttggaaagtttaatcttgaggttttcaaatctttttttttaatgtctcccatgtttctcatttgctgattgattcattagttgctcttagtaagatttgtcagttggaaataatgaaggctgagactcatttctaaactcttccataaccatcaccagaagagcagccactgtgttgtgtgatgtaggctaatgcctcccagatagaggtaaagtcacaaggactattagaattccagtggattgtggaactggttttggattatccttatattttcattctgattactgaggcagttctgaaaactcctaccattgaaatagtggtgtgtcttttccttgtttaaggattttacatcatttttatgcacttgaattccaaaatcagaatctctcttttacctatcaacctttattggctattggcttttggcaatgacctttctgttcaaatgtagtcctgtctctttgtttccttagggagtagaacctgtcctttttctcatctttcatttttttgacgtgtcctttctaagagaaggctctctgccgcctgttctgggtgataagtgatattttcatctaatcgttatgtggttgggatgatcatggtgaaatactaggaagacatactctgttgatggactttttctctccaaataatcccaaatagattattttctagtgaatggtttatatctttctcgtcacaaaaatgttcctttgatttctagcacaaggtacagcaggatgcaaatgattctcagataaaatgatgttgacagtatttccttaacaatttatgtaaaactatgcataattttcattctaacttttgacatttttctccataaataaaagtaatgcctgatgtttagttaaagtagatccacctttgcttgattttattagtcttgttctatcctatttctttttaatacactgtttagacttgccaacaactcttaactgagaatctcttttccttcctaggctaagtaattgtgagtgggggaggaagaacattaagagaaataatctaaagactttgttcaatattgtcgaagcctaagaatatttgtgtgtccttctgatgtactgaggctttgccggtaccacaccatctttggattaccataaggttatgtagtaggacttaaaagtactagggcaaacatttgatttttgagaaagatcaa

SEQ ID NO: 438667 - DNA, 6148 bp, Homo sapiens
agcggaggcgccgcggtctgcaggcccccgccgcagggatggaccgccgaggcggcggcggggcggcggaggcggaggcggccggccggtggtctggagccgaaccggcaatatctctgaggtgtgactgttctctcagcttcatcaaatataaagtggaaagagttttgttcatgaagccactgaatgaaccattgcttgccttaaaggaagataagatgctcccaagtcccttgcagctctcttcagaagaaaaatcactagtgctctgctcttgccataataccaaacctttttgactcatgctttggtgctgcaacactggaagaattgcacacagtttccaggaatatctttttttcatttgagtgattctttgtggatgagaaaagatttgagtcttaataattaccttgttttaaagctatttctttatagtctgaactgtttaataaattgggccacttaccaatgagccacacagccagttcttgtcaggagctggttgaaaactgtgctgtgcatgtagcaggaatggcacaagaagatagccgtcgtggtcaagtgccatcttccttttatcatggtgccaaccaagaacttgacctgtccaccaaagtgtacaaaagggaatcaggaagtccttattctgtgttagtggacaccaagatgagcaaaccgcatctccatgaaacagaagaacagccatatttcagggagacaagagcagtgtctgacgtgcatgctgttaaggaagaccgggagaattctgatgacacagaggaggaagaggaagaagtctcttacaaaagggagcagatcatagtggaggtaaaccttaataatcaaacattaaatgtatctaaaggggaaaagggtgtctcttctcagtccaaagagactcctgttcttaagacaagcagtgaggaggaagaggaagagagtgaggaagaggccacagatgacagcaatgactatggagagaatgaaaagcagaagaaaaaggagaagatagtagagaaagtcagcgttacacaaaggagaaccaggagagctgcctctgttgccgcagctaccacttcccctactcccagaactacaagaggtcgtaggaagagtgtagagccacctaagcgtaagaagcgggccacaaaggagcccaaagcaccagtccagaaagctaagtgtgaagagaaagagactctgacctgtgagaagtgccccagggtatttaacactcgctggtacctggagaagcacatgaacgttactcataggcgcatgcagatttgtgataaatgtggcaagaagtttgtcctggaaagtgagctgtcccttcaccagcaaacagactgtgaaaaaaacattcagtgtgtttcctgtaacaaatcgttcaagaaactctggtcccttcatgaacatatcaagatcgtccatggatatgcagaaaagaaattttcctgtgaaatttgtgagaagaaattctataccatggctcatgtgcggaaacacatggttgcacacacaaaagacatgccatttacatgcgaaacctgtggaaaatcattcaaacgcagtatgtcactcaaggtgcactccttgcagcattctggagagaagccctttagatgcgagaactgtgacgaaaggtttcagtacaagtaccagctacgctcccacatgagcattcatattgggcacaaacagttcatgtgccagtggtgtggcaaggatttcaacatgaagcagtacttcgacgaacacatgaaaacacacactggagagaaaccctttatctgtgaaatctgtggcaaaagcttcaccagccgccccaacatgaagagacaccgcagaactcacacaggcgagaagccctatccatgtgatgtgtgtggccagcggttccgcttctcgaacatgcttaaggcccacaaggagaagtgctttcgggtgaccagccccgtgaatgtgccacctgctgtccagatcccacttacaacttccccagccaccccagttccttctgtggtgaacacagccacaaccccaacccctccaatcaatatgaatcctgtaagcactcttccccctcggcccatcccccaccccttctcacacctgcacatccacccacaccctcaccacccacaccaccttcccatccctccagtccctcacctcccgccacctccagctctctttaagagtgagcctttaaatcatagaggccagagtgaggacaactttctgcggcacctggcagagaagaacagttcagcacagcatcattaacatccgtctccttagtgtgttctccaggagacacgtccccatgtgtgagcgtgcacagagggagtcggtgagcatttccttagttctcagactctcctccgcctctaccaagagcttcgccagtgtcactgaatcaacagatccaagggaatgaacaagaagactaccttgagctcacagagggactgtcatctaaaccaggggaaccactgaactaaagcccaatttgcttgcattttctgatgacttttataagtttcaaatactcagacttgtggaattttataatttcatatcagctgatgaggtatgcttgcttttatatcccagacttctcctcaaagaggggataggcctggtttcctttgtactaatcgggaaggctgtgagattaatccagagcattaattgtatcactgtgtatggtaaggaattcttttcagcttttggtgccagctacagagttgagctggccatgtttcacagtatatcaagcattatagagaaagacagaaattttcttctttgtgtagctctcctaacgcactctttattttactacagaaattattttagagtttttgtatagacttctttggtagtctgtttctaaaatgaaatgtatttcaataagcagtgtaattttttcagtgtagctgaacctatgttgtaaaatagaaaaaaatttttataatcatcaaaatgtgattcttaaagatgcatataacttctataattcaaagctattcttacatccgtacaactcaaaaggtgcttcagagactagatgtatctgagagggtctccagaccaggttactgcaaaaatgaggttttgctttcaggatttggcgtaaatacttggtagttttgacatctctgcttaacactcaagagaggctccctaatgtgctcctgtcctccatgttctgcttggcttcgttagtgcattacatgaaatgatttgcaggggatggggccttttccagggaagtcacctaaagcttgcatgttttgaaaatttgaataaggctgtttgctgacaggaggaggaagtagtggagatcatttcatctcagtcacgtctgtttctcacttcccttaggaattgtgttgatgtttaacttttatgggatgacaaattgaaatcgctcattttgaggttgctttatttttctagaattgttataagaagctaaaatagtaaacttaaaatcacaaacatgacattgctgatagtggctgagaaattcagatgagaagacaaattggttatgaattttgaaatatctattatatgtaaaatgtggatatgttcacaaccttgagctattttaacacagtttaaatatagtgagggaaaactcctaagttttactgccctgtcctctgcaaattatgtaataccagcattcttaggcgataaagagagcagcacctctagtacctttaggcagattactttttcaagtttggggaacttcaaaagaccataatcaaccaggagcttattataggaaaggctgaacagaagggctagtgtattgattacacttaacagatcatatttatccagactcagtatagcttaaaattttgtatttctttatctgagagaactgagttcccaggctaaatcacttacctcccaccccctctccaattttttttttaagagacaaggtcttgctatgttgcccaggctagagtgcagtggctattcacaggtgcagttatagcacactacagcctccaactcttgggttcaagcaaccctgcctcagctaaccaagtagctgggactacaggtgcatgctaccatgcccagtccattttttaatcttgaaatttcttcatttttctttcttcggtttcttaaaatctttgcctgaatcagaacgctggcttttatttatttttttatttttaatattaaatgtgcagatatgcttcgagcacttttctaactaatgagctctgtggtaagaaaaaatgaactctttcaattgagattaagtccatatttttcaaacatcacgttctctattggctttttggtttagtgtttctaaattttctccttctgattttgcctgtcttatataatgagcataggaaaattttggaatgaggcagaaaagtatatcaagacatacttcctggttttggatgtaagttttaaagaatggtatttttaatatttgtacacattctttgagcacccaggtacccaagccaataaggaaagttaattccttgcatatgactgttatatctttagtggttgtctccctctccctccacagtctccttggcattccatgacaagtttgtcaacctacacttttatatagacatgtcattatttcatggtcaagcctgtagtattaaaatgatttttttaaaagatgtaaactgtgcttagttaattggttatattttgttctgtttttttttttttttttttttttttttgaggcagagtcttgttctgttgcctgggctggagtgcagtggcgtgatcttggctcactgcaacccccgccccccgggttcaagtgattctcctgcctcagcctcccgagtagctggaattacaggcatgcgccagcacgcccggctaagttttgtatttttggcagagatggggtttcaccatattggccaggctggtctcaaactcctgaccttgtgatccgcccacctcagcctccgaaagtgctgggattacaggcgtgagccaccacgtccaactgccttattttgttctgaataaatttacagtattgggcagcaattctggattctagacttgagaccacagaatcaaccatttcatgaggttgtactgtaattatacactggaatattcaggtagtcatctttgatttttcattcaagtaaatatagccataagaaaatatctgctatacaggaaaaccagtattaagcaaataccaccatccttaacagaaacaaaaatatatatatatattatttttaaaaattagcattgtcatacagtacaattcttagtgaagtgtattgtggaacaatttagaaacttcctttttttcccctagattaaggatactttccttgacttgagacttgtggtcttcaggaaaactactcagaatataatgactcctcatcagtatcatattgtatataaataatgaaatgcattaagaatattcacaacattgaacccaggaggcggagcttgcagtgagccgagattgcgccactgcgctccagcctgggcaacagagcgagactccatctcaaaaaaaaaaaaaaaaaagaatattcacaacattaatgcttctgaatagaagaactgcaggattaagccttaaacatatatgtgcaacacgtttaacatgcttaagactcaaactcagggttgaaaatttggttggggtcctctttgtaagataaaagttgcattatgtggtatgttctcttccatatatgctacagcaccccatgaattcttcaaaactttttacctacttgttatctgtttatgaaaaaaagaattatggagaagtttgagttctcagcccttatctgtacatgtctgttaaagacaacaaaggctgcatttaagcattatatagataacaaattgaggctgtctctcgttacttagttttactgtcttcaaaggcttgtatcattgctagggttaagacttatttgaggatgagttggcattgtattttttgtgtgtgtgggttggtttgtatttgtttcgtttttatttttctattttctctcatagatttatcagtaaaatataaactcttccttagccttaataaaggctgctgctttctcaaattgagtca

SEQ ID NO: 438668 - DNA, 5314 bp, Homo sapiens
agcggaggcgccgcggtctgcaggcccccgccgcagggatggaccgccgaggcggcggcggggcggcggaggcggaggcggccggccggtggtctggagccgaaccggcaatatctctgaggtgtgactgttctctcagcttcatcaaatataaagtggaaagagttttgttcatgaagccactgaatgaaccattgcttgccttaaaggaagataagatgctcccaagtcccttgcagctctcttcagaagaaaaatcactagtgctctgctcttgccataataccaaacctttttgactcatgctttggtgctgcaacactggaagaattgcacacagtttccaggaatatctttttttcatttgagtgattctttgtggatgagaaaagatttgagtcttaataattaccttgttttaaagctatttctttatagtctgaactgtttaataaattgggccacttaccaatgagccacacagccagttcttgtcaggagctggttgaaaactgtgctgtgcatgtagcaggaatggcacaagaagatagccgtcgtggtcaagtgccatcttccttttatcatggtgccaaccaagaacttgacctgtccaccaaagtgtacaaaagggaatcaggaagtccttattctgtgttagtggacaccaagatgagcaaaccgcatctccatgaaacagaagaacagccatatttcagggagacaagagcagtgtctgacgtgcatgctgttaaggaagaccgggagaattctgatgacacagaggaggaagaggaagaagtctcttacaaaagggagcagatcatagtggaggtaaaccttaataatcaaacattaaatgtatctaaaggggaaaagggtgtctcttctcagtccaaagagactcctgttcttaagacaagcagtgaggaggaagaggaagagagtgaggaagaggccacagatgacagcaatgactatggagagaatgaaaagcagaagaaaaaggagaagatagtagagaaagtcagcgttacacaaaggagaaccaggagagctgcctctgttgccgcagctaccacttcccctactcccagaactacaagaggtcgtaggaagagtgtagagccacctaagcgtaagaagcgggccacaaaggagcccaaagcaccagtccagaaagctaagtgtgaagagaaagagactctgacctgtgagaagtgccccagggtatttaacactcgctggtacctggagaagcacatgaacgttactcataggcgcatgcagatttgtgataaatgtggcaagaagtttgtcctggaaagtgagctgtcccttcaccagcaaacagactgtgaaaaaaacattcagtgtgtttcctgtaacaaatcgttcaagaaactctggtcccttcatgaacatatcaagatcgtccatggatatgcagaaaagaaattttcctgtgaaatttgtgagaagaaattctataccatggctcatgtgcggaaacacatggttgcacacacaaaagacatgccatttacatgcgaaacctgtggaaaatcattcaaacgcagtatgtcactcaaggtgcactccttgcagcattctggagagaagccctttagatgcgagaactgtgacgaaaggtttcagtacaagtaccagctacgctcccacatgagcattcatattgggcacaaacagttcatgtgccagtggtgtggcaaggatttcaacatgaagcagtacttcgacgaacacatgaaaacacacactggagagaaaccctttatctgtgaaatctgtggcaaaagcttcaccagccgccccaacatgaagagacaccgcagaactcacacaggcgagaagccctatccatgtgatgtgtgtggccagcggttccgcttctcgaacatgcttaaggcccacaaggagaagtgctttcgggtgaccagccccgtgaatgtgccacctgctgtccagatcccacttacaacttccccagccaccccagttccttctgtggtgaacacagccacaaccccaacccctccaatcaatatgaatcctgtaagcactcttccccctcggcccatcccccaccccttctcacacctgcacatccacccacaccctcaccacccacaccaccttcccatccctccagtccctcacctcccgccacctccagctctctttaagagtgagcctttaaatcatagaggccagagtgaggacaactttctgcggcacctggcagagaagaacagttcagcacagcatcattaacatccgtctccttagtgtgttctccaggagacacgtccccatgtgtgagcgtgcacagagggagtcggtgagcatttccttagttctcagactctcctccgcctctaccaagagcttcgccagtgtcactgaatcaacagatccaagggaatgaacaagaagactaccttgagctcacagagggactgtcatctaaaccaggggaaccactgaactaaagcccaatttgcttgcattttctgatgacttttataagtttcaaatactcagacttgtggaattttataatttcatatcagctgatgaggtatgcttgcttttatatcccagacttctcctcaaagaggggataggcctggtttcctttgtactaatcgggaaggctgtgagattaatccagagcattaattgtatcactgtgtatggtaaggaattcttttcagcttttggtgccagctacagagttgagctggccatgtttcacagtatatcaagcattatagagaaagacagaaattttcttctttgtgtagctctcctaacgcactctttattttactacagaaattattttagagtttttgtatagacttctttggtagtctgtttctaaaatgaaatgtatttcaataagcagtgtaattttttcagtgtagctgaacctatgttgtaaaatagaaaaaaatttttataatcatcaaaatgtgattcttaaagatgcatataacttctataattcaaagctattcttacatccgtacaactcaaaaggtgcttcagagactagatgtatctgagagggtctccagaccaggttactgcaaaaatgaggttttgctttcaggatttggcgtaaatacttggtagttttgacatctctgcttaacactcaagagaggctccctaatgtgctcctgtcctccatgttctgcttggcttcgttagtgcattacatgaaatgatttgcaggggatggggccttttccagggaagtcacctaaagcttgcatgttttgaaaatttgaataaggctgtttgctgacaggaggaggaagtagtggagatcatttcatctcagtcacgtctgtttctcacttcccttaggaattgtgttgatgtttaacttttatgggatgacaaattgaaatcgctcattttgaggttgctttatttttctagaattgttataagaagctaaaatagtaaacttaaaatcacaaacatgacattgctgatagtggctgagaaattcagatgagaagacaaattggttatgaattttgaaatatctattatatgtaaaatgtggatatgttcacaaccttgagctattttaacacagtttaaatatagtgagggaaaactcctaagttttactgccctgtcctctgcaaattatgtaataccagcattcttaggcgataaagagagcagcacctctagtacctttaggcagattactttttcaagtttggggaacttcaaaagaccataatcaaccaggagcttattataggaaaggctgaacagaagggctagtgtattgattacacttaacagatcatatttatccagactcagtatagcttaaaattttgtatttctttatctgagagaactgagttcccaggctaaatcacttacctcccaccccctctccaattttttttttaagagacaaggtcttgctatgttgcccaggctagagtgcagtggctattcacaggtgcagttatagcacactacagcctccaactcttgggttcaagcaaccctgcctcagctaaccaagtagctgggactacaggtgcatgctaccatgcccagtccattttttaatcttgaaatttcttcatttttctttcttcggtttcttaaaatctttgcctgaatcagaacgctggcttttatttatttttttatttttaatattaaatgtgcagatatgcttcgagcacttttctaactaatgagctctgtggtaagaaaaaatgaactctttcaattgagattaagtccatatttttcaaacatcacgttctctattggctttttggtttagtgtttctaaattttctccttctgattttgcctgtcttatataatgagcataggaaaattttggaatgaggcagaaaagtatatcaagacatacttcctggttttggatgtaagttttaaagaatggtatttttaatatttgtacacattctttgagcacccaggtacccaagccaataaggaaagttaattccttgcatatgactgttatatctttagtggttgtctccctctccctccacagtctccttggcattccatgacaagtttgtcaacctacacttttatatagacatgtcattatttcatggtcaagcctgtagtattaaaatgatttttttaaaagatgtaaacttgcgctccagcctgggcaacagagcgagactccatctcaaaaaaaaaaaaaaaaaagaatattcacaacattaatgcttctgaatagaagaactgcaggattaagccttaaacatatatgtgcaacacgtttaacatgcttaagactcaaactcagggttgaaaatttggttggggtcctctttgtaagataaaagttgcattatgtggtatgttctcttccatatatgctacagcaccccatgaattcttcaaaactttttacctacttgttatctgtttatgaaaaaaagaattatggagaagtttgagttctcagcccttatctgtacatgtctgttaaagacaacaaaggctgcatttaagcattatatagataacaaattgaggctgtctctcgttacttagttttactgtcttcaaaggcttgtatcattgctagggttaagacttatttgaggatgagttggcattgtattttttgtgtgtgtgggttggtttgtatttgtttcgtttttatttttctattttctctcatagatttatcagtaaaatataaactcttccttagccttaataaaggctgctgctttctcaaattgagtca

SEQ ID NO: 438669 - DNA, 4632 bp, Homo sapiens
gattctgtggtctcaagtctagaatcccgaattgctgccccatactgtaaatttattcagaaccaaataaggccgttggacgtggtggctcacacctgtaatcgcagcactttgggaggccaagatgggaggatcacttgaggccaggagttcgagaccagcctgatcaacatagtgagaccccatttctattaaaaaaaaaaagcttgagcacacaattaccacctaatatgttaatcatttttatgtctgtgttcatctcaggagagaaaccctttatctgtgaaatctgtggcaaaagcttcaccagccgccccaacatgaagagacaccgcagaactcacacaggcgagaagccctatccatgtgatgtgtgtggccagcggttccgcttctcgaacatgcttaaggcccacaaggagaagtgctttcgggtgaccagccccgtgaatgtgccacctgctgtccagatcccacttacaacttccccagccaccccagttccttctgtggtgaacacagccacaaccccaacccctccaatcaatatgaatcctgtaagcactcttccccctcggcccatcccccaccccttctcacacctgcacatccacccacaccctcaccacccacaccaccttcccatccctccagtccctcacctcccgccacctccagctctctttaagagtgagcctttaaatcatagaggccagagtgaggacaactttctgcggcacctggcagagaagaacagttcagcacagcatcattaacatccgtctccttagtgtgttctccaggagacacgtccccatgtgtgagcgtgcacagagggagtcggtgagcatttccttagttctcagactctcctccgcctctaccaagagcttcgccagtgtcactgaatcaacagatccaagggaatgaacaagaagactaccttgagctcacagagggactgtcatctaaaccaggggaaccactgaactaaagcccaatttgcttgcattttctgatgacttttataagtttcaaatactcagacttgtggaattttataatttcatatcagctgatgaggtatgcttgcttttatatcccagacttctcctcaaagaggggataggcctggtttcctttgtactaatcgggaaggctgtgagattaatccagagcattaattgtatcactgtgtatggtaaggaattcttttcagcttttggtgccagctacagagttgagctggccatgtttcacagtatatcaagcattatagagaaagacagaaattttcttctttgtgtagctctcctaacgcactctttattttactacagaaattattttagagtttttgtatagacttctttggtagtctgtttctaaaatgaaatgtatttcaataagcagtgtaattttttcagtgtagctgaacctatgttgtaaaatagaaaaaaatttttataatcatcaaaatgtgattcttaaagatgcatataacttctataattcaaagctattcttacatccgtacaactcaaaaggtgcttcagagactagatgtatctgagagggtctccagaccaggttactgcaaaaatgaggttttgctttcaggatttggcgtaaatacttggtagttttgacatctctgcttaacactcaagagaggctccctaatgtgctcctgtcctccatgttctgcttggcttcgttagtgcattacatgaaatgatttgcaggggatggggccttttccagggaagtcacctaaagcttgcatgttttgaaaatttgaataaggctgtttgctgacaggaggaggaagtagtggagatcatttcatctcagtcacgtctgtttctcacttcccttaggaattgtgttgatgtttaacttttatgggatgacaaattgaaatcgctcattttgaggttgctttatttttctagaattgttataagaagctaaaatagtaaacttaaaatcacaaacatgacattgctgatagtggctgagaaattcagatgagaagacaaattggttatgaattttgaaatatctattatatgtaaaatgtggatatgttcacaaccttgagctattttaacacagtttaaatatagtgagggaaaactcctaagttttactgccctgtcctctgcaaattatgtaataccagcattcttaggcgataaagagagcagcacctctagtacctttaggcagattactttttcaagtttggggaacttcaaaagaccataatcaaccaggagcttattataggaaaggctgaacagaagggctagtgtattgattacacttaacagatcatatttatccagactcagtatagcttaaaattttgtatttctttatctgagagaactgagttcccaggctaaatcacttacctcccaccccctctccaattttttttttaagagacaaggtcttgctatgttgcccaggctagagtgcagtggctattcacaggtgcagttatagcacactacagcctccaactcttgggttcaagcaaccctgcctcagctaaccaagtagctgggactacaggtgcatgctaccatgcccagtccattttttaatcttgaaatttcttcatttttctttcttcggtttcttaaaatctttgcctgaatcagaacgctggcttttatttatttttttatttttaatattaaatgtgcagatatgcttcgagcacttttctaactaatgagctctgtggtaagaaaaaatgaactctttcaattgagattaagtccatatttttcaaacatcacgttctctattggctttttggtttagtgtttctaaattttctccttctgattttgcctgtcttatataatgagcataggaaaattttggaatgaggcagaaaagtatatcaagacatacttcctggttttggatgtaagttttaaagaatggtatttttaatatttgtacacattctttgagcacccaggtacccaagccaataaggaaagttaattccttgcatatgactgttatatctttagtggttgtctccctctccctccacagtctccttggcattccatgacaagtttgtcaacctacacttttatatagacatgtcattatttcatggtcaagcctgtagtattaaaatgatttttttaaaagatgtaaactgtgcttagttaattggttatattttgttctgtttttttttttttttttttttttttttgaggcagagtcttgttctgttgcctgggctggagtgcagtggcgtgatcttggctcactgcaacccccgccccccgggttcaagtgattctcctgcctcagcctcccgagtagctggaattacaggcatgcgccagcacgcccggctaagttttgtatttttggcagagatggggtttcaccatattggccaggctggtctcaaactcctgaccttgtgatccgcccacctcagcctccgaaagtgctgggattacaggcgtgagccaccacgtccaactgccttattttgttctgaataaatttacagtattgggcagcaattctggattctagacttgagaccacagaatcaaccatttcatgaggttgtactgtaattatacactggaatattcaggtagtcatctttgatttttcattcaagtaaatatagccataagaaaatatctgctatacaggaaaaccagtattaagcaaataccaccatccttaacagaaacaaaaatatatatatatattatttttaaaaattagcattgtcatacagtacaattcttagtgaagtgtattgtggaacaatttagaaacttcctttttttcccctagattaaggatactttccttgacttgagacttgtggtcttcaggaaaactactcagaatataatgactcctcatcagtatcatattgtatataaataatgaaatgcattaagaatattcacaacattgaacccaggaggcggagcttgcagtgagccgagattgcgccactgcgctccagcctgggcaacagagcgagactccatctcaaaaaaaaaaaaaaaaaagaatattcacaacattaatgcttctgaatagaagaactgcaggattaagccttaaacatatatgtgcaacacgtttaacatgcttaagactcaaactcagggttgaaaatttggttggggtcctctttgtaagataaaagttgcattatgtggtatgttctcttccatatatgctacagcaccccatgaattcttcaaaactttttacctacttgttatctgtttatgaaaaaaagaattatggagaagtttgagttctcagcccttatctgtacatgtctgttaaagacaacaaaggctgcatttaagcattatatagataacaaattgaggctgtctctcgttacttagttttactgtcttcaaaggcttgtatcattgctagggttaagacttatttgaggatgagttggcattgtattttttgtgtgtgtgggttggtttgtatttgtttcgtttttatttttctattttctctcatagatttatcagtaaaatataaactcttccttagccttaataaaggctgctgctttctcaaattgagtca

SEQ ID NO: 438670 - DNA, 1910 bp, Homo sapiens
agcggaggcgccgcggtctgcaggcccccgccgcagggatggaccgccgaggcggcggcggggcggcggaggcggaggcggccggccggtggtctggagccgaaccggcaatatctctgaggtgtgactgttctctcagcttcatcaaatataaagtggaaagagttttgttcatgaagccactgaatgaaccattgcttgccttaaaggaagataagatgctcccaagtcccttgcagctctcttcagaagaaaaatcactagtgctctgctcttgccataataccaaacctttttgactcatgctttggtgctgcaacactggaagaattgcacacagtttccaggaatatctttttttcatttgagtgattctttgtggatgagaaaagatttgagtcttaataattaccttgttttaaagctatttctttatagtctgaactgtttaataaattgggccacttaccaatgagccacacagccagttcttgtcaggagctggttgaaaactgtgctgtgcatgtagcaggaatggcacaagaagatagccgtcgtggtcaagtgccatcttccttttatcatggtgccaaccaagaacttgacctgtccaccaaagtgtacaaaagggaatcaggaagtccttattctgtgttagtggacaccaagatgagcaaaccgcatctccatgaaacagaagaacagccatatttcagggagacaagagcagtgtctgacgtgcatgctgttaaggaagaccgggagaattctgatgacacagaggaggaagaggaagaagtctcttacaaaagggagcagatcatagtggaggtaaaccttaataatcaaacattaaatgtatctaaaggggaaaagggtgtctcttctcagtccaaagagactcctgttcttaagacaagcagtgaggaggaagaggaagagagtgaggaagaggccacagatgacagcaatgactatggagagaatgaaaagcagaagaaaaaggagaagatagtagagaaagtcagcgttacacaaaggagaaccaggagagctgcctctgttgccgcagctaccacttcccctactcccagaactacaagaggtcgtaggaagagtgtagagccacctaagcgtaagaagcgggccacaaaggagcccaaagcaccagtccagaaagctaagtgtgaagagaaagagactctgacctgtgagaagtgccccagggtatttaacactcgctggtacctggagaagcacatgaacgttactcataggcgcatgcagatttgtgataaatgtggcaagaagtttgtcctggaaagtgagctgtcccttcaccagcaaacagactgtgaaaaaaacattcagtgtgtttcctgtaacaaatcgttcaagaaactctggtcccttcatgaacatatcaagatcgtccatggatatgcagaaaagaaattttcctgtgaaatttgtgagaagaaattctataccatggctcatgtgcggaaacacatggttgcacacacaaaagacatgccatttacatgcgaaacctgtggaaaatcattcaaacgcagtatgtcactcaaggtgcactccttgcagcattctggagagaagccctttagatgcgagaactgtgacgaaaggtttcagtacaagtaccagctacgctcccacatgagcattcatattgggcacaaacagttcatgtgccagtggtgtggcaaggatttcaacatgaagcagtacttcgacgaacacatgaaaacacacactggagagaaaccctttatctgtgaaatctgtggcaaaagcttcaccagccgccacctccagctctctttaagagtgagccttatcatagaagaacccggaggtagacgcacccgcgaggggtaccgccgcga

SEQ ID NO: 438671 - DNA, 730 bp, Homo sapiens
aaccaaaaaatttgtgtgacttgctttattgaggtatttgctttattgcagtggtctggagccgaaccggcaatatctctgaggtgtgactgttctctcagcttcatcaaatataaagtggaaagagttttgttcatgaagccactgaatgaaccattgcttgccttaaaggaaggtatagaagtagagtgtttagcttttttcttgaggtcttcgtgtattgctaaggcttgctttctttgtaattttgagaaagcttgctcctgatcacttcagacattaaacttgggaaaatcttgtataaactaacattatttctgagttattctgctatcatttccctatttactaatagcatttgaattaattcacattagagaaatatgcattgtagcagaactcatctttagtctctttagaaaagctattttattgagtaccatcttaatcagtgattgtgaaagccaaatatttgatttgaaccttgcctcaagactgaattatattcaggctttgtaaatcaaagacttcagttttacattaagcacttgcctgttcttactctgcaaatccctgactttctggatttcttttattcttgattataaactgatcattattttctgaattcatccttttcatgtaataatttgttaaatataactaacagtgttacaatacaacacacttgtaatagtccattttcccactagagctgctagctcttatg

SEQ ID NO: 438672 - DNA, 5996 bp, Homo sapiens
gcggggagccggcggttatctgggcggcggagcgctcacaatgtggcaggagacagaaaagataagatgctcccaagtcccttgcagctctcttcagaagaaaaatcactagtgctctgctcttgccataataccaaacctttttgactcatgctttggtgctgcaacactggaagaattgcacacagtttccaggaatatctttttttcatttgagtgattctttgtggatgagaaaagatttgagtcttaataattaccttgttttaaagctatttctttatagtctgaactgtttaataaattgggccacttaccaatgagccacacagccagttcttgtcaggagctggttgaaaactgtgctgtgcatgtagcaggaatggcacaagaagatagccgtcgtggtcaagtgccatcttccttttatcatggtgccaaccaagaacttgacctgtccaccaaagtgtacaaaagggaatcaggaagtccttattctgtgttagtggacaccaagatgagcaaaccgcatctccatgaaacagaagaacagccatatttcagggagacaagagcagtgtctgacgtgcatgctgttaaggaagaccgggagaattctgatgacacagaggaggaagaggaagaagtctcttacaaaagggagcagatcatagtggaggtaaaccttaataatcaaacattaaatgtatctaaaggggaaaagggtgtctcttctcagtccaaagagactcctgttcttaagacaagcagtgaggaggaagaggaagagagtgaggaagaggccacagatgacagcaatgactatggagagaatgaaaagcagaagaaaaaggagaagatagtagagaaagtcagcgttacacaaaggagaaccaggagagctgcctctgttgccgcagctaccacttcccctactcccagaactacaagaggtcgtaggaagagtgtagagccacctaagcgtaagaagcgggccacaaaggagcccaaagcaccagtccagaaagctaagtgtgaagagaaagagactctgacctgtgagaagtgccccagggtatttaacactcgctggtacctggagaagcacatgaacgttactcataggcgcatgcagatttgtgataaatgtggcaagaagtttgtcctggaaagtgagctgtcccttcaccagcaaacagactgtgaaaaaaacattcagtgtgtttcctgtaacaaatcgttcaagaaactctggtcccttcatgaacatatcaagatcgtccatggatatgcagaaaagaaattttcctgtgaaatttgtgagaagaaattctataccatggctcatgtgcggaaacacatggttgcacacacaaaagacatgccatttacatgcgaaacctgtggaaaatcattcaaacgcagtatgtcactcaaggtgcactccttgcagcattctggagagaagccctttagatgcgagaactgtgacgaaaggtttcagtacaagtaccagctacgctcccacatgagcattcatattgggcacaaacagttcatgtgccagtggtgtggcaaggatttcaacatgaagcagtacttcgacgaacacatgaaaacacacactggagagaaaccctttatctgtgaaatctgtggcaaaagcttcaccagccgccccaacatgaagagacaccgcagaactcacacaggcgagaagccctatccatgtgatgtgtgtggccagcggttccgcttctcgaacatgcttaaggcccacaaggagaagtgctttcgggtgaccagccccgtgaatgtgccacctgctgtccagatcccacttacaacttccccagccaccccagttccttctgtggtgaacacagccacaaccccaacccctccaatcaatatgaatcctgtaagcactcttccccctcggcccatcccccaccccttctcacacctgcacatccacccacaccctcaccacccacaccaccttcccatccctccagtccctcacctcccgccacctccagctctctttaagagtgagcctttaaatcatagaggccagagtgaggacaactttctgcggcacctggcagagaagaacagttcagcacagcatcattaacatccgtctccttagtgtgttctccaggagacacgtccccatgtgtgagcgtgcacagagggagtcggtgagcatttccttagttctcagactctcctccgcctctaccaagagcttcgccagtgtcactgaatcaacagatccaagggaatgaacaagaagactaccttgagctcacagagggactgtcatctaaaccaggggaaccactgaactaaagcccaatttgcttgcattttctgatgacttttataagtttcaaatactcagacttgtggaattttataatttcatatcagctgatgaggtatgcttgcttttatatcccagacttctcctcaaagaggggataggcctggtttcctttgtactaatcgggaaggctgtgagattaatccagagcattaattgtatcactgtgtatggtaaggaattcttttcagcttttggtgccagctacagagttgagctggccatgtttcacagtatatcaagcattatagagaaagacagaaattttcttctttgtgtagctctcctaacgcactctttattttactacagaaattattttagagtttttgtatagacttctttggtagtctgtttctaaaatgaaatgtatttcaataagcagtgtaattttttcagtgtagctgaacctatgttgtaaaatagaaaaaaatttttataatcatcaaaatgtgattcttaaagatgcatataacttctataattcaaagctattcttacatccgtacaactcaaaaggtgcttcagagactagatgtatctgagagggtctccagaccaggttactgcaaaaatgaggttttgctttcaggatttggcgtaaatacttggtagttttgacatctctgcttaacactcaagagaggctccctaatgtgctcctgtcctccatgttctgcttggcttcgttagtgcattacatgaaatgatttgcaggggatggggccttttccagggaagtcacctaaagcttgcatgttttgaaaatttgaataaggctgtttgctgacaggaggaggaagtagtggagatcatttcatctcagtcacgtctgtttctcacttcccttaggaattgtgttgatgtttaacttttatgggatgacaaattgaaatcgctcattttgaggttgctttatttttctagaattgttataagaagctaaaatagtaaacttaaaatcacaaacatgacattgctgatagtggctgagaaattcagatgagaagacaaattggttatgaattttgaaatatctattatatgtaaaatgtggatatgttcacaaccttgagctattttaacacagtttaaatatagtgagggaaaactcctaagttttactgccctgtcctctgcaaattatgtaataccagcattcttaggcgataaagagagcagcacctctagtacctttaggcagattactttttcaagtttggggaacttcaaaagaccataatcaaccaggagcttattataggaaaggctgaacagaagggctagtgtattgattacacttaacagatcatatttatccagactcagtatagcttaaaattttgtatttctttatctgagagaactgagttcccaggctaaatcacttacctcccaccccctctccaattttttttttaagagacaaggtcttgctatgttgcccaggctagagtgcagtggctattcacaggtgcagttatagcacactacagcctccaactcttgggttcaagcaaccctgcctcagctaaccaagtagctgggactacaggtgcatgctaccatgcccagtccattttttaatcttgaaatttcttcatttttctttcttcggtttcttaaaatctttgcctgaatcagaacgctggcttttatttatttttttatttttaatattaaatgtgcagatatgcttcgagcacttttctaactaatgagctctgtggtaagaaaaaatgaactctttcaattgagattaagtccatatttttcaaacatcacgttctctattggctttttggtttagtgtttctaaattttctccttctgattttgcctgtcttatataatgagcataggaaaattttggaatgaggcagaaaagtatatcaagacatacttcctggttttggatgtaagttttaaagaatggtatttttaatatttgtacacattctttgagcacccaggtacccaagccaataaggaaagttaattccttgcatatgactgttatatctttagtggttgtctccctctccctccacagtctccttggcattccatgacaagtttgtcaacctacacttttatatagacatgtcattatttcatggtcaagcctgtagtattaaaatgatttttttaaaagatgtaaactgtgcttagttaattggttatattttgttctgtttttttttttttttttttttttttttgaggcagagtcttgttctgttgcctgggctggagtgcagtggcgtgatcttggctcactgcaacccccgccccccgggttcaagtgattctcctgcctcagcctcccgagtagctggaattacaggcatgcgccagcacgcccggctaagttttgtatttttggcagagatggggtttcaccatattggccaggctggtctcaaactcctgaccttgtgatccgcccacctcagcctccgaaagtgctgggattacaggcgtgagccaccacgtccaactgccttattttgttctgaataaatttacagtattgggcagcaattctggattctagacttgagaccacagaatcaaccatttcatgaggttgtactgtaattatacactggaatattcaggtagtcatctttgatttttcattcaagtaaatatagccataagaaaatatctgctatacaggaaaaccagtattaagcaaataccaccatccttaacagaaacaaaaatatatatatatattatttttaaaaattagcattgtcatacagtacaattcttagtgaagtgtattgtggaacaatttagaaacttcctttttttcccctagattaaggatactttccttgacttgagacttgtggtcttcaggaaaactactcagaatataatgactcctcatcagtatcatattgtatataaataatgaaatgcattaagaatattcacaacattgaacccaggaggcggagcttgcagtgagccgagattgcgccactgcgctccagcctgggcaacagagcgagactccatctcaaaaaaaaaaaaaaaaaagaatattcacaacattaatgcttctgaatagaagaactgcaggattaagccttaaacatatatgtgcaacacgtttaacatgcttaagactcaaactcagggttgaaaatttggttggggtcctctttgtaagataaaagttgcattatgtggtatgttctcttccatatatgctacagcaccccatgaattcttcaaaactttttacctacttgttatctgtttatgaaaaaaagaattatggagaagtttgagttctcagcccttatctgtacatgtctgttaaagacaacaaaggctgcatttaagcattatatagataacaaattgaggctgtctctcgttacttagttttactgtcttcaaaggcttgtatcattgctagggttaagacttatttgaggatgagttggcattgtattttttgtgtgtgtgggttggtttgtatttgtttcgtttttatttttctattttctctcatagatttatcagtaaaatataaactcttccttagccttaataaaggctgctgctttctcaaattgagtca

SEQ ID NO: 438673 - DNA, 5608 bp, Homo sapiens
agcggaggcgccgcggtctgcaggcccccgccgcagggatggaccgccgaggcggcggcggggcggcggaggcggaggcggccggccggtggtctggagccgaaccggcaatatctctgaggtgtgactgttctctcagcttcatcaaatataaagtggaaagagttttgttcatgaagccactgaatgaaccattgcttgccttaaaggaagataagatgctcccaagtcccttgcagctctcttcagaagaaaaatcactagtgctctgctcttgccataataccaaacctttttgactcatgctttggtgctgcaacactggaagaattgcacacagtttccaggaatatctttttttcatttgagtgattctttgtggatgagaaaagatttgagtcttaataattaccttgttttaaagctatttctttatagtctgaactgtttaataaattgggccacttaccaatgagccacacagccagttcttgtcaggagctggttgaaaactgtgctgtgcatgtagcaggaatggcacaagaagatagccgtcgtggtcaagtgccatcttccttttatcatggtgccaaccaagaacttgacctgtccaccaaagtgtacaaaagggaatcaggaagtccttattctgtgttagtggacaccaagatgagcaaaccgcatctccatgaaacagaagaacagccatatttcagggagacaagagcagtgtctgacgtgcatgctgttaaggaagaccgggagaattctgatgacacagaggaggaagaggaagaagtctcttacaaaagggagcagatcatagtggagtgtgtttcctgtaacaaatcgttcaagaaactctggtcccttcatgaacatatcaagatcgtccatggatatgcagaaaagaaattttcctgtgaaatttgtgagaagaaattctataccatggctcatgtgcggaaacacatggttgcacacacaaaagacatgccatttacatgcgaaacctgtggaaaatcattcaaacgcagtatgtcactcaaggtgcactccttgcagcattctggagagaagccctttagatgcgagaactgtgacgaaaggtttcagtacaagtaccagctacgctcccacatgagcattcatattgggcacaaacagttcatgtgccagtggtgtggcaaggatttcaacatgaagcagtacttcgacgaacacatgaaaacacacactggagagaaaccctttatctgtgaaatctgtggcaaaagcttcaccagccgccccaacatgaagagacaccgcagaactcacacaggcgagaagccctatccatgtgatgtgtgtggccagcggttccgcttctcgaacatgcttaaggcccacaaggagaagtgctttcgggtgaccagccccgtgaatgtgccacctgctgtccagatcccacttacaacttccccagccaccccagttccttctgtggtgaacacagccacaaccccaacccctccaatcaatatgaatcctgtaagcactcttccccctcggcccatcccccaccccttctcacacctgcacatccacccacaccctcaccacccacaccaccttcccatccctccagtccctcacctcccgccacctccagctctctttaagagtgagcctttaaatcatagaggccagagtgaggacaactttctgcggcacctggcagagaagaacagttcagcacagcatcattaacatccgtctccttagtgtgttctccaggagacacgtccccatgtgtgagcgtgcacagagggagtcggtgagcatttccttagttctcagactctcctccgcctctaccaagagcttcgccagtgtcactgaatcaacagatccaagggaatgaacaagaagactaccttgagctcacagagggactgtcatctaaaccaggggaaccactgaactaaagcccaatttgcttgcattttctgatgacttttataagtttcaaatactcagacttgtggaattttataatttcatatcagctgatgaggtatgcttgcttttatatcccagacttctcctcaaagaggggataggcctggtttcctttgtactaatcgggaaggctgtgagattaatccagagcattaattgtatcactgtgtatggtaaggaattcttttcagcttttggtgccagctacagagttgagctggccatgtttcacagtatatcaagcattatagagaaagacagaaattttcttctttgtgtagctctcctaacgcactctttattttactacagaaattattttagagtttttgtatagacttctttggtagtctgtttctaaaatgaaatgtatttcaataagcagtgtaattttttcagtgtagctgaacctatgttgtaaaatagaaaaaaatttttataatcatcaaaatgtgattcttaaagatgcatataacttctataattcaaagctattcttacatccgtacaactcaaaaggtgcttcagagactagatgtatctgagagggtctccagaccaggttactgcaaaaatgaggttttgctttcaggatttggcgtaaatacttggtagttttgacatctctgcttaacactcaagagaggctccctaatgtgctcctgtcctccatgttctgcttggcttcgttagtgcattacatgaaatgatttgcaggggatggggccttttccagggaagtcacctaaagcttgcatgttttgaaaatttgaataaggctgtttgctgacaggaggaggaagtagtggagatcatttcatctcagtcacgtctgtttctcacttcccttaggaattgtgttgatgtttaacttttatgggatgacaaattgaaatcgctcattttgaggttgctttatttttctagaattgttataagaagctaaaatagtaaacttaaaatcacaaacatgacattgctgatagtggctgagaaattcagatgagaagacaaattggttatgaattttgaaatatctattatatgtaaaatgtggatatgttcacaaccttgagctattttaacacagtttaaatatagtgagggaaaactcctaagttttactgccctgtcctctgcaaattatgtaataccagcattcttaggcgataaagagagcagcacctctagtacctttaggcagattactttttcaagtttggggaacttcaaaagaccataatcaaccaggagcttattataggaaaggctgaacagaagggctagtgtattgattacacttaacagatcatatttatccagactcagtatagcttaaaattttgtatttctttatctgagagaactgagttcccaggctaaatcacttacctcccaccccctctccaattttttttttaagagacaaggtcttgctatgttgcccaggctagagtgcagtggctattcacaggtgcagttatagcacactacagcctccaactcttgggttcaagcaaccctgcctcagctaaccaagtagctgggactacaggtgcatgctaccatgcccagtccattttttaatcttgaaatttcttcatttttctttcttcggtttcttaaaatctttgcctgaatcagaacgctggcttttatttatttttttatttttaatattaaatgtgcagatatgcttcgagcacttttctaactaatgagctctgtggtaagaaaaaatgaactctttcaattgagattaagtccatatttttcaaacatcacgttctctattggctttttggtttagtgtttctaaattttctccttctgattttgcctgtcttatataatgagcataggaaaattttggaatgaggcagaaaagtatatcaagacatacttcctggttttggatgtaagttttaaagaatggtatttttaatatttgtacacattctttgagcacccaggtacccaagccaataaggaaagttaattccttgcatatgactgttatatctttagtggttgtctccctctccctccacagtctccttggcattccatgacaagtttgtcaacctacacttttatatagacatgtcattatttcatggtcaagcctgtagtattaaaatgatttttttaaaagatgtaaactgtgcttagttaattggttatattttgttctgtttttttttttttttttttttttttttgaggcagagtcttgttctgttgcctgggctggagtgcagtggcgtgatcttggctcactgcaacccccgccccccgggttcaagtgattctcctgcctcagcctcccgagtagctggaattacaggcatgcgccagcacgcccggctaagttttgtatttttggcagagatggggtttcaccatattggccaggctggtctcaaactcctgaccttgtgatccgcccacctcagcctccgaaagtgctgggattacaggcgtgagccaccacgtccaactgccttattttgttctgaataaatttacagtattgggcagcaattctggattctagacttgagaccacagaatcaaccatttcatgaggttgtactgtaattatacactggaatattcaggtagtcatctttgatttttcattcaagtaaatatagccataagaaaatatctgctatacaggaaaaccagtattaagcaaataccaccatccttaacagaaacaaaaatatatatatatattatttttaaaaattagcattgtcatacagtacaattcttagtgaagtgtattgtggaacaatttagaaacttcctttttttcccctagattaaggatactttccttgacttgagacttgtggtcttcaggaaaactactcagaatataatgactcctcatcagtatcatattgtatataaataatgaaatgcattaagaatattcacaacattgaacccaggaggcggagcttgcagtgagccgagattgcgccactgcgctccagcctgggcaacagagcgagactccatctcaaaaaaaaaaaaaaaaaagaatattcacaacattaatgcttctgaatagaagaactgcaggattaagccttaaacatatatgtgcaacacgtttaacatgcttaagactcaaactcagggttgaaaatttggttggggtcctctttgtaagataaaagttgcattatgtggtatgttctcttccatatatgctacagcaccccatgaattcttcaaaactttttacctacttgttatctgtttatgaaaaaaagaattatggagaagtttgagttctcagcccttatctgtacatgtctgttaaagacaacaaaggctgcatttaagcattatatagataacaaattgaggctgtctctcgttacttagttttactgtcttcaaaggcttgtatcattgctagggttaagacttatttgaggatgagttggcattgtattttttgtgtgtgtgggttggtttgtatttgtttcgtttttatttttctattttctctcatagatttatcagtaaaatataaactcttccttagccttaataaaggctgctgctttctcaaattgagtca

SEQ ID NO: 438674 - DNA, 4874 bp, Homo sapiens
gataggggtctgtagaggagggagagatgtggcaggaggttggtcgtggaaggtgagggtcgtacacgaaggaagagagtgtgaaaaaaaagtacagtgtgtttcctgtaacaaatcgttcaagaaactctggtcccttcatgaacatatcaagatcgtccatggatatgcagaaaagaaattttcctgtgaaatttgtgagaagaaattctataccatggctcatgtgcggaaacacatggttgcacacacaaaagacatgccatttacatgcgaaacctgtggaaaatcattcaaacgcagtatgtcactcaaggtgcactccttgcagcattctggagagaagccctttagatgcgagaactgtgacgaaaggtttcagtacaagtaccagctacgctcccacatgagcattcatattgggcacaaacagttcatgtgccagtggtgtggcaaggatttcaacatgaagcagtacttcgacgaacacatgaaaacacacactggagagaaaccctttatctgtgaaatctgtggcaaaagcttcaccagccgccccaacatgaagagacaccgcagaactcacacaggcgagaagccctatccatgtgatgtgtgtggccagcggttccgcttctcgaacatgcttaaggcccacaaggagaagtgctttcgggtgaccagccccgtgaatgtgccacctgctgtccagatcccacttacaacttccccagccaccccagttccttctgtggtgaacacagccacaaccccaacccctccaatcaatatgaatcctgtaagcactcttccccctcggcccatcccccaccccttctcacacctgcacatccacccacaccctcaccacccacaccaccttcccatccctccagtccctcacctcccgccacctccagctctctttaagagtgagcctttaaatcatagaggccagagtgaggacaactttctgcggcacctggcagagaagaacagttcagcacagcatcattaacatccgtctccttagtgtgttctccaggagacacgtccccatgtgtgagcgtgcacagagggagtcggtgagcatttccttagttctcagactctcctccgcctctaccaagagcttcgccagtgtcactgaatcaacagatccaagggaatgaacaagaagactaccttgagctcacagagggactgtcatctaaaccaggggaaccactgaactaaagcccaatttgcttgcattttctgatgacttttataagtttcaaatactcagacttgtggaattttataatttcatatcagctgatgaggtatgcttgcttttatatcccagacttctcctcaaagaggggataggcctggtttcctttgtactaatcgggaaggctgtgagattaatccagagcattaattgtatcactgtgtatggtaaggaattcttttcagcttttggtgccagctacagagttgagctggccatgtttcacagtatatcaagcattatagagaaagacagaaattttcttctttgtgtagctctcctaacgcactctttattttactacagaaattattttagagtttttgtatagacttctttggtagtctgtttctaaaatgaaatgtatttcaataagcagtgtaattttttcagtgtagctgaacctatgttgtaaaatagaaaaaaatttttataatcatcaaaatgtgattcttaaagatgcatataacttctataattcaaagctattcttacatccgtacaactcaaaaggtgcttcagagactagatgtatctgagagggtctccagaccaggttactgcaaaaatgaggttttgctttcaggatttggcgtaaatacttggtagttttgacatctctgcttaacactcaagagaggctccctaatgtgctcctgtcctccatgttctgcttggcttcgttagtgcattacatgaaatgatttgcaggggatggggccttttccagggaagtcacctaaagcttgcatgttttgaaaatttgaataaggctgtttgctgacaggaggaggaagtagtggagatcatttcatctcagtcacgtctgtttctcacttcccttaggaattgtgttgatgtttaacttttatgggatgacaaattgaaatcgctcattttgaggttgctttatttttctagaattgttataagaagctaaaatagtaaacttaaaatcacaaacatgacattgctgatagtggctgagaaattcagatgagaagacaaattggttatgaattttgaaatatctattatatgtaaaatgtggatatgttcacaaccttgagctattttaacacagtttaaatatagtgagggaaaactcctaagttttactgccctgtcctctgcaaattatgtaataccagcattcttaggcgataaagagagcagcacctctagtacctttaggcagattactttttcaagtttggggaacttcaaaagaccataatcaaccaggagcttattataggaaaggctgaacagaagggctagtgtattgattacacttaacagatcatatttatccagactcagtatagcttaaaattttgtatttctttatctgagagaactgagttcccaggctaaatcacttacctcccaccccctctccaattttttttttaagagacaaggtcttgctatgttgcccaggctagagtgcagtggctattcacaggtgcagttatagcacactacagcctccaactcttgggttcaagcaaccctgcctcagctaaccaagtagctgggactacaggtgcatgctaccatgcccagtccattttttaatcttgaaatttcttcatttttctttcttcggtttcttaaaatctttgcctgaatcagaacgctggcttttatttatttttttatttttaatattaaatgtgcagatatgcttcgagcacttttctaactaatgagctctgtggtaagaaaaaatgaactctttcaattgagattaagtccatatttttcaaacatcacgttctctattggctttttggtttagtgtttctaaattttctccttctgattttgcctgtcttatataatgagcataggaaaattttggaatgaggcagaaaagtatatcaagacatacttcctggttttggatgtaagttttaaagaatggtatttttaatatttgtacacattctttgagcacccaggtacccaagccaataaggaaagttaattccttgcatatgactgttatatctttagtggttgtctccctctccctccacagtctccttggcattccatgacaagtttgtcaacctacacttttatatagacatgtcattatttcatggtcaagcctgtagtattaaaatgatttttttaaaagatgtaaactgtgcttagttaattggttatattttgttctgtttttttttttttttttttttttttttgaggcagagtcttgttctgttgcctgggctggagtgcagtggcgtgatcttggctcactgcaacccccgccccccgggttcaagtgattctcctgcctcagcctcccgagtagctggaattacaggcatgcgccagcacgcccggctaagttttgtatttttggcagagatggggtttcaccatattggccaggctggtctcaaactcctgaccttgtgatccgcccacctcagcctccgaaagtgctgggattacaggcgtgagccaccacgtccaactgccttattttgttctgaataaatttacagtattgggcagcaattctggattctagacttgagaccacagaatcaaccatttcatgaggttgtactgtaattatacactggaatattcaggtagtcatctttgatttttcattcaagtaaatatagccataagaaaatatctgctatacaggaaaaccagtattaagcaaataccaccatccttaacagaaacaaaaatatatatatatattatttttaaaaattagcattgtcatacagtacaattcttagtgaagtgtattgtggaacaatttagaaacttcctttttttcccctagattaaggatactttccttgacttgagacttgtggtcttcaggaaaactactcagaatataatgactcctcatcagtatcatattgtatataaataatgaaatgcattaagaatattcacaacattgaacccaggaggcggagcttgcagtgagccgagattgcgccactgcgctccagcctgggcaacagagcgagactccatctcaaaaaaaaaaaaaaaaaagaatattcacaacattaatgcttctgaatagaagaactgcaggattaagccttaaacatatatgtgcaacacgtttaacatgcttaagactcaaactcagggttgaaaatttggttggggtcctctttgtaagataaaagttgcattatgtggtatgttctcttccatatatgctacagcaccccatgaattcttcaaaactttttacctacttgttatctgtttatgaaaaaaagaattatggagaagtttgagttctcagcccttatctgtacatgtctgttaaagacaacaaaggctgcatttaagcattatatagataacaaattgaggctgtctctcgttacttagttttactgtcttcaaaggcttgtatcattgctagggttaagacttatttgaggatgagttggcattgtattttttgtgtgtgtgggttggtttgtatttgtttcgtttttatttttctattttctctcatagatttatcagtaaaatataaactcttccttagccttaataaaggctgctgctttctcaaattgagtca

SEQ ID NO: 438675 - DNA, 2537 bp, Homo sapiens
agcggaggcgccgcggtctgcaggcccccgccgcagggatggaccgccgaggcggcggcggggcggcggaggcggaggcggccggccggtggtctggagccgaaccggcaatatctctgaggtgtgactgttctctcagcttcatcaaatataaagtggaaagagttttgttcatgaagccactgaatgaaccattgcttgccttaaaggaagataagatgctcccaagtcccttgcagctctcttcagaagaaaaatcactagtgctctgctcttgccataataccaaacctttttgactcatgctttggtgctgcaacactggaagaattgcacacagtttccaggaatatctttttttcatttgagtgattctttgtggatgagaaaagatttgagtcttaataattaccttgttttaaagctatttctttatagtctgaactgtttaataaattgggccacttaccaatgagccacacagccagttcttgtcaggagctggttgaaaactgtgctgtgcatgtagcaggaatggcacaagaagatagccgtcgtggtcaagtgccatcttccttttatcatggtgccaaccaagaacttgacctgtccaccaaagtgtacaaaagggaatcaggaagtccttattctgtgttagtggacaccaagatgagcaaaccgcatctccatgaaacagaagaacagccatatttcagggagacaagagcagtgtctgacgtgcatgctgttaaggaagaccgggagaattctgatgacacagaggaggaagaggaagaagtctcttacaaaagggagcagatcatagtggaggtaaaccttaataatcaaacattaaatgtatctaaaggggaaaagggtgtctcttctcagtccaaagagactcctgttcttaagacaagcagtgaggaggaagaggaagagagtgaggaagaggccacagatgacagcaatgactatggagagaatgaaaagcagaagaaaaaggagaagatagtagagaaagtcagcgttacacaaaggagaaccaggagagctgcctctgttgccgcagctaccacttcccctactcccagaactacaagaggtcgtaggaagagtgtagagccacctaagcgtaagaagcgggccacaaaggagcccaaagcaccagtccagaaagctaagtgtgaagagaaagagactctgacctgtgagaagtgccccagggtatttaacactcgctggtacctggagaagcacatgaacgttactcataggcgcatgcagatttgtgataaatgtggcaagaagtttgtcctggaaagtgagctgtcccttcaccagcaaacagactgtgaaaaaaacattcaggtaggtttcatcaccgagagggaaaacttttcaggatagaacctggctgttcagattcatctggtatccgcccaagagaataaatgcaatagaggctgaagggacagttttcaccaatttatcatttgaaaagctcctgctttggtcttttctaaaccaaggcttttatttcaaaagcattaaatttgacgctggactagtgggaacccaggcacactggaagggggatctgttatagttgattgaccaggaggttaaaatcaacaccaactttgcactgagattcactgttgtaggacgtgtaatagaattcattctggcatcttctctgtggaggtaggagttactgattaaaggttaggagtagagaaaggtccctttctgggtttacaaggatgccagattctagtacagctgatggggacaaaaaccataatgactcagaccggtggaaatggaagatcttcagcagtgagtttgcttttaccattggagagatgacaacactaaatttgccaagaggctgagcccatgggaatatgcaaactttaagcagaggctgagctggtcgaaaatgttgcccacctggcagtagggttacataatgccactgtacagtattgttaaggtaacaaaataacggtattcaaaccaggctgttgtcgtgaaaggactatattgtgataggttaaagaggtatgctaattatattatgtcaagtggattgcagttatattggtttgcacgtgtgaatgcatattaatgaatattcgtaagaggtaagtctattcatgtctccataagatatgtaacagaaatattttgtaccatatttaagctaaacttataaaggataaattgtgttggtttggtttgttttttggtgtgcttctaatattggtagtcactttttaagtttcacttttcttctgttgcttttaatcaacatctgagatcattgctctactttaaagagttttaaaaaatggaaattgcatttgctaaaaattcaccgcttttgattcaccaattgtgacttgatctccaacacgctgggtaaataaaagaagactgagtcatggagcccatatcctccggtaactgccagtgccctggcttgggtatgaattgtttgcagcacttcaggccaaagggagtgtggtgca

SEQ ID NO: 438676 - DNA, 1832 bp, Homo sapiens
cgaaaaggcggtgcttaaaccggaggaggcggaagtgagtcgacagacgaggcggctttcccggcagaatgctagcgcaggcgcaggggctcgagaggcctggacctgtggcgcatcctcagtgaggagggccgccctgcatccgtcgccggccccggtctccaggggcctcacccgagtcatgccccgctattgcgcagcgatttgttgtaagaaccgccggggacgaaacaataaagaccggaagctgagtttttatccatttcctctacatgacaaagaaagactggaaaagtggttaaagaatatgaagcgagattcatgggttcccagtaaataccagtttctatgtagtgaccattttactcctgactctcttgacatcagatggggtattcgatatttaaaacaaactgcagttccaacaatattttctttgcctgaagacaatcagggaaaagacccttctaaaaaaaaatcccagaagaaaaacttggaagatgagaaagaagtatgcccaaaagccaagtcagaagaatcatttgtattaaatgagacaaagaaaaatatagttaacacagatgtgccccatcaacatccagaattacttcattcatcttccttggtaaagccaccagctcccaaaacaggaagtatacaaaataacatgttaactcttaatctagttaaacaacatactgggaaaccagaatctaccttggaaacatcagttaaccaagatacaggtagaggtggttttcacacatgttttgagaatctaaattctacaactattactttgacaacttcaaattcagaaagtattcatcaatctttggaaactcaagaagttcttgaagtaactaccagtcatcttgctaatccaaactttacaagtaattccatggaaataaagtcagcacaggaaaatccattcttattcagcacaattaatcaaacagttgaagaattaaacacaaataaagaatctgttattgccatttttgtacctgctgaaaattctaaaccctcagttaattcttttatatctgcacaaaaagaaaccacggaaatggaagacacagacattgaagactccttgtataaggatgtagactatgggacagaagttttacaaatcgaacattcttactgcagacaagatataaataaggaacatctttggcagaaagtctctaagctacattcaaagataactcttctagagttaaaagagcaacaaactctaggtagattgaagtctttggaagctcttataaggcagctaaagcaggaaaactggctatctgaagaaaacgtcaagattatagaaaaccattttacaacatatgaagtcactatgatatagaataactaggttttaaaactatggctgttaaataagctttttccagccaaaccaaactacatgtaaagtgaactgtttcctgtataaagttctcatcttaatgaacctatgagagtgttgtaaagttatgaactgtatcctattcttgtaatacttatttaagaaaaaccagagagttgggctggagagaaaagcagttttattacttgataattttccaaattaaaatttagcacatagaaggattcagttataacatgagaaaacaaagaagtgttcaaagagcacagactagaagtcaggttcaggaatcagtcctggttctaccactggcatatgacttgggcaagttacttatgattgtgcctcagtccctaatttgtaaaataagcacttactggatttgtaattggttatttatagtcccttccctttttattaagataattctattagaacacat

SEQ ID NO: 438677 - DNA, 1921 bp, Homo sapiens
gccttggacctgtggcctttgggcttgggtgtctcctgtccgctctgccagtgagtcctcagctctccgtacgtggcccgtcgcccgcggcaagacggagggaaggcgctagttcagtttagctagcaatgcccttcttgcgcgaggactgctggctggtggcgaggcccaggagcctgtttgggtgttaacagttaaaacagtaaagtttgcgcgggcttctgtggttttcagtcttttccccacttcacgtgatctcatttcattgaacaacattaaccaccatttaagatacgtgaaacctgcgaagtggaaaggtgcacgcaaagttaatttacaccccccgcgagatttcctctacatgacaaagaaagactggaaaagtggttaaagaatatgaagcgagattcatgggttcccagtaaataccagtttctatgtagtgaccattttactcctgactctcttgacatcagatggggtattcgatatttaaaacaaactgcagttccaacaatattttctttgcctgaagacaatcagggaaaagacccttctaaaaaaaaatcccagaagaaaaacttggaagatgagaaagaagtatgcccaaaagccaagtcagaagaatcatttgtattaaatgagacaaagaaaaatatagttaacacagatgtgccccatcaacatccagaattacttcattcatcttccttggtaaagccaccagctcccaaaacaggaagtatacaaaataacatgttaactcttaatctagttaaacaacatactgggaaaccagaatctaccttggaaacatcagttaaccaagatacaggtagaggtggttttcacacatgttttgagaatctaaattctacaactattactttgacaacttcaaattcagaaagtattcatcaatctttggaaactcaagaagttcttgaagtaactaccagtcatcttgctaatccaaactttacaagtaattccatggaaataaagtcagcacaggaaaatccattcttattcagcacaattaatcaaacagttgaagaattaaacacaaataaagaatctgttattgccatttttgtacctgctgaaaattctaaaccctcagttaattcttttatatctgcacaaaaagaaaccacggaaatggaagacacagacattgaagactccttgtataaggatgtagactatgggacagaagttttacaaatcgaacattcttactgcagacaagatataaataaggaacatctttggcagaaagtctctaagctacattcaaagataactcttctagagttaaaagagcaacaaactctaggtagattgaagtctttggaagctcttataaggcagctaaagcaggaaaactggctatctgaagaaaacgtcaagattatagaaaaccattttacaacatatgaagtcactatgatatagaataactaggttttaaaactatggctgttaaataagctttttccagccaaaccaaactacatgtaaagtgaactgtttcctgtataaagttctcatcttaatgaacctatgagagtgttgtaaagttatgaactgtatcctattcttgtaatacttatttaagaaaaaccagagagttgggctggagagaaaagcagttttattacttgataattttccaaattaaaatttagcacatagaaggattcagttataacatgagaaaacaaagaagtgttcaaagagcacagactagaagtcaggttcaggaatcagtcctggttctaccactggcatatgacttgggcaagttacttatgattgtgcctcagtccctaatttgtaaaataagcacttactggatttgtaattggttatttatagtcccttccctttttattaagataattctattagaacacat

SEQ ID NO: 438678 - DNA, 904 bp, Homo sapiens
cgaaaaggcggtgcttaaaccggaggaggcggaagtgagtcgacagacgaggcggctttcccggcagaatgctagcgcaggcgcaggggctcgagaggcctggacctgtggcgcatcctcagtgaggagggccgccctgcatccgtcgccggccccggtctccaggggcctcacccgagtcatgccccgctattgcgcagcgatttgttgtaagaaccgccggggacgaaacaataaagaccggaagctgagtttttatccacctgaaggacttattcattaatgattcggctgctttccagtattttaattaatggaaaaaaaattgataaccccaccaggcgcggtggctcacgcctgtaatcccagcactttgggaggctgaggcgggcagatcacctgaggtcggcagtctgagaccagcctgaccaacatggagaaaccccgtctgtactaaaaatacaaaattagctgcgcgtggcggcgcatgcctgtgatctcagctgctcgggaggctgaggcaggtgaatcgcttgaacctgggaggtggaggttgagatttcctctacatgacaaagaaagactggaaaagtggttaaagaatatgaagcgagattcatgggttcccagtaaataccagtttctatgtagtgaccattttactcctgactctcttgacatcagatggggtattcgatatttaaaacaaactgcagttccaacaatattttctttgcctgaagacaatcagggaaagagaacctttctaacgcatacacaatccccaggaagcaaaacacttgggaaacatgcagcaacagaagtattgccacacaagcccaagctcagaagcaatcctctggtcttcacctgcagacaacggacaacaacttttacgtctccc

SEQ ID NO: 438679 - DNA, 581 bp, Homo sapiens
cgaaaaggcggtgcttaaaccggaggaggcggaagtgagtcgacagacgaggcggctttcccggcagaatgctagcgcaggcgcaggggctcgagaggcctggacctgtggcgcatcctcagtgaggagggccgccctgcatccgtcgccggccccggtctccaggggcctcacccgagtcatgccccgctattgcgcagcgatttgttgtaagaaccgccggggacgaaacaataaagaccggaagctgagtttttatccatacagctaaaacgtaaaaggaaggtgttgagaagggggacatacaccagaaacagactacagtagtgaagaataaggaagttaggtatgaaaataaagaggaaaagatgatttctctgagtcacaaatgaaaaagtgacagtacacttcagagaaatagactagatggatggatggatgatgcaggtaaatgaggctacttgaagatctatatataatatagcactgaaattgcttaccatagtcatttctttcctctctggatactagtaatgtaaaaaacttaacatattaaagtgttattaatttccatgatattt

SEQ ID NO: 438680 - DNA, 1526 bp, Homo sapiens
  misc_feature (1363)..(1363): n is a, c, g, or t
ttttttgagatggagtctcactctgtaacccaggctggagtgcagtggcctgatcttggctcactgcagcctctgcctcccgggttcaagtgattcttctgcctcagcttcccgagtagctgggattataggcacacaccaccacatccagcttatttttgtatttttagtagaaacggggtttcaccatgttggccgggctggcctcgaactcctgaccccaggtgatccacctaccttggcctcccaaagtgctgggattacaggcgtgagccaccgcgcctggccaagatagaacttttataattttattccagttgaactaaactaaggaaccacccattagcccagttcttaggagaggtacttcaaacttgaaagaatatgtatttcggtaacttatatgtggctaaccatcaaatacatagtcatctaagctaaactttctgtatttatacagttaaacttataaaccaaaaattttaatgaggttaattttaaatatattttagaaattacagttgtatctgtttcttagtaggtgtggcctttaaaatatgtgcttattcattgttaaattccagaataatagagtaatacttaatactgtacattcccacttacgtatattttattaaaatttataagcaagaaattatacataagtggtcatgatcttagggagacaaagaatttctcttagaaaagagaagtaatggtaatgtaaataaaaatactgtttatattcacatgattttaagaaaaactgtaaaagcaaagattttgtagtaatgacacaaatgtaacaaatagatgttttcttaaaattggcagtcagtataattatgtttctgcctatgatgttgaggaagttgtatcagtctgattcttagttttttcatctgttaagtagaacgtactattacttaccttaaagagtggctttgagaattttgtaaggaacaaacatgtttttggttctggaatataggaggtgctcaataaaagttgactctgactggcaaataatattgttttgtaaatgcatgatgattatttttgaccatatttgacttagtttcattaggctaatgttaattggtactatatgaaagtgagtcaactaattataaaagattagaaatgtcttaggtgacgatgggggaaaaacttaaaatttttgcataaattatggggagatgatagagttattacagtgttattaagtattcctatgttgcattttgcaaatacttaatttaatacagatgaaaataatcttgagtcacaataaagtaatgatatgttaagtttcaacagtgtacattgtagtaattttctgaaagttacaggttcctcaganaaaaatttaaactagctttatttctttaataaattatacagtaaaagttgactatctgaaaatcccaaccaataaaacaacaaaacacacacaaacaacactttttttccccccactgccctctcaaaactctcttcaaaacccactcacttggaccgcggcc

SEQ ID NO: 438681 - DNA, 1393 bp, Homo sapiens
  misc_feature (1230)..(1230): n is a, c, g, or t
aaacaattcatttagatctaacctggttcagattttcagcagttgttttgtgctcattttactttagacctgaaggacttattcattaatgattcggctgctttccagtattttaattaatggaaaaaaaattgataaccccaccgcgcctggccaagatagaacttttataattttattccagttgaactaaactaaggaaccacccattagcccagttcttaggagaggtacttcaaacttgaaagaatatgtatttcggtaacttatatgtggctaaccatcaaatacatagtcatctaagctaaactttctgtatttatacagttaaacttataaaccaaaaattttaatgaggttaattttaaatatattttagaaattacagttgtatctgtttcttagtaggtgtggcctttaaaatatgtgcttattcattgttaaattccagaataatagagtaatacttaatactgtacattcccacttacgtatattttattaaaatttataagcaagaaattatacataagtggtcatgatcttagggagacaaagaatttctcttagaaaagagaagtaatggtaatgtaaataaaaatactgtttatattcacatgattttaagaaaaactgtaaaagcaaagattttgtagtaatgacacaaatgtaacaaatagatgttttcttaaaattggcagtcagtataattatgtttctgcctatgatgttgaggaagttgtatcagtctgattcttagttttttcatctgttaagtagaacgtactattacttaccttaaagagtggctttgagaattttgtaaggaacaaacatgtttttggttctggaatataggaggtgctcaataaaagttgactctgactggcaaataatattgttttgtaaatgcatgatgattatttttgaccatatttgacttagtttcattaggctaatgttaattggtactatatgaaagtgagtcaactaattataaaagattagaaatgtcttaggtgacgatgggggaaaaacttaaaatttttgcataaattatggggagatgatagagttattacagtgttattaagtattcctatgttgcattttgcaaatacttaatttaatacagatgaaaataatcttgagtcacaataaagtaatgatatgttaagtttcaacagtgtacattgtagtaattttctgaaagttacaggttcctcaganaaaaatttaaactagctttatttctttaataaattatacagtaaaagttgactatctgaaaatcccaaccaataaaacaacaaaacacacacaaacaacactttttttccccccactgccctctcaaaactctcttcaaaacccactcacttggaccgcggcc

SEQ ID NO: 438682 - DNA, 617 bp, Homo sapiens
gaatgatctgaaatgtttctgccgtatattgaatgggattaatgctttttagaaaatactttaaggtatatatactctgagcttttttttaactaaataaatttgcttggccagtgtactactcaatattataattaaatagcactagcataataagccaataaaagtcatctttttcagaacatgaaaatattattttctagggaaaagacccttctaaaaaaaaatcccagaagaaaaacttggaagatgagaaagaagtatgcccaaaagccaagtcagaagaatcatttgtattaaatgagacaaagaaaaatatagttaacacagatgtgccccatcaacatccagaattacttcattcatcttccttggtaaagccaccagctcccaaaacaggaagtatacaaaataacatgttaactcttaatctagttaaacaacatactgggaaaccagaatctaccttggaaacatcagttaaccaagatacaggtagaggtggttttcacacatgttttgagaatctaaattctacaactattactttgacaacttcaaattcagaaagtattcatcaatctttggaaactcaagaagttcttgaagtaactacc

SEQ ID NO: 438683 - DNA, 1639 bp, Homo sapiens
cgaaaaggcggtgcttaaaccggaggaggcggaagtgagtcgacagacgaggcggctttcccggcagaatgctagcgcaggcgcaggggctcgagaggcctggacctgtggcgcatcctcagtgaggagggccgccctgcatccgtcgccggccccggtctccaggggcctcacccgagtcatgccccgctattgcgcagcgatttgttgtaagaaccgccggggacgaaacaataaagaccggaagctgagtttttatccggaaaagacccttctaaaaaaaaatcccagaagaaaaacttggaagatgagaaagaagtatgcccaaaagccaagtcagaagaatcatttgtattaaatgagacaaagaaaaatatagttaacacagatgtgccccatcaacatccagaattacttcattcatcttccttggtaaagccaccagctcccaaaacaggaagtatacaaaataacatgttaactcttaatctagttaaacaacatactgggaaaccagaatctaccttggaaacatcagttaaccaagatacaggtagaggtggttttcacacatgttttgagaatctaaattctacaactattactttgacaacttcaaattcagaaagtattcatcaatctttggaaactcaagaagttcttgaagtaactaccagtcatcttgctaatccaaactttacaagtaattccatggaaataaagtcagcacaggaaaatccattcttattcagcacaattaatcaaacagttgaagaattaaacacaaataaagaatctgttattgccatttttgtacctgctgaaaattctaaaccctcagttaattcttttatatctgcacaaaaagaaaccacggaaatggaagacacagacattgaagactccttgtataaggatgtagactatgggacagaagttttacaaatcgaacattcttactgcagacaagatataaataaggaacatctttggcagaaagtctctaagctacattcaaagataactcttctagagttaaaagagcaacaaactctaggtagattgaagtctttggaagctcttataaggcagctaaagcaggaaaactggctatctgaagaaaacgtcaagattatagaaaaccattttacaacatatgaagtcactatgatatagaataactaggttttaaaactatggctgttaaataagctttttccagccaaaccaaactacatgtaaagtgaactgtttcctgtataaagttctcatcttaatgaacctatgagagtgttgtaaagttatgaactgtatcctattcttgtaatacttatttaagaaaaaccagagagttgggctggagagaaaagcagttttattacttgataattttccaaattaaaatttagcacatagaaggattcagttataacatgagaaaacaaagaagtgttcaaagagcacagactagaagtcaggttcaggaatcagtcctggttctaccactggcatatgacttgggcaagttacttatgattgtgcctcagtccctaatttgtaaaataagcacttactggatttgtaattggttatttatagtcccttccctttttattaagataattctattagaacacat

SEQ ID NO: 438684 - DNA, 1710 bp, Homo sapiens
cgaaaaggcggtgcttaaaccggaggaggcggaagtgagtcgacagacgaggcggctttcccggcagaatgctagcgcaggcgcaggggctcgagaggcctggacctgtggcgcatcctcagtgaggagggccgccctgcatccgtcgccggccccggtctccaggggcctcacccgagtcatgccccgctattgcgcagcgatttgttgtaagaaccgccggggacgaaacaataaagaccggaagctgagtttttatccatttcctctacatgacaaagaaagactggaaaagtggttaaagaatatgaagcgagattcatgggttcccaggaaaagacccttctaaaaaaaaatcccagaagaaaaacttggaagatgagaaagaagtatgcccaaaagccaagtcagaagaatcatttgtattaaatgagacaaagaaaaatatagttaacacagatgtgccccatcaacatccagaattacttcattcatcttccttggtaaagccaccagctcccaaaacaggaagtatacaaaataacatgttaactcttaatctagttaaacaacatactgggaaaccagaatctaccttggaaacatcagttaaccaagatacaggtagaggtggttttcacacatgttttgagaatctaaattctacaactattactttgacaacttcaaattcagaaagtattcatcaatctttggaaactcaagaagttcttgaagtaactaccagtcatcttgctaatccaaactttacaagtaattccatggaaataaagtcagcacaggaaaatccattcttattcagcacaattaatcaaacagttgaagaattaaacacaaataaagaatctgttattgccatttttgtacctgctgaaaattctaaaccctcagttaattcttttatatctgcacaaaaagaaaccacggaaatggaagacacagacattgaagactccttgtataaggatgtagactatgggacagaagttttacaaatcgaacattcttactgcagacaagatataaataaggaacatctttggcagaaagtctctaagctacattcaaagataactcttctagagttaaaagagcaacaaactctaggtagattgaagtctttggaagctcttataaggcagctaaagcaggaaaactggctatctgaagaaaacgtcaagattatagaaaaccattttacaacatatgaagtcactatgatatagaataactaggttttaaaactatggctgttaaataagctttttccagccaaaccaaactacatgtaaagtgaactgtttcctgtataaagttctcatcttaatgaacctatgagagtgttgtaaagttatgaactgtatcctattcttgtaatacttatttaagaaaaaccagagagttgggctggagagaaaagcagttttattacttgataattttccaaattaaaatttagcacatagaaggattcagttataacatgagaaaacaaagaagtgttcaaagagcacagactagaagtcaggttcaggaatcagtcctggttctaccactggcatatgacttgggcaagttacttatgattgtgcctcagtccctaatttgtaaaataagcacttactggatttgtaattggttatttatagtcccttccctttttattaagataattctattagaacacat

SEQ ID NO: 438685 - DNA, 870 bp, Homo sapiens
catccgggtggccacagagcaacttcctctagagggagctgattggagccgggtgccgctggcacctctatgatcactggagtctcgcgggtccctcgggctgcacagggacaagtaaaggctacatccagatgccgggaatgcactgacgcccattcctggaaactgggctcccactcagcccctgggagcagcagccgccagcccctcgggacctccatctccaccctgctgagccacccgggttgggccaggatcccggcaggctgatcccgtcctccactgagacctgaaaaatggcttcggggcaaggcccaggtcctcccaggcaggagtgcggagagcctgccctgccctctgcttctgaggagcaggtagcccaggacacagaggaggttttccgcagctacgttttttaccgccatcagcaggaacaggaggctgaaggggtggctgcccctgccgacccagagatggtcaccttacctctgcaacctagcagcaccatggggcaggtgggacggcagctcgccatcatcggggacgacatcaaccgacgctatgactcagagttccagaccatgttgcagcacctgcagcccacggcagagaatgcctatgagtacttcaccaagattgccaccagcctgtttgagagtggcatcaattggggccgtgtggtggctcttctgggcttcggctaccgtctggccctacacgtctaccagcatggcctgactggcttcctaggccaggtgacccgcttcgtggtcgacttcatgctgcatcactgcattgcccggtggattgcacagaggggtggctgggtgagtatccaaggactgcaatgtcctccctgctgttggggct

SEQ ID NO: 438686 - DNA, 1120 bp, Homo sapiens
catccgggtggccacagagcaacttcctctagagggagctgattggagccgggtgccgctggcacctctatgatcactggagtctcgcgggtccctcgggctgcacagggacaagtaaaggctacatccagatgccgggaatgcactgacgcccattcctggaaactgggctcccactcagcccctgggagcagcagccgccagcccctcgggacctccatctccaccctgctgagccacccgggttgggccaggatcccggcaggctgatcccgtcctccactgagacctgaaaaatggcttcggggcaaggcccaggtcctcccaggcaggagtgcggagagcctgccctgccctctgcttctggcaggaacaggaggctgaaggggtggctgcccctgccgacccagagatggtcaccttacctctgcaacctagcagcaccatggggcaggtgggacggcagctcgccatcatcggggacgacatcaaccgacgctatgactcagagttccagaccatgttgcagcacctgcagcccacggcagagaatgcctatgagtacttcaccaagattgccaccagcctgtttgagagtggcatcaattggggccgtgtggtggctcttctgggcttcggctaccgtctggccctacacgtctaccagcatggcctgactggcttcctaggccaggtgacccgcttcgtggtcgacttcatgctgcatcactgcattgcccggtggattgcacagaggggtggctgggtggcagcctgaacttggggcaatggttccaattcctgaacgtgctggaggacatgggtgaagggacatgctggggccaggacgaggagccgacggattcgtcagaaatcatgaactcccaagagtggccctaaggggagaccaggagacagaaccccgtgcctggacttagcggacggagaaaggcctgacagctggtaccatggccagggggaccccctccaaagtccagaggctaaacggaagtgggcacacgcaatcgaagggcccctgtttgtgggcacatcacgctagcagggcaccgcagattgcgagcgaagatggaccacaccgcgccaggaagtgcaagtccca

SEQ ID NO: 438687 - DNA, 233 bp, Homo sapiens
gctatggccttaggaagagtgaatcccctataaggcatggggctgccagggttcggccctctctccctgactcccagctttgatcctcagaggagcaggtagcccaggacacagaggaggttttccgcagctacgttttttaccgccatcacagggatttatccccaccctcatagacaactctgccgccaagaagttggcccgaacacagtcacttaggtgctttcagatta

SEQ ID NO: 438688 - DNA, 2560 bp, Homo sapiens
catccgggtggccacagagcaacttcctctagagggagctgattggagccgggtgccgctggcacctctatgatcactggagtctcgcgggtccctcgggctgcacagggacaagtaaaggctacatccagatgccgggaatgcactgacgcccattcctggaaactgggctcccactcagcccctgggagcagcagccgccagcccctcgggacctccatctccaccctgctgagccacccgggttgggccaggatcccggcaggctgatcccgtcctccactgagacctgaaaaatggcttcggggcaaggcccaggtcctcccaggcaggagtgcggagagcctgccctgccctctgcttctgaggagcaggtagcccaggacacagaggaggttttccgcagctacgttttttaccgccatcagcaggaacaggaggctgaaggggtggctgcccctgccgacccagagatggtcaccttacctctgcaacctagcagcaccatggggcaggtgggacggcagctcgccatcatcggggacgacatcaaccgacgctatgactcagagttccagaccatgttgcagcacctgcagcccacggcagagaatgcctatgagtacttcaccaagattgccaccagcctgtttgagagtggcatcaattggggccgtgtggtggctcttctgggcttcggctaccgtctggccctacacgtctaccagcatggcctgactggcttcctaggccaggtgacccgcttcgtggtcgacttcatgctgcatcactgcattgcccggtggattgcacagaggggtggctgggtggcagccctgaacttgggcaatggtcccatcctgaacgtgctggtggttctgggtgtggttctgttgggccagtttgtggtacgaagattcttcaaatcatgactcccaagggtgccctttggggtcccggttcagacccctgcctggacttaagcgaagtctttgccttctctgctcccttgcaggggtcccccctcaagagtacagaagctttagcaagtgtgcactccagcttcggagggcccctgcgtgggggccagtcaggctgcagaggcacctcaacattgcatggtgctagtgggccctctctctgggcccaggggctgtggccgtctcctccctcagctctctgggacctccttagccctgtctgctaggcgctggggagactgataacttggggaggcaagagactgggagccacttctccccagaaagtgtttaacggttttagctttttataatacccttgtgagagcccattcccaccattctacctgaggccaggacgtctggggtgtggggattggtgggtctatgttccccaggattcagctattctggaagatcagcaccctaagagatgggactaggacctgagcctggtcctggccgtccctaagcatgtgtcccaggagcaggacctactaggagaggggggccaaggtcctgctcaactctacccctgctcccattcctccctccggccatactgcctttgcagttggactctcagggattctgggcttggggtgtggggtggggtggagtcgcagaccagagctgtctgaactcacgtgtcagaagcctccaagcctgcctcccaaggtcctctcagttctctcccttcctctctccttatagacacttgctcccaacccattcactacaggtgaaggctctcacccccatccctgggggccttgggtgagtggcctgctaaggctcctccttgcccagactacagggcttaggacttggtttgttatttcagggaaaaggagtagggagttcatctggagggttctaagtgggagaaggactatcaacaccactaggaatcccagaggtgggatcctccctcatggctctggcacagtgtaatccaggggtgtagatgggggaactgtgaatacttgaactctgttcccccaccctccatgctcctcacctgtctaggtctcctcagggtggggggtgacagtgccttctctattgggcacagcctagggtcttgggggtcaggggggagaagttcttgattcagccaaatgcagggaggggaggcagatggagcccataggccaccccctatcctctgagtgtttggaaataaactgtgcaatcccctcacccaaaaaaaaaaaaaaaaaaaaaaaaaaaaaaaaaaaaaaaaaaagggggggggggctataaattttccccgggggggccccatttatggcttccccttttttttggttccaaggggggcccttaaagggaggcgatggttaataatagagggaagcggcagggggggcgggggtttaacaaagctgtggggcggtggggaacaagtggttgtgtggaaactctggggaaggagacccctatctttcgtggggggcggactatttggggccactacccaagagaaatttaggcctaggggacatacaacgttcggtgtttcgtggttaccaacgggaatagtctgggttaaaaattgtcgggtgtttagaatttag

SEQ ID NO: 438689 - DNA, 2125 bp, Homo sapiens
catccgggtggccacagagcaacttcctctagagggagctgattggagccgggtgccgctggcacctctatgatcactggagtctcgcgggtccctcgggctgcacagggacaagtaaaggctacatccagatgccgggaatgcactgacgcccattcctggaaactgggctcccactcagcccctgggagcagcagccgccagcccctcgggacctccatctccaccctgctgagccacccgggttgggccaggatcccggcaggctgatcccgtcctccactgagacctgaaaaatggcttcggggcaaggcccaggtcctcccaggcaggagtgcggagagcctgccctgccctctgcttctggcaggaacaggaggctgaaggggtggctgcccctgccgacccagagatggtcaccttacctctgcaacctagcagcaccatggggcaggtgggacggcagctcgccatcatcggggacgacatcaaccgacgctatgactcagagttccagaccatgttgcagcacctgcagcccacggcagagaatgcctatgagtacttcaccaagattgccaccagcctgtttgagagtggcatcaattggggccgtgtggtggctcttctgggcttcggctaccgtctggccctacacgtctaccagcatggcctgactggcttcctaggccaggtgacccgcttcgtggtcgacttcatgctgcatcactgcattgcccggtggattgcacagaggggtggctgggtggcagccctgaacttgggcaatggtcccatcctgaacgtgctggtggttctgggtgtggttctgttgggccagtttgtggtacgaagattcttcaaatcatgactcccaagggtgccctttggggtcccggttcagacccctgcctggacttaagcgaagtctttgccttctctgctcccttgcaggggtcccccctcaagagtacagaagctttagcaagtgtgcactccagcttcggagggcccctgcgtgggggccagtcaggctgcagaggcacctcaacattgcatggtgctagtgggccctctctctgggcccaggggctgtggccgtctcctccctcagctctctgggacctccttagccctgtctgctaggcgctggggagactgataacttggggaggcaagagactgggagccacttctccccagaaagtgtttaacggttttagctttttataatacccttgtgagagcccattcccaccattctacctgaggccaggacgtctggggtgtggggattggtgggtctatgttccccaggattcagctattctggaagatcagcaccctaagagatgggactaggacctgagcctggtcctggccgtccctaagcatgtgtcccaggagcaggacctactaggagaggggggccaaggtcctgctcaactctacccctgctcccattcctccctccggccatactgcctttgcagttggactctcagggattctgggcttggggtgtggggtggggtggagtcgcagaccagagctgtctgaactcacgtgtcagaagcctccaagcctgcctcccaaggtcctctcagttctctcccttcctctctccttatagacacttgctcccaacccattcactacaggtgaaggctctcacccccatccctgggggccttgggtgagtggcctgctaaggctcctccttgcccagactacagggcttaggacttggtttgttatttcagggaaaaggagtagggagttcatctggagggttctaagtgggagaaggactatcaacaccactaggaatcccagaggtgggatcctccctcatggctctggcacagtgtaatccaggggtgtagatgggggaactgtgaatacttgaactctgttcccccaccctccatgctcctcacctgtctaggtctcctcagggtggggggtgacagtgccttctctattgggcacagcctagggtcttgggggtcaggggggagaagttcttgattcagccaaatgcagggaggggaggcagatggagcccataggccaccccctatcctctgagtgtttggaaataaactgtgcaatcccctcaccc

SEQ ID NO: 438690 - DNA, 526 bp, Homo sapiens
agctacgttttttaccgccatcagcaggaacaggaggctgaaggggtggctgcccctgccgacccagagatggtcaccttacctctgcaacctagcaggtgagctacaaccgctgggcccacaaggacatcttcagggaggcagtagctcgcatgggtctctgtgcaggtcctgggagctggggaggcctcgggggtcttgcccttctctcatggttgctcctcttttatgttgggctcccacccccatccaggaccttgtatcctttttagcccatgcctgccccttctcctggagcccagcactcatgtcttagaacactgtcagggacctccaagaagggatgcacagggccatggacagctcaggcagaacccctctgccatgagccagggcctggtcccgactgcctggttactggctcacctgcatgcctcctgctcctacagcaccatggggcaggtgggacggcagctcgccatcatcggggacgacatcaaccgacgctatgactcagagttccaga

SEQ ID NO: 438691 - DNA, 2186 bp, Homo sapiens
catccgggtggccacagagcaacttcctctagagggagctgattggagccgggtgccgctggcacctctatgatcactggagtctcgcgggtccctcgggctgcacagggacaagtaaaggctacatccagatgccgggaatgcactgacgcccattcctggaaactgggctcccactcagcccctgggagcagcagccgccagcccctcgggacctccatctccaccctgctgagccacccgggttgggccaggatcccggcaggctgatcccgtcctccactgagacctgaaaaatggcttcggggcaaggcccaggtcctcccaggcaggagtgcggagagcctgccctgccctctgcttctgaggagcaggtagcccaggacacagaggaggttttccgcagctacgttttttaccgccatcagcaggaacaggaggctgaaggggtggctgcccctgccgacccagagatggtcaccttacctctgcaacctagcagcaccatggggcaggtgggacggcagctcgccatcatcggggacgacatcaaccgacgctatgactcagagttccagaccatgttgcagcacctgcagcccacggcagagaatgcctatgagtacttcaccaagattgccaccagcctgtttgagagtggcatcaattggggccgtgtggtggctcttctgggcttcggctaccgtctggccctacacgtctaccagcatggcctgactggcttcctaggccaggtgacccgcttcgtggtcgacttcatgctgcatcactgcattgcccggtggattgcacagaggggtggctgggtggcagccctgaacttgggcaatggtcccatcctgaacgtgctggtggttctgggtgtggttctgttgggccagtttgtggtacgaagattcttcaaatcatgactcccaagggtgccctttggggtcccggttcagacccctgcctggacttaagcgaagtctttgccttctctgctcccttgcaggggtcccccctcaagagtacagaagctttagcaagtgtgcactccagcttcggagggcccctgcgtgggggccagtcaggctgcagaggcacctcaacattgcatggtgctagtgggccctctctctgggcccaggggctgtggccgtctcctccctcagctctctgggacctccttagccctgtctgctaggcgctggggagactgataacttggggaggcaagagactgggagccacttctccccagaaagtgtttaacggttttagctttttataatacccttgtgagagcccattcccaccattctacctgaggccaggacgtctggggtgtggggattggtgggtctatgttccccaggattcagctattctggaagatcagcaccctaagagatgggactaggacctgagcctggtcctggccgtccctaagcatgtgtcccaggagcaggacctactaggagaggggggccaaggtcctgctcaactctacccctgctcccattcctccctccggccatactgcctttgcagttggactctcagggattctgggcttggggtgtggggtggggtggagtcgcagaccagagctgtctgaactcacgtgtcagaagcctccaagcctgcctcccaaggtcctctcagttctctcccttcctctctccttatagacacttgctcccaacccattcactacaggtgaaggctctcacccccatccctgggggccttgggtgagtggcctgctaaggctcctccttgcccagactacagggcttaggacttggtttgttatttcagggaaaaggagtagggagttcatctggagggttctaagtgggagaaggactatcaacaccactaggaatcccagaggtgggatcctccctcatggctctggcacagtgtaatccaggggtgtagatgggggaactgtgaatacttgaactctgttcccccaccctccatgctcctcacctgtctaggtctcctcagggtggggggtgacagtgccttctctattgggcacagcctagggtcttgggggtcaggggggagaagttcttgattcagccaaatgcagggaggggaggcagatggagcccataggccaccccctatcctctgagtgtttggaaataaactgtgcaatcccctcaccc

SEQ ID NO: 438692 - DNA, 2579 bp, Homo sapiens
catccgggtggccacagagcaacttcctctagagggagctgattggagccgggtgccgctggcacctctatgatcactggagtctcgcgggtccctcgggctgcacagggacaagtaaaggctacatccagatgccgggaatgcactgacgcccattcctggaaactgggctcccactcagcccctgggagcagcagccgccagcccctcgggacctccatctccaccctgctgagccacccgggttgggccaggatcccggcaggctgatcccgtcctccactgagacctgaaaaatggcttcggggcaaggcccaggtcctcccaggcaggagtgcggagagcctgccctgccctctgcttctgaggagcaggtagcccaggacacagaggaggttttccgcagctacgttttttaccgccatcagcaggaacaggaggctgaaggggtggctgcccctgccgacccagagatggtcaccttacctctgcaacctagcagcaccatggggcaggtgggacggcagctcgccatcatcggggacgacatcaaccgacgctatgactcagagttccagaccatgttgcagcacctgcagcccacggcagagaatgcctatgagtacttcaccaagattgccaccagcctgtttgagagtggcatcaattggggccgtgtggtggctcttctgggcttcggctaccgtctggccctacacgtctaccagcatggcctgactggcttcctaggccaggtgacccgcttcgtggtcgacttcatgctgcatcactgcattgcccggtggattgcacagaggggtggctgggtggcagccctgaacttgggcaatggtcccatcctgaacgtgctggtggttctgggtgtggttctgttgggccagtttgtggtacgaagattcttcaaatcatgactcccaagggtgccctttggggtcccggttcagacccctgcctggacttaagcgaagtctttgccttctctgctcccttgcaggggtcccccctcaagagtacagaagctttagcaagtgtgcactccagcttcggagggcccctgcgtgggggccagtcaggctgcagaggcacctcaacattgcatggtgctagtgggccctctctctgggcccaggggctgtggccgtctcctccctcagctctctgggacctccttagccctgtctgctaggcgctggggagactgataacttggggaggcaagagactgggagccacttctccccagaaagtgtttaacggttttagctttttataatacccttgtgagagcccattcccaccattctacctgaggccaggacgtctggggtgtggggattggtgggtctatgttccccaggattcagctattctggaagatcagcaccctaagagatgggactaggacctgagcctggtcctggccgtccctaagcatgtgtcccaggagcaggacctactaggagaggggggccaaggtcctgctcaactctacccctgctcccattcctccctccggccatactgcctttgcagttggactctcagggattctgggcttggggtgtggggtggggtggagtcgcagaccagagctgtctgaactcacgtgtcagaagcctccaagcctgcctcccaaggtcctctcagttctctcccttcctctctccttatagacacttgctcccaacccattcactacaggtgaaggctctcacccccatccctgggggccttgggtgagtggcctgctaaggctcctccttgcccagactacagggcttaggacttggtttgttatttcagggaaaaggagtagggagttcatctggagggttctaagtgggagaaggactatcaacaccactaggaatcccagaggtgggatcctccctcatggctctggcacagtgtaatccaggggtgtagatgggggaactgtgaatacttgaactctgttcccccaccctccatgctcctcacctgtctaggtctcctcagggtggggggtgacagtgccttctctattgggcacagcctagggtcttgggggtcaggggggagaagttcttgattcagccaaatgcagggaggggaggcagatggagcccataggccaccccctatcctctgagtgtttggaaataaactgtgcaatcccctcacccaaaaaaaaaaaaaaaaaaaaaaaaaaaaaaaaaaaaaaaaaaaaaaaaaaaaaaaaaaaaaaaaaacaagaagaacaaaaaagaggagggggggggcggcgcagaagaatagacccccgcgggggcggcgcagccacggttcggcgggcagcgacggcggagtagtagagacgcaaggagagggcgcccccccatcataggggcacgactgatcaatacgaaggagcacagacagagacgagagcagacagaagaaaataccaacagagcgccggcgaaggggcgcagacgcacagtgggactgcagaagggacaacgtgctagacgggcgacacccaactacacgcggggggaggagagaaaaaaatgacgtggaaccgacagagcaacggg

SEQ ID NO: 438693 - DNA, 867 bp, Homo sapiens
catccgggtggccacagagcaacttcctctagagggagctgattggagccgggtgccgctggcacctctatgatcactggagtctcgcgggtccctcgggctgcacagggacaagtaaaggctacatccagatgccgggaatgcactgacgcccattcctggaaactgggctcccactcagcccctgggagcagcagccgccagcccctcgggacctccatctccaccctgctgagccacccgggttgggccaggatcccggcaggctgatcccgtcctccactgagacctgaaaaatggcttcggggcaaggcccaggtcctcccaggcaggagtgcggagagcctgccctgccctctgcttctggcaggaacaggaggctgaaggggtggctgcccctgccgacccagagatggtcaccttacctctgcaacctagcagcaccatggggcaggtgggacggcagctcgccatcatcggggacgacatcaaccgacgctatgactcagagttccagaccatgttgcagcacctgcagcccacggcagagaatgcctatgagtacttcaccaagattgccaccaggtaccccagccacctccctgccagctccagtcactcctctgtcatgtcacaaccataccataccctgcctgcatgatgctctcctggcatggggagaagccttctgtcagtgtccaatgtctgctgtgaactcacatgtggtctcggccccctatttttctctttcggggtcccagacttgtattttgggcattagctcacagctcttttgagctctgactccaaggtcttgactggttagatcaggactctagagggggcctgaggtggggacgtccccca

SEQ ID NO: 438694 - DNA, 6291 bp, Homo sapiens
gagacggagtcttgctctgtggccccggatggaatgcagtggcgtgatctcggctcactgcaagcaccgcctcccaggttcacgccattctcccacctcaacctctcaagtagctgggactacaggtgcctgccaccacgcccagctaattttttgtttttgtatttttagtagagacggggtttcaccatgttagccaggatggtctcaatctcctgacctcgtgatccacccgcctcggcctcccaaagtgctgggattacaggcgtgaccactgcgcccggcccagatttcaacttttattttatttcctttcatttattaaataatataaataatgacagatttattttaggtgttagcctatttttgcatgagagatttacagaggtggaaattctcatgcttaacttatgcaatgagacaatttctcaggaagcaagtttgacatgctttagtctctctcttcttttttttcctcccaaatatttgagttagcttaaattcttttttatggactgcccaaccagtgaattgatgcacttagacaacaagtaatctgcagcagaatattgcatccaatttgagacttgattccatattattgccttaaaggctattaaattgggtgacttttagtatccagctgttaaaaagaggaaagactgtttaatatcattccaaaatttttgtgaaatgtggcccaagatctaaagtttttaagggaattatttttaataaatatgatctgtccctttttgaaaaggatccatcccttttcataataaaaataattccctcctaccacccagttgcacatacttgcatctgttatgtattgaaggataatcccccccaaaaaaactatccaagagcagagatgtttatattttgaaacccatttgagtgttacagtattatatgactaaagctgaatcagtctgtggcctggtatttgttatcataaaggaagatgtacacctaaggtatcaagtggttaaaacagcaaagtacaagatgcatttttgtatttattctaacttttgaacattagtgtctttcagtataaataaatgtgaacaaatatacctcagtagtaatacaggagaactaaatatcctgctataacttaatacagatacatatttcaatatgacttaacaaacacacaattttgaaaaaaaaaaaaaaaaaagtgcagcaacttaaacacatttttctccccagaactaagattacacttaatttaatttaatgtgtttctgcgttatactagagttttgcaggaatttttctgaatagtacattcacatgatagatacggataaataccttatttactaaaatgttttgaaacatattttatagtccctcatttgatttgaaaaaatttgacaagatcttcacattgaaagtaaggacgagaatatttgcagatttccttcgttccaaaattattttattccaaagaaaaattgagttgccactatcaggaaaaaaaaaatgtatcacttctgttagaaggctatgaagtatatataaattatatgacaatttttatcatatagatttgatatcttctatgtattcgtatttttgcatcttgggtattaagcaaaataccatatgtataaatatgaaaccaggaatgtgcatattttagaaactaattgtgtatcttaagtgaatgttttgagtagttctgtcaccccattctaaatattttacctacaacatttaaattattctgatatcaatcagataaataatccgagtgtatttcatctttctacattgtctttgtggtttttgtttgtttgtttttgagacggtctcacactgtcacccaggctggagtgcagtggtgcaatctcagctcactgcaacctccacctcccaggttccagctatcctcccacctcagcctcccaagtagctaggactacaggtgtgcaccaccatgcccagctaattttttgtctttttgatgtagatggggttaccccatgttgcccaggctggttgtgaactcctgagctcaagggatccccccgcctcttgcctcccaaagtgcttggattacaggtgtgagccaccataccacctgtctttgaattttttaacgaggggaaagaaaactgcaattcctgcctccccatttatttaaacataacacctaggattttatttttggtaactacttagaataatatagtaggttacttatcttcggttagaaagaactatggaaaataggaaccaataatttggaagtattatttccttatttcatatatagaaataattatcttatttccttatttcatatatagaatattctagatacttggatggctggggttgatgttcttagtatttatcatagtttagcattggttgttatttttaagcatcagaatttgaaagccaatgataatacctgattaggactgaaaatagaattatcttagtagtttagcactttttataatggagttggagcactgaatttattttcaaattacctagaattctgcattgctcaaacattattcaattgattgcaaaatataccttggaaaccctttggatagaacagttcagagggttaccactagtacttagagcctaaagtcactcagtaggaggttctcaaaggtctatttgaaggcaatccaatttctttaaaataaaatattttttgccttttaaaacagatgggtgaagaaagggacgtataaattctgggaaacctcttatgttttcctcccatttccttctatgtctccattaatgtgctaacttgaaggaatttaacttcaaggaaagttgactgatgaagtttatgtagagctgtgaatattataatttgtcaatactttattgataatgttaactttgtttttatttggaaacattttttccagttgaccaaagcagaattcattctgttcttccctcaaattcatctattaggatcaatgtgattgacatttatctccactctgcatgtcactgatatggtatagacgctataagccctgtagatattatgggtatgaagactatttgaggtgaattggcagtgagagcaaattttggaaacaggagagagaactacttcgtgcctataaaaagctctctcactccttccccaagaaaacaggagtctgaattttggccagctgggtatttgaatcttactgactgttgcagcactggtagtcctggtaaattttttcagtgggcgagcttttctgaaatttgattaaacatattagtcaagggaatctgtgaatagatttagaagtagaatgtttgaggtggttgacaagacatttagaattgtgattaatgttttaataaaatgctaagttagaatgaataatcataattatatagatggaagatatattctaacagttcttaaataattttagattctctaaatttagagtgttttctagcttagagagcaatattaatattttttacctagtctactgaacataatttcagggagttagtatttaggactttttacctagagatgcggtaaaccttttaaatttaaatttgctttcttaaaatacctgttccaacattgctcacctttcttctccctcctttttgccctctccttcagtgggaggagcacatattcagctttctgttaaacactctttggttttcaactgagtaaggcaagcaaggatatatgttagaagagtgggcataatactttatattaaaattatagggactaaaagtctaaatcattgctgtcaataggactttttttgatgatggaaataatttatgtctgtgctgttcaatatggtagccactcgcagaggtgactactgagcatttcacgtgtggcttgtgatacagaggaactaaatttttaattttacttaattactttaaattttaaaagttacacgtggctagtgggtctatcccaactatgaagagaataaagctacagagcatctatctagtctaatgaaacaacagtgaatttgggaattgtaaatctgtcttaagctttttccataaacttttattgatataatttaggcatatacaaatactggtgaaattttattgattgaattattgttgacttttttttcagtatttatatttttaaaaagatatgtttctttataattaacttgtattgtagggtaaccattgtccttaaatgttaagccacttagttaataacaaatagcatttggttttttagcattatttatcatctgaggctttcagaattaatgcaccaaaccttaaatatttttgttgttctctaaaagaatgggtttatgatgcaccaaaaggacattttgagaactgccggagcaacagataccaccatgtaaggagtgaattcccatgtttttcacttatatctagaggcctacttatttaggaggtttcctaagtaagtgtatttagttgtaggaccttagagttgcctaggtccattctattctagcatatactcaacatactgccagagcaaatgtaggttgcagattcaggcaaaacacacacacacacacacacaaaaccctgaagagcacaatgagcattattagcacagccaatttaaaatgatgaggtgttaaccacatttgtataaataatagtttctctaaccctgaatcattatcctgcatttttaatgcaatcggttcataaacatcaaagtgaaaacaccaaatttgtaagaggtcaggaccaactggggctctaaatggagagacagctgagagctgtgtccctatgcgtgggtggccttgcagctgttgattcaccctcaggctaccagacagttgcctctttgcatttgcagaaccagacttcaatcttaggtaaaaatgtatccctcccatggacaggacataaacaatagattgacatcagctctgaaaacagtgcagcagccagactcagcagttgccctgaaatactgagaagtaccaagcataacatcaagactgtttctacacaataatatttgtctttgtacagcaacactgggttctcttaagtatattataaatataaaagctcaaagtccaaaaggttcaatgtgatgatatccttctctacaaatgccaggaacaccagggtagattgcatgagacatgactgccgtatcttggtccttactaggattcccaaatatactccttaataaccagtaaagttatatttacactggacattttaagaaataccagtgttcgttgttagatgagagacagcataattttggaatcacaactgagttcagagttcagttttgagtcctactagttttgtttccttgtgtaagtttcttaacctttgtaaggctagcatgtaaatcagatacaataatatatagttcagggtgtaaagattggattaatgtatgcagtgtctatctagcacagtgcctgttatgtagtagcgtgtcaagagatgttctctcttatgcatttggaggattaggtgctgcacctataggtttccattcatttctcatctatgtaattctgagtcttccttttctagatagaattccccccaacaaaaatttaaagtctaacaggtggtaggtgcttattgaggcccagcaattctacttctggaaaccttcctcaggaaaagattctgatgacagaaaatgctgtgtgaacagtattatatagaattgtttttaatagcaagaaattttttaaaacttacaagttcagtgatatgaggacatttacataaactatcgaaccaccagtcttctgtcaattccttttaaaatgatggttgtgaagactgatgaaaacacagtgtcaatgatatgttaactgaaaaagtaagattaaaaacattatggatagtataagtttcttaaatgccaacaatgcatgaggtgaatagaataagacttttttttaaagaatgtaatttttgacagtctgaaaagacaggccttatatttatattgagaaaaatgatcctgacatttaatgagacactaaaacagtttttattttttgcttacttattctgttctagaatccaaactctacatactgtttaatagagcattattgatattagctgtattagatgactgtatgaagagtcctgtttgctagaatcctactttatcttttaagttttgctaattaccctgcaatgaatgttgaacataaaaaatttgactccctttccatgtgtccactgtttccttgtgccttttgattaataaaactttatttttaagtgaga

SEQ ID NO: 438695 - DNA, 863 bp, Homo sapiens
  misc_feature (1)..(1): n is a, c, g, or t
ntttgatatgacgattagagcataacccgagtgacacgttgaattcgccataatcaaggaaaccttttccgggtggggatctctgaaattactcagataacagtgctgtgccaaaaacctgtggattttctctacaaaaattattgagcaaccctaattaacctgattttttgctgataatcactctcaatggaatcaaatcacaaatccggggatggattgagcggcactcagaaggaagcagccctccgcgcactggtccagcgcacaggatatagcttggtccaggaaaatggacaaagaaaatatggtggccctccacctggttgggatgctgcaccccctgaaaggggctgtgaaatttttattggaaaacttccccgagacctttttgaggatgagcttataccattatgtgaaaaaatcggtaaaatttatgaaatgagaatgatgatggattttaatggcaacaatagaggatatgcatttgtaacattttcaaataaagtggaagccaagaatgcaatcaagcaacttaataattatgaaattagaaatgggcgcctcttaggggtttgtgccagtgtggacaactgccgattatttgttgggggcatcccaaaaaccaaaaagagagaagaagaaggaaagaaggagaaaaaggaagaaaaacaggaagaagaaagtagaaacgcggcaacgacaagaaacaagacacgctatacgcaaggacagaagcaagcaaagaacggacacgaggacagaccaacgcaacgcagcgcacgacgacacggaacgaaaggaccgaaaagaaacaacggagcaagaaaagaagaactaagaaggagaagacggacctcaga

SEQ ID NO: 438696 - DNA, 2065 bp, Homo sapiens
  misc_feature (1)..(1): n is a, c, g, or t
ntttgatatgacgattagagcataacccgagtgacacgttgaattcgccataatcaaggaaaccttttccgggtggggatctctgaaattactcagtgagcaaccctaattaacctgattttttgctgataatcactctcaatggaatcaaatcacaaatccggggatggattgagcggcactcagaaggaagcagccctccgcgcactggtccagcgcacaggatatagcttggtccaggaaaatggacaaagaaaatatggtggccctccacctggttgggatgctgcaccccctgaaaggggctgtgaaatttttattggaaaacttccccgagacctttttgaggatgagcttataccattatgtgaaaaaatcggtaaaatttatgaaatgagaatgatgatggattttaatggcaacaatagaggatatgcatttgtaacattttcaaataaagtggaagccaagaatgcaatcaagcaacttaataattatgaaattagaaatgggcgcctcttaggggtttgtgccagtgtggacaactgccgattatttgttgggggcatcccaaaaaccaaaaagagagaagaaatcttatcggagatgaaaaaggttactgaaggtgttgtcgatgtcatcgtctacccaagcgctgcagataaaaccaaaaaccgaggctttgccttcgtggagtatgagagtcatcgagcagctgccatggcgaggaggaaactgctaccaggaagaattcagttatggggacatggtattgcagtagactgggcagagccagaagtagaagttgatgaagatacaatgtcttcagtgaaaatcctatatgtaagaaatcttatgctgtctacctctgaagagatgattgaaaaggaattcaacaatatcaaaccaggtgctgtggagagggtgaagaaaattcgagactatgcttttgtgcacttcagtaaccgagaagatgcagttgaggctatgaaagctttaaatggcaaggtgctggatggttcccccattgaagtcaccctagcaaaaccagtggacaaggacagttatgttaggtatacccgaggcacaggtggaaggggcaccatgctgcaaggagagtatacctactctttgggccaagtttatgatcccaccacaacctaccttggagctcctgtcttctatgccccccagacctatgcagcaattcccagtcttcatttcccagccaccaaaggacatctcagcaacagagccattatccgagccccttctgttagaggggctgcgggagtgagaggactgggcggccgtggctatttggcatacacaggcctgggtcgaggataccaggtcaaaggagacaaaagagaagacaaactctatgacattttacctgggatggagctcaccccaatgaatcctgtcacattaaaaccccaaggaattaaactcgctccccagatattagaagagatttgtcagaaaaataactggggacagccagtgtaccagctgcactctgctattggacaagaccaaagacagctattcttgtacaaaataactattcctgctctagccagccagaatcctgcaatccaccctttcacacctccaaagctgagtgcctttgtggatgaagcaaagacgtatgcagccgaatacaccctgcagaccctgggcatccccactgatggaggcgatggcaccatggctactgctgctgctgctgctactgctttcccaggatatgctgtccctaatgcaactgcacccgtgtctgcagcccagctcaagcaagcggtaacccttggacaagacttagcagcatatacaacctatgaggtctacccaacttttgcagtgactgcccgaggggatggatatggcaccttctgaagatgcttttttaaatttaagaataagacacacaaaactctattaaaaaaaaaaaagaaataaacctctaactcggtccccaatgatcataaataatatgtttcctaaagaaatgcctttccagagactgtatagcttataccaattatagaatcatgaagta

SEQ ID NO: 438697 - DNA, 2206 bp, Homo sapiens
  misc_feature (1)..(1): n is a, c, g, or t
ntttgatatgacgattagagcataacccgagtgacacgttgaattcgccataatcaaggaaaccttttccgggtggggatctctgaaattactcagataacagtgctgtgccaaaaacctgtggattttctctacaaaaattatcatgactgttatctttttgatggaaaagatgaagttcagcgaagaacaaatctacaacttggccagaagactgtagactttgccttcaaagagtgagcaaccctaattaacctgattttttgctgataatcactctcaatggaatcaaatcacaaatccggggatggattgagcggcactcagaaggaagcagccctccgcgcactggtccagcgcacaggatatagcttggtccaggaaaatggacaaagaaaatatggtggccctccacctggttgggatgctgcaccccctgaaaggggctgtgaaatttttattggaaaacttccccgagacctttttgaggatgagcttataccattatgtgaaaaaatcggtaaaatttatgaaatgagaatgatgatggattttaatggcaacaatagaggatatgcatttgtaacattttcaaataaagtggaagccaagaatgcaatcaagcaacttaataattatgaaattagaaatgggcgcctcttaggggtttgtgccagtgtggacaactgccgattatttgttgggggcatcccaaaaaccaaaaagagagaagaaatcttatcggagatgaaaaaggttactgaaggtgttgtcgatgtcatcgtctacccaagcgctgcagataaaaccaaaaaccgaggctttgccttcgtggagtatgagagtcatcgagcagctgccatggcgaggaggaaactgctaccaggaagaattcagttatggggacatggtattgcagtagactgggcagagccagaagtagaagttgatgaagatacaatgtcttcagtgaaaatcctatatgtaagaaatcttatgctgtctacctctgaagagatgattgaaaaggaattcaacaatatcaaaccaggtgctgtggagagggtgaagaaaattcgagactatgcttttgtgcacttcagtaaccgagaagatgcagttgaggctatgaaagctttaaatggcaaggtgctggatggttcccccattgaagtcaccctagcaaaaccagtggacaaggacagttatgttaggtatacccgaggcacaggtggaaggggcaccatgctgcaaggagagtatacctactctttgggccaagtttatgatcccaccacaacctaccttggagctcctgtcttctatgccccccagacctatgcagcaattcccagtcttcatttcccagccaccaaaggacatctcagcaacagagccattatccgagccccttctgttagaggggctgcgggagtgagaggactgggcggccgtggctatttggcatacacaggcctgggtcgaggataccaggtcaaaggagacaaaagagaagacaaactctatgacattttacctgggatggagctcaccccaatgaatcctgtcacattaaaaccccaaggaattaaactcgctccccagatattagaagagatttgtcagaaaaataactggggacagccagtgtaccagctgcactctgctattggacaagaccaaagacagctattcttgtacaaaataactattcctgctctagccagccagaatcctgcaatccaccctttcacacctccaaagctgagtgcctttgtggatgaagcaaagacgtatgcagccgaatacaccctgcagaccctgggcatccccactgatggaggcgatggcaccatggctactgctgctgctgctgctactgctttcccaggatatgctgtccctaatgcaactgcacccgtgtctgcagcccagctcaagcaagcggtaacccttggacaagacttagcagcatatacaacctatgaggtctacccaacttttgcagtgactgcccgaggggatggatatggcaccttctgaagatgcttttttaaatttaagaataagacacacaaaactctattaaaaaaaaaaaagaaataaacctctaactcggtccccaatgatcataaataatatgtttcctaaagaaatgcctttccagagactgtatagcttataccaattatagaatcatgaagta

SEQ ID NO: 438698 - DNA, 2005 bp, Homo sapiens
  misc_feature (1)..(1): n is a, c, g, or t
ntttgatatgacgattagagcataacccgagtgacacgttgaattcgccataatcaaggaaaccttttccgggtggggatctctgaaattactcagtgagcaaccctaattaacctgattttttgctgataatcactctcaatggaatcaaatcacaaatccggggatggattgagcggcactcagaaggaagcagccctccgcgcactggtccagcgcacaggatatagcttggtccaggaaaatggacaaagaaaatatggtggccctccacctggttgggatgctgcaccccctgaaaggggctgtgaaatttttattggaaaacttccccgagacctttttgaggatgagcttataccattatgtgaaaaaatcggtaaaatttatgaaatgagaatgatgatggattttaatggcaacaatagaggatatgcatttgtaacattttcaaataaagtggaagccaagaatgcaatcaagcaacttaataattatgaaattagaaatgggcgcctcttaggggtttgtgccagtgtggacaactgccgattatttgttgggggcatcccaaaaaccaaaaagagagaagaaatcttatcggagatgaaaaagcgaggctttgccttcgtggagtatgagagtcatcgagcagctgccatggcgaggaggaaactgctaccaggaagaattcagttatggggacatggtattgcagtagactgggcagagccagaagtagaagttgatgaagatacaatgtcttcagtgaaaatcctatatgtaagaaatcttatgctgtctacctctgaagagatgattgaaaaggaattcaacaatatcaaaccaggtgctgtggagagggtgaagaaaattcgagactatgcttttgtgcacttcagtaaccgagaagatgcagttgaggctatgaaagctttaaatggcaaggtgctggatggttcccccattgaagtcaccctagcaaaaccagtggacaaggacagttatgttaggtatacccgaggcacaggtggaaggggcaccatgctgcaaggagagtatacctactctttgggccaagtttatgatcccaccacaacctaccttggagctcctgtcttctatgccccccagacctatgcagcaattcccagtcttcatttcccagccaccaaaggacatctcagcaacagagccattatccgagccccttctgttagaggggctgcgggagtgagaggactgggcggccgtggctatttggcatacacaggcctgggtcgaggataccaggtcaaaggagacaaaagagaagacaaactctatgacattttacctgggatggagctcaccccaatgaatcctgtcacattaaaaccccaaggaattaaactcgctccccagatattagaagagatttgtcagaaaaataactggggacagccagtgtaccagctgcactctgctattggacaagaccaaagacagctattcttgtacaaaataactattcctgctctagccagccagaatcctgcaatccaccctttcacacctccaaagctgagtgcctttgtggatgaagcaaagacgtatgcagccgaatacaccctgcagaccctgggcatccccactgatggaggcgatggcaccatggctactgctgctgctgctgctactgctttcccaggatatgctgtccctaatgcaactgcacccgtgtctgcagcccagctcaagcaagcggtaacccttggacaagacttagcagcatatacaacctatgaggtctacccaacttttgcagtgactgcccgaggggatggatatggcaccttctgaagatgcttttttaaatttaagaataagacacacaaaactctattaaaaaaaaaaaagaaataaacctctaactcggtccccaatgatcataaataatatgtttcctaaagaaatgcctttccagagactgtatagcttataccaattatagaatcatgaagta

SEQ ID NO: 438699 - DNA, 1969 bp, Homo sapiens
  misc_feature (1)..(1): n is a, c, g, or t
ntttgatatgacgattagagcataacccgagtgacacgttgaattcgccataatcaaggaaaccttttccgggtggggatctctgaaattactcagataacagtgctgtgccaaaaacctgtggattttctctacaaaaattatgaaaatggacaaagaaaatatggtggccctccacctggttgggatgctgcaccccctgaaaggggctgtgaaatttttattggaaaacttccccgagacctttttgaggatgagcttataccattatgtgaaaaaatcggtaaaatttatgaaatgagaatgatgatggattttaatggcaacaatagaggatatgcatttgtaacattttcaaataaagtggaagccaagaatgcaatcaagcaacttaataattatgaaattagaaatgggcgcctcttaggggtttgtgccagtgtggacaactgccgattatttgttgggggcatcccaaaaaccaaaaagagagaagaaatcttatcggagatgaaaaaggttactgaaggtgttgtcgatgtcatcgtctacccaagcgctgcagataaaaccaaaaaccgaggctttgccttcgtggagtatgagagtcatcgagcagctgccatggcgaggaggaaactgctaccaggaagaattcagttatggggacatggtattgcagtagactgggcagagccagaagtagaagttgatgaagatacaatgtcttcagtgaaaatcctatatgtaagaaatcttatgctgtctacctctgaagagatgattgaaaaggaattcaacaatatcaaaccaggtgctgtggagagggtgaagaaaattcgagactatgcttttgtgcacttcagtaaccgagaagatgcagttgaggctatgaaagctttaaatggcaaggtgctggatggttcccccattgaagtcaccctagcaaaaccagtggacaaggacagttatgttaggtatacccgaggcacaggtggaaggggcaccatgctgcaaggagagtatacctactctttgggccaagtttatgatcccaccacaacctaccttggagctcctgtcttctatgccccccagacctatgcagcaattcccagtcttcatttcccagccaccaaaggacatctcagcaacagagccattatccgagccccttctgttagaggggctgcgggagtgagaggactgggcggccgtggctatttggcatacacaggcctgggtcgaggataccaggtcaaaggagacaaaagagaagacaaactctatgacattttacctgggatggagctcaccccaatgaatcctgtcacattaaaaccccaaggaattaaactcgctccccagatattagaagagatttgtcagaaaaataactggggacagccagtgtaccagctgcactctgctattggacaagaccaaagacagctattcttgtacaaaataactattcctgctctagccagccagaatcctgcaatccaccctttcacacctccaaagctgagtgcctttgtggatgaagcaaagacgtatgcagccgaatacaccctgcagaccctgggcatccccactgatggaggcgatggcaccatggctactgctgctgctgctgctactgctttcccaggatatgctgtccctaatgcaactgcacccgtgtctgcagcccagctcaagcaagcggtaacccttggacaagacttagcagcatatacaacctatgaggtctacccaacttttgcagtgactgcccgaggggatggatatggcaccttctgaagatgcttttttaaatttaagaataagacacacaaaactctattaaaaaaaaaaaagaaataaacctctaactcggtccccaatgatcataaataatatgtttcctaaagaaatgcctttccagagactgtatagcttataccaattatagaatcatgaagta

SEQ ID NO: 438700 - DNA, 762 bp, Homo sapiens
gctgcatgtccagactattttaacgacaggaaagagctatagtatgattacgagatcatgggctgatagtatagaatgtgcgcaaagagttgttatccatcacttgatgttctagatcaatttgtaaatatttctacatgcaacctatatttagaagctttaatagcaaacagaatgaaaaacacccactcaaaataccaccatccagtcatcttacatagctgatagtgccttaagttttcacctgactcagttgtaccagtttaaaaatgcctaccctgacagacttgctttccagccaccctttcacacctccaaagctgagtgcctttgtggatgaagcaaagacgtatgcagccgaatacaccctgcagaccctgggcatccccactgatggaggcgatggcaccatggctactgctgctgctgctgctactgctttcccaggatatgctgtccctaatgcaactgcacccgtgtctgcagcccagctcaagcaagcggtaacccttggacaagacttagcagcatatacaacctatgaggtctacccaacttttgcagtgactgcccgaggggatggatatggcaccttctgaagatgcttttttaaatttaagaataagacacacaaaactctattaaaaaaaaaaaagaaataaacctctaactcggtccccaatgatcataaataatatgtttcctaaagaaatgcctttccagagactgtatagcttataccaattatagaatcatgaagta

SEQ ID NO: 438701 - DNA, 376 bp, Homo sapiens
ttttttaatagagttttgtgtgtcttattcttaaatttaaaaaagcatcttcagaaggtgcgatatgctgtccctaatgcaactgcacccgtgtctgcagcccagctcaagcaagcggtaacccttggacaagacttagcagcatatacaacctatgaggtctacccaacttttgcagtgactgcccgaggggatggatatggcaccttctgaagatgcttttttaaatttaagaataagacacacaaaactctattaaaaaaaaaaaagaaataaacctctaactcggtccccaatgatcataaataatatgtttcctaaagaaatgcctttccagagactgtatagcttataccaattatagaatcatgaagta

SEQ ID NO: 438702 - DNA, 748 bp, Homo sapiens
aatcaatgcataaagtcattaggtaattaacagaatagatgtcaattggacatggaattgaagatacactgatttttaaaattacaatatcctcttaaggctccaattgactaactcacaaaacatcctatgaacattttcctccattaaacatgatatcaaagtcagccttccttttacaagcaccctcacacccctacaggactactgcaatcacctagtcaaccctcctactccttcatagatgaaataattaaagtcagaatagatttagtgccttgccaagtccctcagcttgtcagaaattaaaattcacaagagtgttgtaaggagaagaatgattatacaaaattccttacatgcctcaaacccggtgcattggatgggattatgtttggcatatgttgaactaggaaaagatagaagagcaattacccaaaccaaatgttctttattatgtctttatctgcacatgggaagttttgcataacttaatcagatctagcggccataataatagttaattcaaaaaggcaaattgtaagtaaacaaaaaagttagatgggcctattgaataaattacacattctttaaggataaaagctccaaacggattaaggaatgactaaagctgtcacctaattacttcttgaaaggaatttagaggttcctatagatggaagcagtgtgtctgggcacatgcccagagccagaagcgagcatgagcacagcaattcctggcctcaaa

SEQ ID NO: 438703 - DNA, 450 bp, Homo sapiens
taagtataaagtgattctgacacaggtggttgaccccactttagggaacattgtcctaggactgtttaaatatcattgaaaatcactgagtccacatattgtgtccttaaggacactttttaaaacatatatattaacttttagctttaagcaatatgttaaatgttcgtatttctaaaagaagacaaataagccaaaagggagcaaatgtgaattcctttcatcaagttttctctgcctcttcctccaggatatgctgtccctaatgcaactgcacccgtgtctgcagcccagctcaagcaagcggtaacccttggacaagacttagcagcatatacaacctatgaggtctacccaacttttgcagtgactgcccgaggggatggatatggcaccttctgaagatgcttttttaaatttaagaataagacacacaaaactctattaaaa

SEQ ID NO: 438704 - DNA, 2113 bp, Homo sapiens
  misc_feature (1)..(1): n is a, c, g, or t
ntttgatatgacgattagagcataacccgagtgacacgttgaattcgccataatcaaggaaaccttttccgggtggggatctctgaaattactcagataacagtgctgtgccaaaaacctgtggattttctctacaaaaattattgagcaaccctaattaacctgattttttgctgataatcactctcaatggaatcaaatcacaaatccggggatggattgagcggcactcagaaggaagcagccctccgcgcactggtccagcgcacaggatatagcttggtccaggaaaatggacaaagaaaatatggtggccctccacctggttgggatgctgcaccccctgaaaggggctgtgaaatttttattggaaaacttccccgagacctttttgaggatgagcttataccattatgtgaaaaaatcggtaaaatttatgaaatgagaatgatgatggattttaatggcaacaatagaggatatgcatttgtaacattttcaaataaagtggaagccaagaatgcaatcaagcaacttaataattatgaaattagaaatgggcgcctcttaggggtttgtgccagtgtggacaactgccgattatttgttgggggcatcccaaaaaccaaaaagagagaagaaatcttatcggagatgaaaaaggttactgaaggtgttgtcgatgtcatcgtctacccaagcgctgcagataaaaccaaaaaccgaggctttgccttcgtggagtatgagagtcatcgagcagctgccatggcgaggaggaaactgctaccaggaagaattcagttatggggacatggtattgcagtagactgggcagagccagaagtagaagttgatgaagatacaatgtcttcagtgaaaatcctatatgtaagaaatcttatgctgtctacctctgaagagatgattgaaaaggaattcaacaatatcaaaccaggtgctgtggagagggtgaagaaaattcgagactatgcttttgtgcacttcagtaaccgagaagatgcagttgaggctatgaaagctttaaatggcaaggtgctggatggttcccccattgaagtcaccctagcaaaaccagtggacaaggacagttatgttaggtatacccgaggcacaggtggaaggggcaccatgctgcaaggagagtatacctactctttgggccaagtttatgatcccaccacaacctaccttggagctcctgtcttctatgccccccagacctatgcagcaattcccagtcttcatttcccagccaccaaaggacatctcagcaacagagccattatccgagccccttctgttagaggggctgcgggagtgagaggactgggcggccgtggctatttggcatacacaggcctgggtcgaggataccaggtcaaaggagacaaaagagaagacaaactctatgacattttacctgggatggagctcaccccaatgaatcctgtcacattaaaaccccaaggaattaaactcgctccccagatattagaagagatttgtcagaaaaataactggggacagccagtgtaccagctgcactctgctattggacaagaccaaagacagctattcttgtacaaaataactattcctgctctagccagccagaatcctgcaatccaccctttcacacctccaaagctgagtgcctttgtggatgaagcaaagacgtatgcagccgaatacaccctgcagaccctgggcatccccactgatggaggcgatggcaccatggctactgctgctgctgctgctactgctttcccaggatatgctgtccctaatgcaactgcacccgtgtctgcagcccagctcaagcaagcggtaacccttggacaagacttagcagcatatacaacctatgaggtctacccaacttttgcagtgactgcccgaggggatggatatggcaccttctgaagatgcttttttaaatttaagaataagacacacaaaactctattaaaaaaaaaaaagaaataaacctctaactcggtccccaatgatcataaataatatgtttcctaaagaaatgcctttccagagactgtatagcttataccaattatagaatcatgaagta

SEQ ID NO: 438705 - DNA, 2208 bp, Homo sapiens
  misc_feature (1)..(1): n is a, c, g, or t
ntttgatatgacgattagagcataacccgagtgacacgttgaattcgccataatcaaggaaaccttttccgggtggggatctctgaaattactcagtgagcaaccctaattaacctgattttttgctgataatcactctcaatggaatcaaatcacaaatccggggatggattgagcggcactcagaaggaagcagccctccgcgcactggtccagcgcacaggatatagcttggtccaggaatttagaggttcctatagatggaagcagtgtgtctgggcacatgcccagagccagaagcgagcatgagcacagcaattcctggcctcaaaaaaggaaataatgctttgcagtccatcattttgcaaactttgctggaaaaggaaaatggacaaagaaaatatggtggccctccacctggttgggatgctgcaccccctgaaaggggctgtgaaatttttattggaaaacttccccgagacctttttgaggatgagcttataccattatgtgaaaaaatcggtaaaatttatgaaatgagaatgatgatggattttaatggcaacaatagaggatatgcatttgtaacattttcaaataaagtggaagccaagaatgcaatcaagcaacttaataattatgaaattagaaatgggcgcctcttaggggtttgtgccagtgtggacaactgccgattatttgttgggggcatcccaaaaaccaaaaagagagaagaaatcttatcggagatgaaaaaggttactgaaggtgttgtcgatgtcatcgtctacccaagcgctgcagataaaaccaaaaaccgaggctttgccttcgtggagtatgagagtcatcgagcagctgccatggcgaggaggaaactgctaccaggaagaattcagttatggggacatggtattgcagtagactgggcagagccagaagtagaagttgatgaagatacaatgtcttcagtgaaaatcctatatgtaagaaatcttatgctgtctacctctgaagagatgattgaaaaggaattcaacaatatcaaaccaggtgctgtggagagggtgaagaaaattcgagactatgcttttgtgcacttcagtaaccgagaagatgcagttgaggctatgaaagctttaaatggcaaggtgctggatggttcccccattgaagtcaccctagcaaaaccagtggacaaggacagttatgttaggtatacccgaggcacaggtggaaggggcaccatgctgcaaggagagtatacctactctttgggccaagtttatgatcccaccacaacctaccttggagctcctgtcttctatgccccccagacctatgcagcaattcccagtcttcatttcccagccaccaaaggacatctcagcaacagagccattatccgagccccttctgttagaggggctgcgggagtgagaggactgggcggccgtggctatttggcatacacaggcctgggtcgaggataccaggtcaaaggagacaaaagagaagacaaactctatgacattttacctgggatggagctcaccccaatgaatcctgtcacattaaaaccccaaggaattaaactcgctccccagatattagaagagatttgtcagaaaaataactggggacagccagtgtaccagctgcactctgctattggacaagaccaaagacagctattcttgtacaaaataactattcctgctctagccagccagaatcctgcaatccaccctttcacacctccaaagctgagtgcctttgtggatgaagcaaagacgtatgcagccgaatacaccctgcagaccctgggcatccccactgatggaggcgatggcaccatggctactgctgctgctgctgctactgctttcccaggatatgctgtccctaatgcaactgcacccgtgtctgcagcccagctcaagcaagcggtaacccttggacaagacttagcagcatatacaacctatgaggtctacccaacttttgcagtgactgcccgaggggatggatatggcaccttctgaagatgcttttttaaatttaagaataagacacacaaaactctattaaaaaaaaaaaagaaataaacctctaactcggtccccaatgatcataaataatatgtttcctaaagaaatgcctttccagagactgtatagcttataccaattatagaatcatgaagta

SEQ ID NO: 438706 - DNA, 2089 bp, Homo sapiens
  misc_feature (1)..(1): n is a, c, g, or t
ntttgatatgacgattagagcataacccgagtgacacgttgaattcgccataatcaaggaaaccttttccgggtggggatctctgaaattactcagtgagcaaccctaattaacctgattttttgctgataatcactctcaatggaatcaaatcacaaatccggggatggattgagcggcactcagaaggaagcagccctccgcgcactggtccagcgcacaggatatagcttggtccaggaaaatggacaaagaaaatatggtggccctccacctggttgggatgctgcaccccctgaaaggggctgtgaaatttttattggaaaacttccccgagacctttttgaggatgagcttataccattatgtgaaaaaatcggtaaaatttatgaaatgagaatgatgatggattttaatggcaacaatagaggatatgcatttgtaacattttcaaataaagtggaagccaagaatgcaatcaagcaacttaataattatgaaattagaaatgggcgcctcttaggggtttgtgccagtgtggacaactgccgattatttgttgggggcatcccaaaaaccaaaaagagagaagaaatcttatcggagatgaaaaaggttactgaaggtgttgtcgatgtcatcgtctacccaagcgctgcagataaaaccaaaaaccgaggctttgccttcgtggagtatgagagtcatcgagcagctgccatggcgaggaggaaactgctaccaggaagaattcagttatggggacatggtattgcagtagactgggcagagccagaagtagaagttgatgaagatacaatgtcttcagtgaaaatcctatatgtaagaaatcttatgctgtctacctctgaagagatgattgaaaaggaattcaacaatatcaaaccaggtgctgtggagagggtgaagaaaattcgagactatgcttttgtgcacttcagtaaccgagaagatgcagttgaggctatgaaagctttaaatggcaaggtgctggatggttcccccattgaagtcaccctagcaaaaccagtggacaaggacagttatgttaggtatacccgaggcacaggtggaaggggcaccatgctgcaaggagagtatacctactctttgggccaagtttatgatcccaccacaacctaccttggagctcctgtcttctatgccccccagacctatgcagcaattcccagtcttcatttcccagccaccaaaggacatctcagcaacagagccattatccgagccccttctgttagagaaatttacatgaatgtacctgtaggggctgcgggagtgagaggactgggcggccgtggctatttggcatacacaggcctgggtcgaggataccaggtcaaaggagacaaaagagaagacaaactctatgacattttacctgggatggagctcaccccaatgaatcctgtcacattaaaaccccaaggaattaaactcgctccccagatattagaagagatttgtcagaaaaataactggggacagccagtgtaccagctgcactctgctattggacaagaccaaagacagctattcttgtacaaaataactattcctgctctagccagccagaatcctgcaatccaccctttcacacctccaaagctgagtgcctttgtggatgaagcaaagacgtatgcagccgaatacaccctgcagaccctgggcatccccactgatggaggcgatggcaccatggctactgctgctgctgctgctactgctttcccaggatatgctgtccctaatgcaactgcacccgtgtctgcagcccagctcaagcaagcggtaacccttggacaagacttagcagcatatacaacctatgaggtctacccaacttttgcagtgactgcccgaggggatggatatggcaccttctgaagatgcttttttaaatttaagaataagacacacaaaactctattaaaaaaaaaaaagaaataaacctctaactcggtccccaatgatcataaataatatgtttcctaaagaaatgcctttccagagactgtatagcttataccaattatagaatcatgaagta

SEQ ID NO: 438707 - DNA, 777 bp, Homo sapiens
gatcactccgaatttacctgagcatgcattctacatattttaggaacaatttgttcactgatgctttagaaaagccatgtagtgaattacttgtatgtcccaggaatgtcatcaaccactgatgttctagatcaatttgtaaatatttctacatgcaacctatatttagaagctttaatagcaaacagaatgaaaaacacccactcaaaataccaccatccagtcatcttacatagctgatagtgccttaagttttcacctgactcagttgtaccagtttaaaaatgcctaccctgacagacttgctttccagccaccctttcacacctccaaagctgagtgcctttgtggatgaagcaaagacgtatgcagccgaatacaccctgcagaccctgggcatccccactgatggaggcgatggcaccatggctactgctgctgctgctgctactgctttcccaggatatgctgtccctaatgcaactgcacccgtgtctgcagcccagctcaagcaagcggtaacccttggacaagacttagcagcatatacaacctatgaggtctacccaacttttgcagtgactgcccgaggggatggatatggcaccttctgaagatgcttttttaaatttaagaataagacacacaaaactctattaaaaaaaaaaaagaaataaacctctaactcggtccccaatgatcataaataatatgtttcctaaagaaatgcctttccagagactgtatagcttataccaattatagaatcatgaagta

SEQ ID NO: 438708 - DNA, 422 bp, Homo sapiens
catgcccagctaatttttgtatttttatgagagatgtttcaccatgttgtccaggctggtctgaaaagcctgacctcaggtgatccacccaccttggcctccctaagtgctgggattacaggcgtgagccagcacacctggcccacttctgtcctttttcatatgctatttcatttactgataatacctttctccgtacccccacccaaagcttgagttattgtctgttcatttgtgtgtttagactttattcacccttcattttaggatggttgtttctataatacataaaagatatctacaaatttgacctttaatgtaggaacaatgacaaaccactgaaggctttccaatcaggagagtgatgtgagcagatttatatttaaaagcagtggttcccaagctttatgttgcatcagaat

SEQ ID NO: 438709 - DNA, 2349 bp, Homo sapiens
ctgaacgcgccccatctcttctgatctcggaagctaaccaaggtcagacctggttagtgcttggatgggagatcacctattactttttctgtaggtttttaataaagaatatgggtgctttgatgctagtaatagtgaactttgaaataattattgtgaatcctgaatgagaaacctgtttttttctccaaaatttgaaaaatatcttgaagagagtcttgctttagagacaaattggaaggagatcctgatttgcttttgtggccgtatccaagaggaattgagtgcaggtggggtgcagggaaaacacagtccactccccaccaccactccgctccttccacagcaaatggggactgctcagaaaaccctgtcctttcttttcctctcttcaaaggcaggcatgtgattgaggatgtgatggtgacttctggcctgttttattttgtggtaacttcactttagtcagggaaataattggaatatctttaatctgatgtagtttgacctttagaaattgaaagtgaaacagctattgttgataattcacaaagtattaataaaacttctattacctgtacagattttttacttaatctgcgagaaaactatttagaatattatggaattgtgccatagcttctttatttgttcttaattctatattagatttttttttctctgcttcatgaacaagttcagattttaaaacatcatgcctgaagacatgtccaactttattttttatatgttatattctggtccaatatactagagtaataatactctggtattttaggatatctgtcatttgaacctcagttacaaattaaacaatagtagctaaccatatctaagtgataagtttgcatctaagatttgtcctgatgccagtttgaagatatataagctgacagaaatttgcattgtttagaatgactgtagtctaacaatatcatggttcagacaacagaaagctgaatatgcccctgtggcagcaaatattaatatgttactaaaatatgaaaactacgtttaagcaatgtcagttttataaacaacagataagatatgtacataggtgagtaagtgaaaaagtcatcagcattgacattttgggttattcacgtgaccttgattggcagcctaatcttttatttatcaagaaatctaccttttacaacttaaatattatgctttatggatatgccaaacccaagattatctttaattgaatttgaccagcgctttggtttgggaagcatgcaatgatctttaaattcagtgtgaaatgcttctgtagaattatagcagaaagcccttgctataacctggcttagtgcagacatgcaaatctgagatagcacaaccagtttggctggactaaaggtgcagatgatcagtctaaacagcagtggtgataagcagaagaattccttataattggtacagtggggttatctaacagggacaggaagggcactcactgcatctaatgaggttcaggaggtaattgaagtgtgttaaatggtcaaaggtgagacttcagtttgagcttcaacttcacttataatgacttgaaataatgtaataatgtgccatattacttagaaataacacctagctgttaagtgtcacagcagcttctgcagtgatgtgacgttattgataatgagcattttctataagaggacattggaaactgatgttgcatactcattcagaatattgtttttaatgttgaagtgaaaacacttgtacctgtaattttagtcaaaaccaaatataatgttggtctgttaaaattttctgactcaaaaaaaaaaaaaaaaaaaaaaattttctgactcacgtactgagttcaaatacgttctgggtcaggcccaagttgtatacttggagatattaatgtaggtatgtgacagatatatactttgccgtacactgtttacatcacaagtgatcgcatgaaaatattgaatgtggtataagtagcactgaaagcaatcatttttaactgttgtgtgggtagattttgcccctccattatcaaaaaaactgtattctctatttaaatgtagtcagctactatcaatccagaagaaataaatctgcatttttccatttagcctttcatattttctcacattataaccaatgactgatttattaaatcacccttcagttttactgttgattttgtttgtttgctgatacattacagaaaatattataaatatttgttttaatgaagtgtgacattgtatcacttaaatctattgtttagtaagaatatgaaaattatgatgaggtttataacacaaaataaaaccaaataatactcaaaaa

SEQ ID NO: 438710 - DNA, 263 bp, Homo sapiens
gatgaagctctagaagatgaagacaacaaaaaagatgatggtatctcattcagtaatcagacaggccctgcttgggcaggctcagaaagagactacacatacgaggagctgctgaatcgagtgttcaacatcatcttttttgttgtcttcatcttctagagcttcatctttctctagtatttcatcctcatctgggtacttaacattcttcttttaattctgggtgtcgaaggtctgggaatttagtagtattaggcgacagc

SEQ ID NO: 438711 - DNA, 311 bp, Homo sapiens
gatgaagctctagaagatgaagacaacaaaaaagatgatggtatctcattcagtaatcagacaggccctgcttgggcaggctcagaaagagactacacatacgaggagctgctgaatcgagtgttcaacatcatgagggaaaagaatccagatatggttgctggggagaaaaggaaatttgtcatgaaacctccacaagtcgtccgagtaggaaccaagaaaacttcttttgtcaactttacagatatctgtaaactattacatcgtcaacccaaacatctccttgcatttttattggctgaattgggtac

SEQ ID NO: 438712 - DNA, 2005 bp, Homo sapiens
ggaatgagtgtctttgtgtatcacctggtgacttgtcagtgtctgtgtctgtgtgtgcctgtgagccagcatctctgtatcagtgttgctcatgctgtgtctttgtgcgccatggtgtgtcagtgtctgtgtgttgatgggtggcccatgagtgacccccgccaggaggaccaggctggctggatccagcacatctccccagtggcagcctcgccctctgggtcagggtgactgaggcattttgtggccttaaaacggggtgttcagggtcagccctcagggtgctggggcccttccatcccttgtccccttcaggttggtgaaaaggactccgggggccaggtgctgtatagcagcttatggaagtctcagctgggctatcctgcccttgggagcacagacaggctcctagggtgctgagtgaagcctgaagaccaagccccctcctcctggaatgctccttccacccctacctctcagagatgggcctgacacctctttctcattcattctccttttccctgtgctctgggaaagcccctggctcaggctgtcagagtgaggatggacctcaaaagtttgatcccctcgtgcagatgaagaagctgaagcccagagtgcggaaggggagtggcccaaggtcacacagctagtttgagtagagccagtcttgggagagccaagtactacagccctgggggtgtcacaccgcttgtcactgcccctgaggtctcctgccaaacaactgcagggagtttggctaacagtcctgtgtccagggtgccggtggggatgttatagatgttgctgggatcctgccctcggctccaaattctggcctctcatcccaggctgcagacccttctgccccatgacaggcctgggtgccacacagaggtggccaccctcccaccacagtgtctgcagctgctgcccttctcccaggcccccagacagaagagaccctgtttcccctcctctcccctgtgacttcacaagagcttgggctaggagtgaaggtcagcatgttctcatgtgctcatcctcttggtttccccaaagaccgggagggtcacggatggggcgtgcagaatccttgtgttttttctcgctgggcagcttgaggggctggggagtattcccagggtctttgctctggagagtccctgcagagccactggctgaggttgggttcagggttcagcggagtcctccatgcttccaaaggccgggaagcacccgcctctctatcgagtcagtgctgtgcgtgtgtgtctgagaatgtgtgtgatgtgtggagtgtgcgtgtgtttgtgtgtgtgtgtgtgtgtgttggggcagaaggaccactctttcctggggatcccttgacccttataactagaagggaccttagggagcatctaagctggtgcccccattgtacaggcgaggtccagagggatggcatctgcccaccccaccccttgccctcttgttgcctgcactcatttcccagggaccctcctaggataggaatgccctccttcctggccccctcccgccatcctcccagccacccacataatcaccatctcagcccaactctggtggccctctaggtctccatgcattcttcctgccctagagtagccagctcaccaaggcctttatccccagcccaggagaagggtcagggagggaaggggctgcaccagccctgagacctcaaagacttgggagaaaagccaaaactcctcatgcccaggcccacatgtctgaccaccccagcccaccccgccaccaaggtaaaagcacaacaggagacccccttattaatgggtgaaatgattggggttgtttttttagtcacacagccccatcctcacccctttgccttgctgtctgtctccaccccagcctctgttccccatttgcctctctttcacctccaagcccccaaatgtaacctctagttgcggacgcggttgttctatcaataaagctgcagtgttctagcactcag

SEQ ID NO: 438713 - DNA, 2946 bp, Homo sapiens
atttctatggctcccatttgtaatacaaggaaatgtcagcttctagttttgtaacgtcttgcccaagagctgcgaccgttaacttgtggagttgggacggcgtccaagtcaattggttgcccgacctttattctgccttgtcccatagatttagaaagaggctgacacatctggtaactagtttacggtcatctgcctctaagcgacatttagggtaagcgacatttttcagaaaccaaggccctccctctcgtctcactagtgggaagggtggaaagaacaggacagaaagctcttcctcttgtgtgaggcagttgctgtggaagccccataggcaggaggcccccgggcagcacatcctgtctgcttgtgtctgctgcagagttctgtccttgcattggtgcgcctcaggccaggctgcactgctgggacctgggccatgtctccccaccccaccgccctcctgggcctagtgctctgcctggcccagaccatccacacgcaggaggaagatctgcccagaccctccatctcggctgagccaggcaccgtgatccccctggggagccatgtgactttcgtgtgccggggcccggttggggttcaaacattccgcctggagagggagagtagatccacatacaatgatactgaagatgtgtctcaagctagtccatctgagtcagaggccagattccgcattgactcagtaagtgaaggaaatgccgggccttatcgctgcatctattataagccccctaaatggtctgagcagagtgactacctggagctgctggtgaaagaaacctctggaggcccggactccccggacacagagcccggctcctcagctggacccacgcagaggccgtcggacaacagtcacaatgagcatgcacctgcttcccaaggcctgaaagctgagcatctgtatattctcatcggggtctcagtggtcttcctcttctgtctcctcctcctggtcctcttctgcctccatcgccagaatcagataaagcaggggccccccagaagcaaggacgaggagcagaagccacagcagaggcctgacctggctgttgatgttctagagaggacagcagacaaggccacagtcaatggacttcctgagaaggacagagagacggacacctcggccctggctgcagggagttcccaggaggtgacgtatgctcagctggaccactgggccctcacacagaggacagcccgggctgtgtccccacagtccacaaagcccatggccgagtccatcacgtatgcagccgttgccagacactgaccccatacccacctggcctctgcacctgagggtagaaagtcactctaggaaaagcctgaagcagccatttggaaggcttcctgttggattcctcttcatctagaaagccagccaggcagctgtcctggagacaagagctggagactggaggtttctaaccagcatccagaaggttcgttagccaggtggtcccttctacaatcgagcagctccttggacagactgtttctcagttatttccagagacccagctacagttccctggctgtttctagagacccagctttattcacctgactgtttccagagacccagctaaagtcacctgcctgttctaaaggcccagctacagccaatcagccgatttcctgagcagtgatgccacctccaagcttgtcctaggtgtctgctgtgaacctccagtgaccccagagactttgctgtaattatctgccctgctgaccctaaagaccttcctagaagtcaagagctagccttgagactgtgctatacacacacagctgagagccaagcccagttctctgggttgtgctttactccacgcatcaataaataattttgaaggcctcacatctggcagccccaggcctggtcctgggtgcataggtctctcggacccactctctgccttcacagttgttcaaagctgagtgagggaaacaggacttacgaaaacgtgtcagcgttttctttttaaaatttaattgatcaggattgtacgtattcaaggtgtaaaatgtgataatttgtcgtacacgtacattgtgcaatgacagtcacaatcaattcctcagcgcacccatcgccacggatacgatacattagatattctgaacttgctcatcttaggacttcacattggtgtcagtgttttctgacaaatcacgtgtatcaggaatgaatgagggaggtgtggctgggtgaaggcagagagccgaccctacaggtccacatctgcacatacatgcacaggaatgcatgctctcacacacatgcatacacacacgcacacacacagacatgcacatacactcacacgccccaggaaatccaaggaatcactgagcctgctgttggttgaggcatttctgagtatccaccctacctgtagggtcagatgtactgattgacacagaaaattaccctatgtaccactaggaggcggcagaatctcatttgggttaatctgtgtttgtctttaaaaaacaaaaacaggccgggcatggaggctcacgcctgtaatcccagcactttgggaggctgaggtgggcggatcacgaggtcaggagatcgagaccatcctggctaacacggtgaaaccccatctctactaaaaatacaaaaaaattagccgggtgtggtggtgggtgcctgtagtcccagctactcgggaggctgagggaggagaatggcgtgaacccgggaggcggagtttgcagtgagccgaggtggtgccactgcactccagcctgggcgacagagcgagactccgtcaaaaaagaaaagaaaagaaaagaaagatttttaagaattcagcaaaaactcagccagctctttctatggggcagttgctaatttagttctaggcaaacgtggacacattaaattctcctacaaaccct

SEQ ID NO: 438714 - DNA, 3034 bp, Homo sapiens
atttctatggctcccatttgtaatacaaggaaatgtcagcttctagttttgtaacgtcttgcccaagagctgcgaccgttaacttgtggagttgggacggcgtccaagtcaattggttgcccgacctttattctgccttgtcccatagatttagaaagaggctgacacatctggtaactagtttacggtcatctgcctctaagcgacatttagggtaagcgacatttttcagaaaccaaggccctccctctcgtctcactagtgggaagggtggaaagaacaggacagaaagctcttcctcttgtgtgaggcagttgctgtggaagccccataggcaggaggcccccgggcagcacatcctgtctgcttgtgtctgctgcagagttctgtccttgcattggtgcgcctcaggccaggctgcactgctgggacctgggccatgtctccccaccccaccgccctcctgggcctagtgctctgcctggcccagaccatccacacgcaggaggaagatctgcccagaccctccatctcggctgagccaggcaccgtgatccccctggggagccatgtgactttcgtgtgccggggcccggttggggttcaaacattccgcctggagagggagagtagatccacatacaatgatactgaagatgtgtctcaagctagtccatctgagtcagaggccagattccgcattgactcagtaagtgaaggaaatgccgggccttatcgctgcatctattataagccccctaaatggtctgagcagagtgactacctggagctgctggtgaaagaaacctctggaggcccggactccccggacacagagcccggctcctcagctggacccacgcagaggccgtcggacaacagtcacaatgagcatgcacctgcttcccaaggcctgaaagctgagcatctgtatattctcatcggggtctcagtggtcttcctcttctgtctcctcctcctggtcctcttctgcctccatcgccagaatcagataaagcaggggccccccagaagcaaggacgaggagcagaagccacagcagaggtgaggcccctgggaatgactcctggacctccacccagtcctcggccgccaggctgcccctgaggttcacttttatttttcctcttaggcctgacctggctgttgatgttctagagaggacagcagacaaggccacagtcaatggacttcctgagaaggacagagagacggacacctcggccctggctgcagggagttcccaggaggtgacgtatgctcagctggaccactgggccctcacacagaggacagcccgggctgtgtccccacagtccacaaagcccatggccgagtccatcacgtatgcagccgttgccagacactgaccccatacccacctggcctctgcacctgagggtagaaagtcactctaggaaaagcctgaagcagccatttggaaggcttcctgttggattcctcttcatctagaaagccagccaggcagctgtcctggagacaagagctggagactggaggtttctaaccagcatccagaaggttcgttagccaggtggtcccttctacaatcgagcagctccttggacagactgtttctcagttatttccagagacccagctacagttccctggctgtttctagagacccagctttattcacctgactgtttccagagacccagctaaagtcacctgcctgttctaaaggcccagctacagccaatcagccgatttcctgagcagtgatgccacctccaagcttgtcctaggtgtctgctgtgaacctccagtgaccccagagactttgctgtaattatctgccctgctgaccctaaagaccttcctagaagtcaagagctagccttgagactgtgctatacacacacagctgagagccaagcccagttctctgggttgtgctttactccacgcatcaataaataattttgaaggcctcacatctggcagccccaggcctggtcctgggtgcataggtctctcggacccactctctgccttcacagttgttcaaagctgagtgagggaaacaggacttacgaaaacgtgtcagcgttttctttttaaaatttaattgatcaggattgtacgtattcaaggtgtaaaatgtgataatttgtcgtacacgtacattgtgcaatgacagtcacaatcaattcctcagcgcacccatcgccacggatacgatacattagatattctgaacttgctcatcttaggacttcacattggtgtcagtgttttctgacaaatcacgtgtatcaggaatgaatgagggaggtgtggctgggtgaaggcagagagccgaccctacaggtccacatctgcacatacatgcacaggaatgcatgctctcacacacatgcatacacacacgcacacacacagacatgcacatacactcacacgccccaggaaatccaaggaatcactgagcctgctgttggttgaggcatttctgagtatccaccctacctgtagggtcagatgtactgattgacacagaaaattaccctatgtaccactaggaggcggcagaatctcatttgggttaatctgtgtttgtctttaaaaaacaaaaacaggccgggcatggaggctcacgcctgtaatcccagcactttgggaggctgaggtgggcggatcacgaggtcaggagatcgagaccatcctggctaacacggtgaaaccccatctctactaaaaatacaaaaaaattagccgggtgtggtggtgggtgcctgtagtcccagctactcgggaggctgagggaggagaatggcgtgaacccgggaggcggagtttgcagtgagccgaggtggtgccactgcactccagcctgggcgacagagcgagactccgtcaaaaaagaaaagaaaagaaaagaaagatttttaagaattcagcaaaaactcagccagctctttctatggggcagttgctaatttagttctaggcaaacgtggacacattaaattctcctacaaaccct

SEQ ID NO: 438715 - DNA, 1842 bp, Homo sapiens
atttctatggctcccatttgtaatacaaggaaatgtcagcttctagttttgtaacgtcttgcccaagagctgcgaccgttaacttgtggagttgggacggcgtccaagtcaattggttgcccgacctttattctgccttgtcccatagatttagaaagaggctgacacatctggtaactagtttacggtcatctgcctctaagcgacatttagggtaagcgacatttttcagaaaccaaggccctccctctcgtctcactagtgggaagggtggaaagaacaggacagaaagctcttcctcttgtgtgaggcagttgctgtggaagccccataggcaggaggcccccgggcagcacatcctgtctgcttgtgtctgctgcagagttctgtccttgcattggtgcgcctcaggccaggctgcactgctgggacctgggccatgtctccccaccccaccgccctcctgggcctagtgctctgcctggcccagaccatccacacgcaggaggaagatctgcccagaccctccatctcggctgagccaggcaccgtgatccccctggggagccatgtgactttcgtgtgccggggcccggttggggttcaaacattccgcctggagagggagagtagatccacatacaatgatactgaagatgtgtctcaagctagtccatctgagtcagaggccagattccgcattgactcagtaagtgaaggaaatgccgggccttatcgctgcatctattataagccccctaaatggtctgagcagagtgactacctggagctgctggtgaaaggacccacgcagaggccgtcggacaacagtcacaatgagcatgcacctgcttcccaaggcctgaaagctgagcatctgtatattctcatcggggtctcagtggtcttcctcttctgtctcctcctcctggtcctcttctgcctccatcgccagaatcagataaagcaggggccccccagaagcaaggacgaggagcagaagccacagcagaggcctgacctggctgttgatgttctagagaggacagcagacaaggccacagtcaatggacttcctgagaaggacagagagacggacacctcggccctggctgcagggagttcccaggaggtgacgtatgctcagctggaccactgggccctcacacagaggacagcccgggctgtgtccccacagtccacaaagcccatggccgagtccatcacgtatgcagccgttgccagacactgaccccatacccacctggcctctgcacctgagggtagaaagtcactctaggaaaagcctgaagcagccatttggaaggcttcctgttggattcctcttcatctagaaagccagccaggcagctgtcctggagacaagagctggagactggaggtttctaaccagcatccagaaggttcgttagccaggtggtcccttctacaatcgagcagctccttggacagactgtttctcagttatttccagagacccagctacagttccctggctgtttctagagacccagctttattcacctgactgtttccagagacccagctaaagtcacctgcctgttctaaaggcccagctacagccaatcagccgatttcctgagcagtgatgccacctccaagcttgtcctaggtgtctgctgtgaacctccagtgaccccagagactttgctgtaattatctgccctgctgaccctaaagaccttcctagaagtcaagagctagccttgagactgtgctatacacacacagctgagagccaagcccagttctctgggttgtgctttactccacgcatcaataaataattttgaaggcctc

SEQ ID NO: 438716 - DNA, 2852 bp, Homo sapiens
atttctatggctcccatttgtaatacaaggaaatgtcagcttctagttttgtaacgtcttgcccaagagctgcgaccgttaacttgtggagttgggacggcgtccaagtcaattggttgcccgacctttattctgccttgtcccatagatttagaaagaggctgacacatctggtaactagtttacggtcatctgcctctaagcgacatttagggtaagcgacatttttcagaaaccaaggccctccctctcgtctcactagtgggaagggtggaaagaacaggacagaaagctcttcctcttgtgtgaggcagttgctgtggaagccccataggcaggaggcccccgggcagcacatcctgtctgcttgtgtctgctgcagagttctgtccttgcattggtgcgcctcaggccaggctgcactgctgggacctgggccatgtctccccaccccaccgccctcctgggcctagtgctctgcctggcccagaccatccacacgcaggaggaagatctgcccagaccctccatctcggctgagccaggcaccgtgatccccctggggagccatgtgactttcgtgtgccggggcccggttggggttcaaacattccgcctggagagggagagtagatccacatacaatgatactgaagatgtgtctcaagctagtccatctgagtcagaggccagattccgcattgactcaaaacctctggaggcccggactccccggacacagagcccggctcctcagctggacccacgcagaggccgtcggacaacagtcacaatgagcatgcacctgcttcccaaggcctgaaagctgagcatctgtatattctcatcggggtctcagtggtcttcctcttctgtctcctcctcctggtcctcttctgcctccatcgccagaatcagataaagcaggggccccccagaagcaaggacgaggagcagaagccacagcagaggcctgacctggctgttgatgttctagagaggacagcagacaaggccacagtcaatggacttcctgagaaggacagagagacggacacctcggccctggctgcagggagttcccaggaggtgacgtatgctcagctggaccactgggccctcacacagaggacagcccgggctgtgtccccacagtccacaaagcccatggccgagtccatcacgtatgcagccgttgccagacactgaccccatacccacctggcctctgcacctgagggtagaaagtcactctaggaaaagcctgaagcagccatttggaaggcttcctgttggattcctcttcatctagaaagccagccaggcagctgtcctggagacaagagctggagactggaggtttctaaccagcatccagaaggttcgttagccaggtggtcccttctacaatcgagcagctccttggacagactgtttctcagttatttccagagacccagctacagttccctggctgtttctagagacccagctttattcacctgactgtttccagagacccagctaaagtcacctgcctgttctaaaggcccagctacagccaatcagccgatttcctgagcagtgatgccacctccaagcttgtcctaggtgtctgctgtgaacctccagtgaccccagagactttgctgtaattatctgccctgctgaccctaaagaccttcctagaagtcaagagctagccttgagactgtgctatacacacacagctgagagccaagcccagttctctgggttgtgctttactccacgcatcaataaataattttgaaggcctcacatctggcagccccaggcctggtcctgggtgcataggtctctcggacccactctctgccttcacagttgttcaaagctgagtgagggaaacaggacttacgaaaacgtgtcagcgttttctttttaaaatttaattgatcaggattgtacgtattcaaggtgtaaaatgtgataatttgtcgtacacgtacattgtgcaatgacagtcacaatcaattcctcagcgcacccatcgccacggatacgatacattagatattctgaacttgctcatcttaggacttcacattggtgtcagtgttttctgacaaatcacgtgtatcaggaatgaatgagggaggtgtggctgggtgaaggcagagagccgaccctacaggtccacatctgcacatacatgcacaggaatgcatgctctcacacacatgcatacacacacgcacacacacagacatgcacatacactcacacgccccaggaaatccaaggaatcactgagcctgctgttggttgaggcatttctgagtatccaccctacctgtagggtcagatgtactgattgacacagaaaattaccctatgtaccactaggaggcggcagaatctcatttgggttaatctgtgtttgtctttaaaaaacaaaaacaggccgggcatggaggctcacgcctgtaatcccagcactttgggaggctgaggtgggcggatcacgaggtcaggagatcgagaccatcctggctaacacggtgaaaccccatctctactaaaaatacaaaaaaattagccgggtgtggtggtgggtgcctgtagtcccagctactcgggaggctgagggaggagaatggcgtgaacccgggaggcggagtttgcagtgagccgaggtggtgccactgcactccagcctgggcgacagagcgagactccgtcaaaaaagaaaagaaaagaaaagaaagatttttaagaattcagcaaaaactcagccagctctttctatggggcagttgctaatttagttctaggcaaacgtggacacattaaattctcctacaaaccct

SEQ ID NO: 438717 - DNA, 1849 bp, Homo sapiens
aggtgactctaaggatcctgttagtggacttctagaaggacagagagacggacacctcggccctggctgcagggagttcccaggaggtgacgtatgctcagctggaccactgggccctcacacagaggacagcccgggctgtgtccccacagtccacaaagcccatggccgagtccatcacgtatgcagccgttgccagacactgaccccatacccacctggcctctgcacctgagggtagaaagtcactctaggaaaagcctgaagcagccatttggaaggcttcctgttggattcctcttcatctagaaagccagccaggcagctgtcctggagacaagagctggagactggaggtttctaaccagcatccagaaggttcgttagccaggtggtcccttctacaatcgagcagctccttggacagactgtttctcagttatttccagagacccagctacagttccctggctgtttctagagacccagctttattcacctgactgtttccagagacccagctaaagtcacctgcctgttctaaaggcccagctacagccaatcagccgatttcctgagcagtgatgccacctccaagcttgtcctaggtgtctgctgtgaacctccagtgaccccagagactttgctgtaattatctgccctgctgaccctaaagaccttcctagaagtcaagagctagccttgagactgtgctatacacacacagctgagagccaagcccagttctctgggttgtgctttactccacgcatcaataaataattttgaaggcctcacatctggcagccccaggcctggtcctgggtgcataggtctctcggacccactctctgccttcacagttgttcaaagctgagtgagggaaacaggacttacgaaaacgtgtcagcgttttctttttaaaatttaattgatcaggattgtacgtattcaaggtgtaaaatgtgataatttgtcgtacacgtacattgtgcaatgacagtcacaatcaattcctcagcgcacccatcgccacggatacgatacattagatattctgaacttgctcatcttaggacttcacattggtgtcagtgttttctgacaaatcacgtgtatcaggaatgaatgagggaggtgtggctgggtgaaggcagagagccgaccctacaggtccacatctgcacatacatgcacaggaatgcatgctctcacacacatgcatacacacacgcacacacacagacatgcacatacactcacacgccccaggaaatccaaggaatcactgagcctgctgttggttgaggcatttctgagtatccaccctacctgtagggtcagatgtactgattgacacagaaaattaccctatgtaccactaggaggcggcagaatctcatttgggttaatctgtgtttgtctttaaaaaacaaaaacaggccgggcatggaggctcacgcctgtaatcccagcactttgggaggctgaggtgggcggatcacgaggtcaggagatcgagaccatcctggctaacacggtgaaaccccatctctactaaaaatacaaaaaaattagccgggtgtggtggtgggtgcctgtagtcccagctactcgggaggctgagggaggagaatggcgtgaacccgggaggcggagtttgcagtgagccgaggtggtgccactgcactccagcctgggcgacagagcgagactccgtcaaaaaagaaaagaaaagaaaagaaagatttttaagaattcagcaaaaactcagccagctctttctatggggcagttgctaatttagttctaggcaaacgtggacacattaaattctcctacaaaccct

SEQ ID NO: 438718 - DNA, 1178 bp, Homo sapiens
atttctatggctcccatttgtaatacaaggaaatgtcagcttctagttttgtaacgtcttgcccaagagctgcgaccgttaacttgtggagttgggacggcgtccaagtcaattggttgcccgacctttattctgccttgtcccatagatttagaaagaggctgacacatctggtaactagtttacggtcatctgcctctaagcgacatttagggtaagcgacatttttcagaaaccaaggccctccctctcgtctcactagtgggaagggtggaaagaacaggacagaaagctcttcctcttgtgtgaggcagttgctgtggaagccccataggcaggaggcccccgggcagcacatcctgtctgcttgtgtctgctgcagagttctgtccttgcattggtgcgcctcaggccaggctgcactgctgggacctgggccatgtctccccaccccaccgccctcctgggcctagtgctctgcctggcccagaccatccacacgcaggaggaagatctgcccagaccctccatctcggctgagccaggcaccgtgatccccctggggagccatgtgactttcgtgtgccggggcccggttggggttcaaacattccgcctggagagggagagtagatccacatacaatgatactgaagatgtgtctcaagctagtccatctgagtcagaggccagattccgcattgactcagtaagtgaaggaaatgccgggccttatcgctgcatctattataagccccctaaatggtctgagcagagtgactacctggagctgctggtgaaagaaacctctggaggcccggactccccggacacagagcccggctcctcagctggacccacgcagaggccgtcggacaacagtcacaatgagcgtgagtgatgggggccgtggagcatgaagctggtgtgtgcctcttggggaaggagaaagaggtcaggctttggggttgatcagattcctgctctgccaatggcagtctgtgtccctgtgcagaggactccagcactcaggaccccggtggtggaagaaggggataacgatccctgtactgcaggactattatttacctaagatattttatatattagtaagtctatgaaacgcacgtgacgtgtgtgtggtatacagtaggtgctcaataaatgcacactgctga

SEQ ID NO: 438719 - DNA, 999 bp, Homo sapiens
atttctatggctcccatttgtaatacaaggaaatgtcagcttctagttttgtaacgtcttgcccaagagctgcgaccgttaacttgtggagttgggacggcgtccaagtcaattggttgcccgacctttattctgccttgtcccatagatttagaaagaggctgacacatctggtaactagtttacggtcatctgcctctaagcgacatttagggtaagcgacatttttcagaaaccaaggccctccctctcgtctcactagtgggaagggtggaaagaacaggacagaaagctcttcctcttgtgtgaggcagttgctgtggaagccccataggcaggaggcccccgggcagcacatcctgtctgcttgtgtctgctgcagagttctgtccttgcattggtgcgcctcaggccaggctgcactgctgggacctgggccatgtctccccaccccaccgccctcctgggcctagcaagaaggattacatggagacagtgatgtcgaggagggttggcttggtcgttatgaaatgctgaatgccccccagctccatcgagcccccttttgacagcagccccgtaaggagactgggcactgggcatttttctcactggggcttctcttccagtgctctgcctggcccagaccatccacacgcaggaggaagatctgcccagaccctccatctcggctgagccaggcaccgtgatccccctggggagccatgtgactttcgtgtgccggggcccggttggggttcaaacattccgcctggagagggagagtagatccacatacaatgatactgaagatgtgtctcaagctagtccatctgagtcagaggccagattccgcattgactcagtaagtgaaggaaatgccgggccttatcgctgcatctattataagccccctaaatggtctgagcagagtgactacctggagctgctggtgaaaggtccctggagccctgatctcctctggacgccacggatggc

SEQ ID NO: 438720 - DNA, 581 bp, Homo sapiens
aggactattatttacctaagatattttatatattagtaagtctatgaaacgcacgtgacgtgtgtgtggtatacagtaggtgctcaataaatgcacactgctgaaatcctgtttctgtctttcttagatgcacctgcttcccaaggcctgaaagctgagcatctgtatattctcatcggggtctcagtggtcttcctcttctgtctcctcctcctggtcctcttctgcctccatcgccagaatcagataaagcagggtaggtctcaggggcagggtggggtgacctgggaagctgtcaggagaggctaggaagaaggtctccttaattcacaccccgactgtccttagggccccccagaagcaaggacgaggagcagaagccacagcagaggtgaggcccctgggaatgactcctggacctccacccagtcctcggccgccaggctgcccctgaggttcacttttatttttcctcttaggcctgacctggctgttgatgttctagagaggacagcaggtaaagggggaggaggagggacaggcctgggatggggaagtggggacttggtgccaatccagat

SEQ ID NO: 438721 - DNA, 387 bp, Homo sapiens
ccgtgatccccctggggagccatgtgactttcgtgtgccggggcccggttggggttcaaacattccgcctggagagggagagtagatccacatacaatgatactgaagatgtgtctcaagctagtccatctgagtcagaggccagattccgcattgactcagtaagtgaaggaaatgccgggccttatcgctgcatctattataagccccctaaatggtctgagcagagtgactacctggagctgctggtgaaaggtgaggacgtcacctgggccctgccccagtctcagctcgaccctcgagcttgtccccaggtccctggaccctgtcccagctgctgtcctctgtggccaaccttgtcctcctcctgaccgccaagccctcccc

SEQ ID NO: 438722 - DNA, 936 bp, Homo sapiens
  misc_feature (25)..(25): n is a, c, g, or t
  misc_feature (29)..(29): n is a, c, g, or t
agtccagggctgtccggtctgagtngtangatagccccataggcaggaggcccccgggcagcacatcctgtctgcttgtgtctgctgcagagttctgtccttgcattggtgcgcctcaggccaggctgcactgctgggacctgggccatgtctccccaccccaccgccctcctgggcctagtgctctgcctggcccagaccatccacacgcaggaggaagatctgcccagaccctccatctcggctgagccaggcaccgtgatccccctggggagccatgtgactttcgtgtgccggggcccggttggggttcaaacattccgcctggagagggagagtagatccacatacaatgatactgaagatgtgtctcaagctagtccatctgagtcagaggccagattccgcattgactcagtaagtgaaggaaatgccgggccttatcgctgcatctattataagccccctaaatggtctgagcagagtgactacctggagctgctggtgaaagaaacctctggaggcccggactccccggacacagagcccggctcctcagctggacccacgcagaggccgtcggacaacagtcacaatgagcatgcacctgcttcccaaggcctgaaagctgagcatctgtatattctcatcggggtctcagtggtcttcctcttctgtctcctcctcctggtcctcttctgcctccatcgccagaatcagataaagcaggggccccccagaatgcaaaggacgaggagcaagaaagccactagcaagaatgccatgacttggcttgttgatgttctacgagaggagcagcgacaacggcaccagttcatggacttcctgagaagggaacgagagaacggacacctctggcctggctgccgggagttccgaggagtgacttatgctatggtggacccttgggcctac

SEQ ID NO: 438723 - DNA, 2895 bp, Homo sapiens
atttctatggctcccatttgtaatacaaggaaatgtcagcttctagttttgtaacgtcttgcccaagagctgcgaccgttaacttgtggagttgggacggcgtccaagtcaattggttgcccgacctttattctgccttgtcccatagatttagaaagaggctgacacatctggtaactagtttacggtcatctgcctctaagcgacatttagggtaagcgacatttttcagaaaccaaggccctccctctcgtctcactagtgggaagggtggaaagaacaggacagaaagctcttcctcttgtgtgaggcagttgctgtggaagccccataggcaggaggcccccgggcagcacatcctgtctgcttgtgtctgctgcagagttctgtccttgcattggtgcgcctcaggccaggctgcactgctgggacctgggccatgtctccccaccccaccgccctcctgggcctagtgctctgcctggcccagaccatccacacgcaggaggaagatctgcccagaccctccatctcggctgagccaggcaccgtgatccccctggggagccatgtgactttcgtgtgccggggcccggttggggttcaaacattccgcctggagagggagagtagatccacatacaatgatactgaagatgtgtctcaagctagtccatctgagtcagaggccagattccgcattgactcagtaagtgaaggaaatgccgggccttatcgctgcatctattataagccccctaaatggtctgagcagagtgactacctggagctgctggtgaaaggacccacgcagaggccgtcggacaacagtcacaatgagcatgcacctgcttcccaaggcctgaaagctgagcatctgtatattctcatcggggtctcagtggtcttcctcttctgtctcctcctcctggtcctcttctgcctccatcgccagaatcagataaagcaggggccccccagaagcaaggacgaggagcagaagccacagcagaggcctgacctggctgttgatgttctagagaggacagcagacaaggccacagtcaatggacttcctgagaaggacagagagacggacacctcggccctggctgcagggagttcccaggaggtgacgtatgctcagctggaccactgggccctcacacagaggacagcccgggctgtgtccccacagtccacaaagcccatggccgagtccatcacgtatgcagccgttgccagacactgaccccatacccacctggcctctgcacctgagggtagaaagtcactctaggaaaagcctgaagcagccatttggaaggcttcctgttggattcctcttcatctagaaagccagccaggcagctgtcctggagacaagagctggagactggaggtttctaaccagcatccagaaggttcgttagccaggtggtcccttctacaatcgagcagctccttggacagactgtttctcagttatttccagagacccagctacagttccctggctgtttctagagacccagctttattcacctgactgtttccagagacccagctaaagtcacctgcctgttctaaaggcccagctacagccaatcagccgatttcctgagcagtgatgccacctccaagcttgtcctaggtgtctgctgtgaacctccagtgaccccagagactttgctgtaattatctgccctgctgaccctaaagaccttcctagaagtcaagagctagccttgagactgtgctatacacacacagctgagagccaagcccagttctctgggttgtgctttactccacgcatcaataaataattttgaaggcctcacatctggcagccccaggcctggtcctgggtgcataggtctctcggacccactctctgccttcacagttgttcaaagctgagtgagggaaacaggacttacgaaaacgtgtcagcgttttctttttaaaatttaattgatcaggattgtacgtattcaaggtgtaaaatgtgataatttgtcgtacacgtacattgtgcaatgacagtcacaatcaattcctcagcgcacccatcgccacggatacgatacattagatattctgaacttgctcatcttaggacttcacattggtgtcagtgttttctgacaaatcacgtgtatcaggaatgaatgagggaggtgtggctgggtgaaggcagagagccgaccctacaggtccacatctgcacatacatgcacaggaatgcatgctctcacacacatgcatacacacacgcacacacacagacatgcacatacactcacacgccccaggaaatccaaggaatcactgagcctgctgttggttgaggcatttctgagtatccaccctacctgtagggtcagatgtactgattgacacagaaaattaccctatgtaccactaggaggcggcagaatctcatttgggttaatctgtgtttgtctttaaaaaacaaaaacaggccgggcatggaggctcacgcctgtaatcccagcactttgggaggctgaggtgggcggatcacgaggtcaggagatcgagaccatcctggctaacacggtgaaaccccatctctactaaaaatacaaaaaaattagccgggtgtggtggtgggtgcctgtagtcccagctactcgggaggctgagggaggagaatggcgtgaacccgggaggcggagtttgcagtgagccgaggtggtgccactgcactccagcctgggcgacagagcgagactccgtcaaaaaagaaaagaaaagaaaagaaagatttttaagaattcagcaaaaactcagccagctctttctatggggcagttgctaatttagttctaggcaaacgtggacacattaaattctcctacaaaccct

SEQ ID NO: 438724 - DNA, 2849 bp, Homo sapiens
atttctatggctcccatttgtaatacaaggaaatgtcagcttctagttttgtaacgtcttgcccaagagctgcgaccgttaacttgtggagttgggacggcgtccaagtcaattggttgcccgacctttattctgccttgtcccatagatttagaaagaggctgacacatctggtaactagtttacggtcatctgcctctaagcgacatttagggtaagcgacatttttcagaaaccaaggccctccctctcgtctcactagtgggaagggtggaaagaacaggacagaaagctcttcctcttgtgtgaggcagttgctgtggaagccccataggcaggaggcccccgggcagcacatcctgtctgcttgtgtctgctgcagagttctgtccttgcattggtgcgcctcaggccaggctgcactgctgggacctgggccatgtctccccaccccaccgccctcctgggcctagtgctctgcctggcccagaccatccacacgcaggaggaagatctgcccagaccctccatctcggctgagccaggcaccgtgatccccctggggagccatgtgactttcgtgtgccggggcccggttggggttcaaacattccgcctggagagggagagtagatccacatacaatgatactgaagatgtgtctcaagctagtccatctgagtcagaggccagattccgcattgactcagtaagtgaaggaaatgccgggccttatcgctgcatctattataagccccctaaatggtctgagcagagtgactacctggagctgctggtgaaagaaacctctggaggcccggactccccggacacagagcccggctcctcagctggacccacgcagaggccgtcggacaacagtcacaatgagcatgcacctgcttcccaaggcctgaaagctgagcatctgtatattctcatcggggtctcagtggtcttcctcttctgtctcctcctcctggtcctcttctgcctccatcgccagaatcagataaagcaggggccccccagaagcaaggacgaggagcagaagccacagcagaggtgaggcccctgggaatgactcctggacctccacccagtcctcggccgccaggctgcccctgaggttcacttttatttttcctcttaggcctgacctggctgttgatgttctagagaggacagcagacaaggccacagtcaatggacttcctgagaaggacagagagacggacacctcggccctggctgcagggagttcccaggaggtgacgtatgctcagctggaccactgggccctcacacagaggacagcccgggctgtgtccccacagtccacaaagcccatggccgagtccatcacgtatgcagccgttgccagacactgaccccatacccacctggcctctgcacctgagggtagaaagtcactctaggaaaagcctgaagcagccatttggaaggcttcctgttggattcctcttcatctagaaagccagccaggcagctgtcctggagacaagagctggagactggaggtttctaaccagcatccagaaggttcgttagccaggtggtcccttctacaatcgagcagctccttggacagactgtttctcagttatttccagccagagactttgctgtaattatctgccctgctgaccctaaagaccttcctagaagtcaagagctagccttgagactgtgctatacacacacagctgagagccaagcccagttctctgggttgtgctttactccacgcatcaataaataattttgaaggcctcacatctggcagccccaggcctggtcctgggtgcataggtctctcggacccactctctgccttcacagttgttcaaagctgagtgagggaaacaggacttacgaaaacgtgtcagcgttttctttttaaaatttaattgatcaggattgtacgtattcaaggtgtaaaatgtgataatttgtcgtacacgtacattgtgcaatgacagtcacaatcaattcctcagcgcacccatcgccacggatacgatacattagatattctgaacttgctcatcttaggacttcacattggtgtcagtgttttctgacaaatcacgtgtatcaggaatgaatgagggaggtgtggctgggtgaaggcagagagccgaccctacaggtccacatctgcacatacatgcacaggaatgcatgctctcacacacatgcatacacacacgcacacacacagacatgcacatacactcacacgccccaggaaatccaaggaatcactgagcctgctgttggttgaggcatttctgagtatccaccctacctgtagggtcagatgtactgattgacacagaaaattaccctatgtaccactaggaggcggcagaatctcatttgggttaatctgtgtttgtctttaaaaaacaaaaacaggccgggcatggaggctcacgcctgtaatcccagcactttgggaggctgaggtgggcggatcacgaggtcaggagatcgagaccatcctggctaacacggtgaaaccccatctctactaaaaatacaaaaaaattagccgggtgtggtggtgggtgcctgtagtcccagctactcgggaggctgagggaggagaatggcgtgaacccgggaggcggagtttgcagtgagccgaggtggtgccactgcactccagcctgggcgacagagcgagactccgtcaaaaaagaaaagaaaagaaaagaaagatttttaagaattcagcaaaaactcagccagctctttctatggggcagttgctaatttagttctaggcaaacgtggacacattaaattctcctacaaaccct

SEQ ID NO: 438725 - DNA, 3162 bp, Homo sapiens
atttctatggctcccatttgtaatacaaggaaatgtcagcttctagttttgtaacgtcttgcccaagagctgcgaccgttaacttgtggagttgggacggcgtccaagtcaattggttgcccgacctttattctgccttgtcccatagatttagaaagaggctgacacatctggtaactagtttacggtcatctgcctctaagcgacatttagggtaagcgacatttttcagaaaccaaggccctccctctcgtctcactagtgggaagggtggaaagaacaggacagaaagctcttcctcttgtgtgaggcagttgctgtggaagccccataggcaggaggcccccgggcagcacatcctgtctgcttgtgtctgctgcagagttctgtccttgcattggtgcgcctcaggccaggctgcactgctgggacctgggccatgtctccccaccccaccgccctcctgggcctagtgctctgcctggcccagaccatccacacgcaggaggaagatctgcccagaccctccatctcggctgagccaggcaccgtgatccccctggggagccatgtgactttcgtgtgccggggcccggttggggttcaaacattccgcctggagagggagagtagatccacatacaatgatactgaagatgtgtctcaagctagtccatctgagtcagaggccagattccgcattgactcagtaagtgaaggaaatgccgggccttatcgctgcatctattataagccccctaaatggtctgagcagagtgactacctggagctgctggtgaaagaaacctctggaggcccggactccccggacacagagcccggctcctcagctggacccacgcagaggccgtcggacaacagtcacaatgagcgtgagtgatgggggccgtggagcatgaagctggtgtgtgcctcttggggaaggagaaagaggtcaggctttggggttgatcagattcctgctctgccaatggcagtctgtgtccctgtgcagaggactccagcactcaggaccccggtggtggaagaaggggataacgatccctgtactgcaggactattatttacctaagatattttatatattaatgcacctgcttcccaaggcctgaaagctgagcatctgtatattctcatcggggtctcagtggtcttcctcttctgtctcctcctcctggtcctcttctgcctccatcgccagaatcagataaagcaggggccccccagaagcaaggacgaggagcagaagccacagcagaggcctgacctggctgttgatgttctagagaggacagcagacaaggccacagtcaatggacttcctgagaaggacagagagacggacacctcggccctggctgcagggagttcccaggaggtgacgtatgctcagctggaccactgggccctcacacagaggacagcccgggctgtgtccccacagtccacaaagcccatggccgagtccatcacgtatgcagccgttgccagacactgaccccatacccacctggcctctgcacctgagggtagaaagtcactctaggaaaagcctgaagcagccatttggaaggcttcctgttggattcctcttcatctagaaagccagccaggcagctgtcctggagacaagagctggagactggaggtttctaaccagcatccagaaggttcgttagccaggtggtcccttctacaatcgagcagctccttggacagactgtttctcagttatttccagagacccagctacagttccctggctgtttctagagacccagctttattcacctgactgtttccagagacccagctaaagtcacctgcctgttctaaaggcccagctacagccaatcagccgatttcctgagcagtgatgccacctccaagcttgtcctaggtgtctgctgtgaacctccagtgaccccagagactttgctgtaattatctgccctgctgaccctaaagaccttcctagaagtcaagagctagccttgagactgtgctatacacacacagctgagagccaagcccagttctctgggttgtgctttactccacgcatcaataaataattttgaaggcctcacatctggcagccccaggcctggtcctgggtgcataggtctctcggacccactctctgccttcacagttgttcaaagctgagtgagggaaacaggacttacgaaaacgtgtcagcgttttctttttaaaatttaattgatcaggattgtacgtattcaaggtgtaaaatgtgataatttgtcgtacacgtacattgtgcaatgacagtcacaatcaattcctcagcgcacccatcgccacggatacgatacattagatattctgaacttgctcatcttaggacttcacattggtgtcagtgttttctgacaaatcacgtgtatcaggaatgaatgagggaggtgtggctgggtgaaggcagagagccgaccctacaggtccacatctgcacatacatgcacaggaatgcatgctctcacacacatgcatacacacacgcacacacacagacatgcacatacactcacacgccccaggaaatccaaggaatcactgagcctgctgttggttgaggcatttctgagtatccaccctacctgtagggtcagatgtactgattgacacagaaaattaccctatgtaccactaggaggcggcagaatctcatttgggttaatctgtgtttgtctttaaaaaacaaaaacaggccgggcatggaggctcacgcctgtaatcccagcactttgggaggctgaggtgggcggatcacgaggtcaggagatcgagaccatcctggctaacacggtgaaaccccatctctactaaaaatacaaaaaaattagccgggtgtggtggtgggtgcctgtagtcccagctactcgggaggctgagggaggagaatggcgtgaacccgggaggcggagtttgcagtgagccgaggtggtgccactgcactccagcctgggcgacagagcgagactccgtcaaaaaagaaaagaaaagaaaagaaagatttttaagaattcagcaaaaactcagccagctctttctatggggcagttgctaatttagttctaggcaaacgtggacacattaaattctcctacaaaccct

SEQ ID NO: 438726 - DNA, 1865 bp, Homo sapiens
atttctatggctcccatttgtaatacaaggaaatgtcagcttctagttttgtaacgtcttgcccaagagctgcgaccgttaacttgtggagttgggacggcgtccaagtcaattggttgcccgacctttattctgccttgtcccatagatttagaaagaggctgacacatctggtaactagtttacggtcatctgcctctaagcgacatttagggtaagcgacatttttcagaaaccaaggccctccctctcgtctcactagtgggaagggtggaaagaacaggacagaaagctcttcctcttgtgtgaggcagttgctgtggaagccccataggcaggaggcccccgggcagcacatcctgtctgcttgtgtctgctgcagagttctgtccttgcattggtgcgcctcaggccaggctgcactgctgggacctgggccatgtctccccaccccaccgccctcctgggcctagtgctctgcctggcccagaccatccacacgcaggaggaagatctgcccagaccctccatctcggctgagccaggcaccgtgatccccctggggagccatgtgactttcgtgtgccggggcccggttggggttcaaacattccgcctggagagggagagtagatccacatacaatgataccagagactttgctgtaattatctgccctgctgaccctaaagaccttcctagaagtcaagagctagccttgagactgtgctatacacacacagctgagagccaagcccagttctctgggttgtgctttactccacgcatcaataaataattttgaaggcctcacatctggcagccccaggcctggtcctgggtgcataggtctctcggacccactctctgccttcacagttgttcaaagctgagtgagggaaacaggacttacgaaaacgtgtcagcgttttctttttaaaatttaattgatcaggattgtacgtattcaaggtgtaaaatgtgataatttgtcgtacacgtacattgtgcaatgacagtcacaatcaattcctcagcgcacccatcgccacggatacgatacattagatattctgaacttgctcatcttaggacttcacattggtgtcagtgttttctgacaaatcacgtgtatcaggaatgaatgagggaggtgtggctgggtgaaggcagagagccgaccctacaggtccacatctgcacatacatgcacaggaatgcatgctctcacacacatgcatacacacacgcacacacacagacatgcacatacactcacacgccccaggaaatccaaggaatcactgagcctgctgttggttgaggcatttctgagtatccaccctacctgtagggtcagatgtactgattgacacagaaaattaccctatgtaccactaggaggcggcagaatctcatttgggttaatctgtgtttgtctttaaaaaacaaaaacaggccgggcatggaggctcacgcctgtaatcccagcactttgggaggctgaggtgggcggatcacgaggtcaggagatcgagaccatcctggctaacacggtgaaaccccatctctactaaaaatacaaaaaaattagccgggtgtggtggtgggtgcctgtagtcccagctactcgggaggctgagggaggagaatggcgtgaacccgggaggcggagtttgcagtgagccgaggtggtgccactgcactccagcctgggcgacagagcgagactccgtcaaaaaagaaaagaaaagaaaagaaagatttttaagaattcagcaaaaactcagccagctctttctatggggcagttgctaatttagttctaggcaaacgtggacacattaaattctcctacaaaccct

SEQ ID NO: 438727 - DNA, 461 bp, Homo sapiens
gtcagacctgggggcggggcacacgttagaagaggggtggagcttgcaaaagtatcgggggcgggactcgctgaggtgcgaaaactgggccagggcagggctttgaccagctacttgagcgtgaaggggcggcgcccgcacgaaggggcgtcccagcttggaggcggggcccggatgggaggggcggggccgagtgcagtatcccgccaggtgagaaggggataagagtcgggcaagcagcttcagccgcaaccacctacaaggccctctcccaagggatcgcagggcctaggtgcctggacccagggtgtgccagcccgtctctgtgcagtccctggaaggggcgctgagaaaggcaccagctccttggaccccacctcccatgctctcactctcatccccgttctcttgtccacacagctcttccaataaaggtgtttctcttcctccttctcctcctt

SEQ ID NO: 438728 - DNA, 1834 bp, Homo sapiens
gtcagacctgggggcggggcacacgttagaagaggggtggagcttgcaaaagtatcgggggcgggactcgctgaggtgcgaaaactgggccagggcagggctttgaccagctacttgagcgtgaaggggcggcgcccgcacgaaggggcgtcccagcttggaggcggggcccggatgggaggggcggggccgagtgcagtatcccgccaggtgagaaggggataagagtcgggcaagcagcttcagccgcaaccacggcacgaagttgggtgggtacgcctggcacttccgggtgaaaccgtgcgtatttccggttaagatggcggcgcccagcagagtcaggtgcggacgactttgtctgtaggagcagcggcggcttgaggacccggggagaccctcaagaatcgacccatcaggacgccagagctgcttcagcggtgaccaccttctccctctaacacattcttcccttcttcacaaacggcccatgtcagacgaaggctcaagggggagccgcctgcccctggcgctgcccccggcctcccagggttgctcttcagggggcggcggcggcggctcctcggctgggggctcgggcaattcccggcccccacgcaacctccaaggcttgctgcagatggccatcaccgcgggctctgaagagccagaccctcctccagaaccgatgagtgaggagaggcgtcagtggctgcaggaggccatgtcggctgccttccgaggccagcgggaggaggtggagcagatgaagagctgcctccgagtgctgtcacagcccatgccccccactgctggggaggccgagcaggcggccgaccagcaagagcgagagggggccctggagctgctggccgacctgtgtgagaacatggacaatgccgcagacttctgccagctgtctggcatgcacctgctggtgggccggtacctggaggcgggggctgcgggactgcggtggcgggcggcacagctcatcggcacgtgcagtcagaacgtggcagccatccaggagcaggtgctgggcctgggtgccctgcgtaagctgctgcggctgctggaccgcgacgcctgcgacacggtgcgcgtcaaggccctcttcgccatctcctgtctggtccgagagcaggaggctgggctgctgcagttcctccgcctggacggcttctctgtgttgatgagggccatgcagcagcaggtgcagaagctcaaggtcaaatcagcattcctgctgcagaacctgctggtgggccaccctgaacacaaagggaccctgtgctccatggggatggtccagcagctggtggccctggtgcggacagagcacagccccttccacgagcacgtgcttggagccctgtgcagcctggtgacagactttccgcagggtgtgcgcgagtgtcgggagccggaactgggcctggaggagctcctccgccaccgctgtcagctgctgcagcagcatgaggagtaccaggaggagctggagttctgtgaaaagctgctacagacctgtttctccagcccagcggacgacagcatggatcggtgaaaccaggtggcttcttgcccccttctccgtgggaaccccaggcctcttgcctccctccccacctacaaggccctctcccaagggatcgcagggcctaggtgcctggacccagggtgtgccagcccgtctctgtgcagtccctggaaggggcgctgagaaaggcaccagctccttggaccccacctcccatgctctcactctcatccccgttctcttgtccacacagctcttccaataaaggtgtttctcttcctccttctcctcctt

SEQ ID NO: 438729 - DNA, 1817 bp, Homo sapiens
gtcagacctgggggcggggcacacgttagaagaggggtggagcttgcaaaagtatcgggggcgggactcgctgaggtgcgaaaactgggccagggcagggctttgaccagctacttgagcgtgaaggggcggcgcccgcacgaaggggcgtcccagcttggaggcggggcccggatgggaggggcggggccgagtgcagtatcccgccaggtgagaaggggataagagtcgggcaagcagcttcagccgcaaccacggcacgaagttgggtgggtacgcctggcacttccgggtgaaaccgtgcgtatttccggttaagatggcggcgcccagcagagtcaggtgcggacgactttgtctgtaggagcagcggcggcttgaggacccggggagaccctcaagaatcgacccatcaggacgccagagctgcttcagcggtgaccaccttctccctctaacacattcttcccttcttcacaaacggcccatgtcagacgaaggctcaagggggagccgcctgcccctggcgctgcccccggcctcccagggttgctcttcagggggcggcggcggcggctcctcggctgggggctcgggcaattcccggcccccacgcaacctccaaggcttgctgcagatggccatcaccgcgggctctgaagagccagaccctcctccagaaccgatgagtgaggagaggcgtcagtggctgcaggaggccatgtcggctgccttccgaggccagcgggaggaggtggagcagatgaagagctgcctccgagtgctgtcacagcccatgccccccactgctggggaggccgagcaggcggccgaccagcaagagcgagagggggccctggagctgctggccgacctgtgtgagaacatggacaatgccgcagacttctgccagctgtctggcatgcacctgctggtgggccggtacctggaggcgggggctgcgggactgcggtggcgggcggcacagctcatcggcacgtgcagtcagaacgtggcagccatccaggagcaggtgctgggcctgggtgccctgcgtaagctgctgcggctgctggaccgcgacgcctgcgacacggtgcgcgtcaaggccctcttcgccatctcctgtctggtccgagagcaggaggctgggctgctgcagttcctccgcctggacggcttctctgtgttgatgagggccatgcagcagcaggtgcagaagctcaaggtcaaatcagcattcctgctgcagaacctgctggtgggccaccctgaacacaaagggaccctgtgctccatggggatggtccagcagctggtggccctggtgcggacagagcacagccccttccacgagcacgtgcttggagccctgtgcagcctggtgacagactttccgcagggtgtgcgcgagtgtcgggagccggaactgggcctggaggagctcctccgccaccgctgtcagctgctgcagcagcatgaggagtaccaggaggagctggagttctgtgaaaagctgctacagacctgtttctccagcccagcggacgacagcatggatcggtgaaaccaggtggcttcttgcccccttctccgtgggaaccccaggcctcttgcctccctccccacctacaaggccctctcccaagggatcgcagggcctaggtgcctggacccagggtgtgccagcccgtctctgtgcagtccctggaaggggcgctgagaaaggcaccagctccttggacccactccatggtttatctcatcccgttctgtccacagttccatagagggttcttctccaaaacaaaacaaaa

SEQ ID NO: 438730 - DNA, 1579 bp, Homo sapiens
ggagaggcttatgactttggggaagggtcctgtgggtatgaaggaaggaaaaggggctgtggttaagtgggctgggggcagagtggtttggggtcatggggggtcgccgagctcccctaaaacgccgccttctcagcaaccctcaagaatcgacccatcaggacgccagagctgcttcagcggtgaccaccttctccctctaacacattcttcccttcttcacaaacggcccatgtcagacgaaggctcaagggggagccgcctgcccctggcgctgcccccggcctcccagggttgctcttcagggggcggcggcggcggctcctcggctgggggctcgggcaattcccggcccccacgcaacctccaaggcttgctgcagatggccatcaccgcgggctctgaagagccagaccctcctccagaaccgatgagtgaggagaggcgtcagtggctgcaggaggccatgtcggctgccttccgaggccagcgggaggaggtggagcagatgaagagctgcctccgagtgctgtcacagcccatgccccccactgctggggaggccgagcaggcggccgaccagcaagagcgagagggggccctggagctgctggccgacctgtgtgagaacatggacaatgccgcagacttctgccagctgtctggcatgcacctgctggtgggccggtacctggaggcgggggctgcgggactgcggtggcgggcggcacagctcatcggcacgtgcagtcagaacgtggcagccatccaggagcaggtgctgggcctgggtgccctgcgtaagctgctgcggctgctggaccgcgacgcctgcgacacggtgcgcgtcaaggccctcttcgccatctcctgtctggtccgagagcaggaggctgggctgctgcagttcctccgcctggacggcttctctgtgttgatgagggccatgcagcagcaggtgcagaagctcaaggtcaaatcagcattcctgctgcagaacctgctggtgggccaccctgaacacaaagggaccctgtgctccatggggatggtccagcagctggtggccctggtgcggacagagcacagccccttccacgagcacgtgcttggagccctgtgcagcctggtgacagactttccgcagggtgtgcgcgagtgtcgggagccggaactgggcctggaggagctcctccgccaccgctgtcagctgctgcagcagcatgaggagtaccaggaggagctggagttctgtgaaaagctgctacagacctgtttctccagcccagcggacgacagcatggatcggtgaaaccaggtggcttcttgcccccttctccgtgggaaccccaggcctcttgcctccctccccacctacaaggccctctcccaagggatcgcagggcctaggtgcctggacccagggtgtgccagcccgtctctgtgcagtccctggaaggggcgctgagaaaggcaccagctccttggaccccacctcccatgctctcactctcatccccgttctcttgtccacacagctcttccaataaaggtgtttctcttcctccttctcctcctt

SEQ ID NO: 438731 - DNA, 1609 bp, Homo sapiens
ggagaggcttatgactttggggaagggtcctgtgggtatgaaggaaggaaaaggggctgtggttaagtgggctgggggcagagtggtttggggtcatggggggtcgccgagctcccctaaaacgccgccttctcagcaaccctcaagaatcgacccatcaggacgccagagctgcttcagcggtgaccaccttctccctctaacacattcttcccttcttcacaaacggcccatgtcactcctcggctgggggctcgggcaattcccggcccccacgcaacctccaaggcttgctgcagatggccatcaccgcgggctctgaagagccagaccctcctccagaaccgatgagtgaggagaggcgtcagtggctgcaggaggccatgtcggctgccttccgaggccagcgggaggaggtggagcagatgaagagctgcctccgagtgctgtcacagcccatgccccccactgctggggaggccgagcaggcggccgaccagcaagagcgagagggggccctggagctgctggccgacctgtgtgagaacatggacaatgccgcagacttctgccagctgtctggcatgcacctgctggtgggccggtacctggaggcgggggctgcgggactgcggtggcgggcggcacagctcatcggcacgtgcagtcagaacgtggcagccatccaggagcaggtgctgggcctgggtgccctgcgtaagctgctgcggctgctggaccgcgacgcctgcgacacggtgcgcgtcaaggccctcttcgccatctcctgtctggtccgagagcaggaggctgggctgctgcagttcctccgcctggacggcttctctgtgttgatgagggccatgcagcagcaggtgcagaagctcaaggtcaaatcagcattcctgctgcagaacctgctggtgggccaccctgaacacaaagggaccctgtgctccatggggatggtccagcagctggtggccctggtgcggacagagcacagccccttccacgagcacgtgcttggagccctgtgcagcctggtgacagactttccgcagggtgtgcgcgagtgtcgggagccggaactgggcctggaggagctcctccgccaccgctgtcagctgctgcagcagcatgaggagtaccaggaggagctggagttctgtgaaaagctgctacagacctgtttctccagcccagcggacgacagcatggatcggtgaaaccaggtggcttcttgcccccttctccgtgggaaccccaggcctcttgcctccctccccacctacaaggccctctcccaagggatcgcagggcctaggtgcctggacccagggtgtgccagcccgtctctgtgcagtccctggaaggggcgctgagaaaggcaccagctccttggaccccacctcccatgctctcactctcatccccgttctcttgtccacacagctcttccaataaaggtgtttctcttcctccttctcctccttcactgccgcctttgtcatctcctttggagggtgcatgggggacgggaggaggggcacgggtttaagggacttggggagccactggaagaataataaaagtgttgctctttatc

SEQ ID NO: 438732 - DNA, 1191 bp, Homo sapiens
gtcagacctgggggcggggcacacgttagaagaggggtggagcttgcaaaagtatcgggggcgggactcgctgaggtgcgaaaactgggccagggcagggctttgaccagctacttgagcgtgaaggggcggcgcccgcacgaaggggcgtcccagcttggaggcggggcccggatgggaggggcggggccgagtgcagtatcccgccaggtgagaaggggataagagtcgggcaagcagcttcagccgcaaccacggcacgaagttgggtgggtacgcctggcacttccgggtgaaaccgtgcgtatttccggttaagatggcggcgcccagcagagtcaggtgcggacgactttgtctgtaggagcagcggcggcttgaggacccggggagaccctcaagaatcgacccatcaggacgccagagctgcttcagcggtgaccaccttctccctctaacacattcttcccttcttcacaaacggcccatgtcatgactgataggtgctcaaagagagaaatagccagcctagcccctatgctgctagccccctgtgcctacccatgtggtttgcttcttcatgtggtgtgcagtgctgtgctgtgctgtgctgtgctgtgctggtgtcttctcttacatgtctttgggagtgtgctatctagatgaggtcatagtattagcccctggatttcctccgccagtctgtcaatatgtctacccctatgtagtgtctatgaatgctgttaggtcactaatagtatagatagcctatatacattcgcaagtcctgtagtggtctattcttaagtgactgtagttgcctagtgatgatcgccctatccctatctcaaagtgatagtcgctgatattaatgagtgtaagacagaagatggtagatattctgatttgcatgattctagtggctaaattctgttaagttcggtattcgtcagtaagtgatctaaagttctaaatctcccatttctctattatgatcgcgcggttgtctttgtgtttatcttactttactaagtgtaagccgcttggttacggagttattctttgcggtcctatttcccattctctcttttggtgtatgtctgaaatagcttgtcttcgacctccgccacaaacccccccttggcaacaaatcgcgaggaatgtgacttggtgcctaggcggccaacgacc

SEQ ID NO: 438733 - DNA, 1838 bp, Homo sapiens
gtcagacctgggggcggggcacacgttagaagaggggtggagcttgcaaaagtatcgggggcgggactcgctgaggtgcgaaaactgggccagggcagggctttgaccagctacttgagcgtgaaggggcggcgcccgcacgaaggggcgtcccagcttggaggcggggcccggatgggaggggcggggccgagtgcagtatcccgccagatggcggcgcccagcagagtcaggtgcggacgactttgtctgtaggagcagcggcggcttgaggacccggggagaccctcaagaatcgacccatcaggacgccagagctgcttcagcggtgaccaccttctccctctaacacattcttcccttcttcacaaacggcccatgtcagacgaaggctcaagggggagccgcctgcccctggcgctgcccccggcctcccagggttgctcttcagggggcggcggcggcggctcctcggctgggggctcgggcaattcccggcccccacgcaacctccaaggcttgctgcagatggccatcaccgcgggctctgaagagccagaccctcctccagaaccgatgagtgaggagaggcgtcagtggctgcaggaggccatgtcggctgccttccgaggccagcgggaggaggtggagcagatgaagagctgcctccgagtgctgtcacagcccatgccccccactgctggggaggccgagcaggcggccgaccagcaagagcgagagggggccctggagctgctggccgacctgtgtgagaacatggacaatgccgcagacttctgccagctgtctggcatgcacctgctggtgggccggtacctggaggcgggggctgcgggactgcggtggcgggcggcacagctcatcggcacgtgcagtcagaacgtggcagccatccaggagcaggtgctgggcctgggtgccctgcgtaagctgctgcggctgctggaccgcgacgcctgcgacacggtgcgcgtcaaggccctcttcgccatctcctgtctggtccgagagcaggaggctgggctgctgcagttcctccgcctggacggcttctctgtgttgatgagggccatgcagcagcaggtgcagaagctcaaggtcaaatcagcattcctgctgcagaacctgctggtgggccaccctgaacacaaagggaccctgtgctccatggggatggtccagcagctggtggccctggtgcggacagagcacagccccttccacgagcacgtgcttggagccctgtgcagcctggtgacagactttccgcagggtgtgcgcgagtgtcgggagccggaactgggcctggaggagctcctccgccaccgctgtcagctgctgcagcagcatgaggagtaccaggaggagctggagttctgtgaaaagctgctacagacctgtttctccagcccagcggacgacagcatggatcggtgaaaccaggtggcttcttgcccccttctccgtgggaaccccaggcctcttgcctccctccccacctacaaggccctctcccaagggatcgcagggcctaggtgcctggacccagggtgtgccagcccgtctctgtgcagtccctggaaggggcgctgagaaaggcaccagctccttggaccccacctcccatgctctcactctcatccccgttctcttgtccacacagctcttccaataaaggtgtttctcttcctccttctcctccttcactgccgcctttgtcatctcctttggagggtgcatgggggacgggaggaggggcacgggtttaagggacttggggagccactggaagaataataaaagtgttgctctttatc

SEQ ID NO: 438734 - DNA, 1725 bp, Homo sapiens
gtcagacctgggggcggggcacacgttagaagaggggtggagcttgcaaaagtatcgggggcgggactcgctgaggtgcgaaaactgggccagggcagggctttgaccagctacttgagcgtgaaggggcggcgcccgcacgaaggggcgtcccagcttggaggcggggcccggatgggaggggcggggccgagtgcagtatcccgccagatggcggcgcccagcagagtcaggtgcggacgactttgtctgtaggagcagcggcggcttgaggacccggggagaccctcaagaatcgacccatcaggacgccagagctgcttcagcggtgaccaccttctccctctaacacattcttcccttcttcacaaacggcccatgtcagacgaaggctcaagggggagccgcctgcccctggcgctgcccccggcctcccagggttgctcttcagggggcggcggcggcggctcctcggctgggggctcgggcaattcccggcccccacgcaacctccaaggcttgctgcagatggccatcaccgcgggctctgaagagccagaccctcctccagaaccgatgagtgaggagaggcgtcagtggctgcaggaggccatgtcggctgccttccgaggccagcgggaggaggtggagcagatgaagagctgcctccgagtgctgtcacagcccatgccccccactgctggggaggccgagcaggcggccgaccagcaagagcgagagggggccctggagctgctggccgacctgtgtgagaacatggacaatgccgcagacttctgccagctgtctggcatgcacctgctggtgggccggtacctggaggcgggggctgcgggactgcggtggcgggcggcacagctcatcggcacgtgcagtcagaacgtggcagccatccaggagcaggtgctgggcctgggtgccctgcgtaagctgctgcggctgctggaccgcgacgcctgcgacacggtgcgcgtcaaggccctcttcgccatctcctgtctggtccgagagcaggaggctgggctgctgcagttcctccgcctggacggcttctctgtgttgatgagggccatgcagcagcaggtgcagaagctcaaggtcaaatcagcattcctgctgcagaacctgctggtgggccaccctgaacacaaagggaccctgtgctccatggggatggtccagcagctggtggccctggtgcggacagagcacagccccttccacgagcacgtgcttggagccctgtgcagcctggtgacagactttccgcagggtgtgcgcgagtgtcgggagccggaactgggcctggaggagctcctccgccaccgctgtcagctgctgcagcagcatgaggagtaccaggaggagctggagttctgtgaaaagctgctacagacctgtttctccagcccagcggacgacagcatggatcggtgaaaccaggtggcttcttgcccccttctccgtgggaaccccaggcctcttgcctccctccccacctacaaggccctctcccaagggatcgcagggcctaggtgcctggacccagggtgtgccagcccgtctctgtgcagtccctggaaggggcgctgagaaaggcaccagctccttggaccccacctcccatgctctcactctcatccccgttctcttgtccacacagctcttccaataaaggtgtttctcttcctccttctcctcctt

SEQ ID NO: 438735 - DNA, 1926 bp, Homo sapiens
gtcagacctgggggcggggcacacgttagaagaggggtggagcttgcaaaagtatcgggggcgggactcgctgaggtgcgaaaactgggccagggcagggctttgaccagctacttgagcgtgaaggggcggcgcccgcacgaaggggcgtcccagcttggaggcggggcccggatgggaggggcggggccgagtgcagtatcccgccaggtgagaaggggataagagtcgggcaagcagcttcagccgcaaccacggcacgaagttgggtgggtacgcctggcacttccgggtgaaaccgtgcgtatttccggttaagatggcggcgcccagcagagtcaggtgcggacgactttgtctgtaggagcagcggcggcttgaggacccggggagaccctcaagaatcgacccatcaggacgccagagctgcttcagcggtgaccaccttctccctctaacacattcttcccttcttcacaaacggcccatgtcagacgaaggctcaagggggagccgcctgcccctggcgctgcccccggcctcccagggttgctcttcagggggcggcggcggcggctcctcggctgggggctcgggcaattcccggcccccacgcaacctccaaggcttgctgcagatggccatcaccgcgggctctgaagagccagaccctcctccagaaccgatgagtgaggagaggcgtcagtggctgcaggaggccatgtcggctgccttccgaggccagcgggaggaggtggagcagatgaagagctgcctccgagtgctgtcacagcccatgccccccactgctggggaggccgagcaggcggccgaccagcaagagcgagagggggccctggagctgctggccgacctgtgtgagaacatggacaatgccgcagacttctgccagctgtctggcatgcacctgctggtgggccggtacctggaggcgggggctgcgggactgcggtggcgggcggcacagctcatcggcacgtgcagtcagaacgtggcagccatccaggagcaggtgctgggcctgggtgccctgcgtaagctgctgcggctgctggaccgcgacgcctgcgacacggtgcgcgtcaaggccctcttcgccatctcctgtctggtccgagagcaggaggctgggctgctgcagttcctccgcctggacggcttctctgtgttgatgagggccatgcagcagcaggtgcagaagctcaaggtcaaatcagcattcctgctgcagaacctgctggtgggccaccctgaacacaaagggaccctgtgctccatggggatggtccagcagctggtggccctggtgcggacagagcacagccccttccacgagcacgtgcttggagccctgtgcaagggtgtgcgcgagtgtcgggagccggaactgggcctggaggagctcctccgccaccgctgtcagctgctgcagcagcatgaggagtaccaggaggagctggagttctgtgaaaagctgctacagacctgtttctccagcccagcggacgacagcatggatcggtgaaaccaggtggcttcttgcccccttctccgtgggaaccccaggcctcttgcctccctccccacctacaaggccctctcccaagggatcgcagggcctaggtgcctggacccagggtgtgccagcccgtctctgtgcagtccctggaaggggcgctgagaaaggcaccagctccttggaccccacctcccatgctctcactctcatccccgttctcttgtccacacagctcttccaataaaggtgtttctcttcctccttctcctccttcactgccgcctttgtcatctcctttggagggtgcatgggggacgggaggaggggcacgggtttaagggacttggggagccactggaagaataataaaagtgttgctctttatc

SEQ ID NO: 438736 - DNA, 1939 bp, Homo sapiens
gtcagacctgggggcggggcacacgttagaagaggggtggagcttgcaaaagtatcgggggcgggactcgctgaggtgcgaaaactgggccagggcagggctttgaccagctacttgagcgtgaaggggcggcgcccgcacgaaggggcgtcccagcttggaggcggggcccggatgggaggggcggggccgagtgcagtatcccgccaggtgagaaggggataagagtcgggcaagcagcttcagccgcaaccacggcacgaagttgggtgggtacgcctggcacttccgggtgaaaccgtgcgtatttccggttaagatggcggcgcccagcagagtcaggtgcggacgactttgtctgtaggagcagcggcggcttgaggacccggggaggtgagatccgccttattccggcgcccctcttcggagaggagggagaagacttgttgctaaggagaccaaagggcgggcttgttgctacggaggcggagcagtgagaccctcaagaatcgacccatcaggacgccagagctgcttcagcggtgaccaccttctccctctaacacattcttcccttcttcacaaacggcccatgtcagacgaaggctcaagggggagccgcctgcccctggcgctgcccccggcctcccagggttgctcttcagggggcggcggcggcggctcctcggctgggggctcgggcaattcccggcccccacgcaacctccaaggcttgctgcagatggccatcaccgcgggctctgaagagccagaccctcctccagaaccgatgagtgaggagaggcgtcagtggctgcaggaggccatgtcggctgccttccgaggccagcgggaggaggtggagcagatgaagagctgcctccgagtgctgtcacagcccatgccccccactgctggggaggccgagcaggcggccgaccagcaagagcgagagggggccctggagctgctggccgacctgtgtgagaacatggacaatgccgcagacttctgccagctgtctggcatgcacctgctggtgggccggtacctggaggcgggggctgcgggactgcggtggcgggcggcacagctcatcggcacgtgcagtcagaacgtggcagccatccaggagcaggtgctgggcctgggtgccctgcgtaagctgctgcggctgctggaccgcgacgcctgcgacacggtgcgcgtcaaggccctcttcgccatctcctgtctggtccgagagcaggaggctgggctgctgcagttcctccgcctggacggcttctctgtgttgatgagggccatgcagcagcaggtgcagaagctcaaggtcaaatcagcattcctgctgcagaacctgctggtgggccaccctgaacacaaagggaccctgtgctccatggggatggtccagcagctggtggccctggtgcggacagagcacagccccttccacgagcacgtgcttggagccctgtgcagcctggtgacagactttccgcagggtgtgcgcgagtgtcgggagccggaactgggcctggaggagctcctccgccaccgctgtcagctgctgcagcagcatgaggagtaccaggaggagctggagttctgtgaaaagctgctacagacctgtttctccagcccagcggacgacagcatggatcggtgaaaccaggtggcttcttgcccccttctccgtgggaaccccaggcctcttgcctccctccccacctacaaggccctctcccaagggatcgcagggcctaggtgcctggacccagggtgtgccagcccgtctctgtgcagtccctggaaggggcgctgagaaaggcaccagctccttggaccccacctcccatgctctcactctcatccccgttctcttgtccacacagctcttccaataaaggtgtttctcttcctccttctcctcctt

SEQ ID NO: 438737 - DNA, 3863 bp, Homo sapiens
  misc_feature (2192)..(2192): n is a, c, g, or t
gccccagctgtgaccagagcaaccagagcctgccacccgacgcaaccccaggctcactcgctcacccccctgggccctcctgcttccggccgggggcaccatggcctgccgctcctgcgtggttggcttcagcagcctcagcagctgtgaggtgaccccggtgggcagcccccggcctggaacctcaggatgggacagctgcagggcccccgggccgggcttcagctcccgcagcctcacaggctgctggtcggctggcactatctccaaggtgactgtgaaccccggcctgctggtgcccctggatgtcaagttggaccccgctgttcagcagctgaagaaccaggagaaggaggagatgaaggccctcaatgataaatttgcctccctaattggcaaggtgcaagccctggaacagcgcaaccagctgctggagacacgctggagcttcctgcagggccaggactcagccatcttcgacctcgggcatctctatgaggaatatcagggccggctgcaggaggaactgcgcaaagtgagccaggagcgggggcagctggaggccaacctgctgcaggtgctggagaaggttgaggagtttcgaatcaggtatgaggatgagatctccaagcgcacagacatggagttcacctttgttcagctgaagaaggacctggatgcagagtgtcttcatcggactgaactggaaaccaagttaaaaagcctggagagcttcgtggagttgatgaaaaccatctatgagcaggagctgaaggacctggcagcacaggtgaaggatgtgtcggtgaccgtcggcatggacagccgctgccacatcgacctgagcggcatcgtggaggaggtgaaggcccagtatgacgccgtcgcggctcgcagcctggaggaggccgaggcatactctcggagccagctggaggagcaggccgcccgctcggccgagtatgggagcagcctccagagcagccgcagcgagatcgcggatctcaatgtgcgcatccagaagctgcggtcccagatcctctctgtcaagagccattgcctgaaactggaggagaacatcaagacagctgaggagcagggtgagctggccttccaggatgccaagaccaagctggcccagctggaggccgccctgcagcaggccaagcaggacatggcgcggcagctgcgcaagtaccaggagctgatgaacgtcaagctggccctggacatcgagatcgccacctacaggaagctggtggagggcgaggagggcaggatggactcgccctcagccactgtggtcagcgctgtgcagtccaggtgcaaaaccgctgcctccagatcaggcctctccaaggccccctcccgaaagaagaagggcagcaaaggccccgtgatcaaaatcaccgaaatgtcagagaagtacttctcgcaggagtcggaggtctcagagtaaggcggctggaccccaggaaccccagggcactccactgcagcaggagggacttaagctagactcaagaaagcagcttggagcctctaggttgagaagagaggcaaaacctgatattgaactgagagaggggttcaaaactgactgtgttttgtgggctgccagggtgggagaggagcatcaccagctcctcagagccactccgctccatatcagtatctcacagtcccatccttccaaccttctggccagaggttttcctgatgggtgagtcggaattaggggtcagttttgtctccacctcctcgctcctctgaggctcctcctccagcatcaggctctgccaaggcccctctgactcttgcccaatccttgaccttgactcctatctcaagccttgccttgtctctgcctcggaactgggactgggactggctcatccacctatgtgcgggagccgaggaggacggcgtgggccctgtcctgtatctggaattcctgggaaggctggctgctgaagaccctcttggctttcccgtgctctttgggctccccagagacctgacagtattagggagtgaagggaggaggggccctggctatttgggacctaagcctaggccccagagatcagcccgaacacccgcatcccttcctcctcccatgggtccctcccagtaggcagtagtcagaactggatgggctgcccccagccagctcccagcagcttctccgnaagctgctcttgccataatcaactccctgggagtggaagccagatggcagcttgagattgggcaggagcattcgatcttcctttcacctccctgccatgctggggtcctacccagcctggatctgagctctgtgcccccagccgggttgttcccagcctgagcaccgggctttggtgcaccaggccttggagacccctggtcccacccctgccgtgaagccccaggcccacttcccaagaatctcacttctcagggcctctgttctcctctccactgggccaaatagcctggccctcccctccttggcattcatgggggagcccaggaaccccccacacctatggggttagagctcctcctttcttctcactccttccccttcctccctccatgcccactccccctgcctccagcaggccaggaagaaggcacagtccaggcaagtctgggagcttccaagcccttgaggtccagctgtggggcccaaatgacagccttacaagggttctaccagagaggaaaattccacatcccaccagaagacaggggtgttggcaggcatactcctatctcctcctcttggctctcaatgctgaggcttgcagaggcatcccagcggcaccagcctcccactgcacagcttccttccctccttcactctcctctcccctccctgccccttgcctcacctcctcttctagactgcattagattcattcatctcattttccaggacatgttggccagaggtctgggcccatcccaggcctcaaggccctccaggcctgtggggagcactggagggttactgactctctggccatgggaactcagagattctcatccccaaagtcccaaaagagggtgctgattggtgcttttcctcaggctcttcattggtttccaagggagcaaatcctcagtggggatacaagacatataaagtatatattattttttcataacttatgtggcttttaacttattgcttcccttcctgtttctgcatgatcagtctgtatgtactatctggaaagataacacatactccagccacctcacctgattggctatcttggggccatgtccccttcttgctgccacaggatgaataaagtgttgagatttgtctatggagaaagctgtgtgtctgtttttatctcccctctcaggaccagtcagccactggtcaatcaggctgatcatggaacattaggaattctccaattaagggagaaaaagtccagggacttagttatatcttcagaccagtgcagctgggacacacaaagttctcctgtctcaccatctgatatggtttggatgctcgtcccctccaaatctcatgttgaaatgtaattcccagtgttggaagtggagcctggtgggaagtatttggatcatgagagaggatccttcatgaatggctcagcaccatctccttggtgatgagtgagttctcactcaattcacatagatatggttgtttaaaagagtctgagacctctcccctctttctcgccatgtgatatgcctgctcccccttcaccttccgcctttactgtaagcttcctgaggccctcaccagaagctgagcaaatgttggtgccatgccagtacagcctgcagaattgtgagccaaaataaatgtcttttctttataaattaaa

SEQ ID NO: 438738 - DNA, 1953 bp, Homo sapiens
  misc_feature (282)..(282): n is a, c, g, or t
gtaccaacttaggtgcgagctgctaactcaggcgcgagctgctaactcaggggctggctgctgaagaccctcttggctttcccgtgctctttgggctccccagagacctgacagtattagggagtgaagggaggaggggccctggctatttgggacctaagcctaggccccagagatcagcccgaacacccgcatcccttcctcctcccatgggtccctcccagtaggcagtagtcagaactggatgggctgcccccagccagctcccagcagcttctccgnaagctgctcttgccataatcaactccctgggagtggaagccagatggcagcttgagattgggcaggagcattcgatcttcctttcacctccctgccatgctggggtcctacccagcctggatctgagctctgtgcccccagccgggttgttcccagcctgagcaccgggctttggtgcaccaggccttggagacccctggtcccacccctgccgtgaagccccaggcccacttcccaagaatctcacttctcagggcctctgttctcctctccactgggccaaatagcctggccctcccctccttggcattcatgggggagcccaggaaccccccacacctatggggttagagctcctcctttcttctcactccttccccttcctccctccatgcccactccccctgcctccagcaggccaggaagaaggcacagtccaggcaagtctgggagcttccaagcccttgaggtccagctgtggggcccaaatgacagccttacaagggttctaccagagaggaaaattccacatcccaccagaagacaggggtgttggcaggcatactcctatctcctcctcttggctctcaatgctgaggcttgcagaggcatcccagcggcaccagcctcccactgcacagcttccttccctccttcactctcctctcccctccctgccccttgcctcacctcctcttctagactgcattagattcattcatctcattttccaggacatgttggccagaggtctgggcccatcccaggcctcaaggccctccaggcctgtggggagcactggagggttactgactctctggccatgggaactcagagattctcatccccaaagtcccaaaagagggtgctgattggtgcttttcctcaggctcttcattggtttccaagggagcaaatcctcagtggggatacaagacatataaagtatatattattttttcataacttatgtggcttttaacttattgcttcccttcctgtttctgcatgatcagtctgtatgtactatctggaaagataacacatactccagccacctcacctgattggctatcttggggccatgtccccttcttgctgccacaggatgaataaagtgttgagatttgtctatggagaaagctgtgtgtctgtttttatctcccctctcaggaccagtcagccactggtcaatcaggctgatcatggaacattaggaattctccaattaagggagaaaaagtccagggacttagttatatcttcagaccagtgcagctgggacacacaaagttctcctgtctcaccatctgatatggtttggatgctcgtcccctccaaatctcatgttgaaatgtaattcccagtgttggaagtggagcctggtgggaagtatttggatcatgagagaggatccttcatgaatggctcagcaccatctccttggtgatgagtgagttctcactcaattcacatagatatggttgtttaaaagagtctgagacctctcccctctttctcgccatgtgatatgcctgctcccccttcaccttccgcctttactgtaagcttcctgaggccctcaccagaagctgagcaaatgttggtgccatgccagtacagcctgcagaattgtgagccaaaataaatgtcttttctttataaattaaa

SEQ ID NO: 438739 - DNA, 2939 bp, Homo sapiens
  misc_feature (2227)..(2227): n is a, c, g, or t
gccccagctgtgaccagagcaaccagagcctgccacccgacgcaaccccaggctcactcgctcacccccctgggccctcctgcttccggccgggggcaccatggcctgccgctcctgcgtggttggcttcagcagcctcagcagctgtgaggtgaccccggtgggcagcccccggcctggaacctcaggatgggacagctgcagggcccccgggccgggcttcagctcccgcagcctcacaggctgctggtcggctggcactatctccaaggtgactgtgaaccccggcctgctggtgcccctggatgtcaagttggaccccgctgttcagcagctgaagaaccaggagaaggaggagatgaaggccctcaatgataaatttgcctccctaattggcaaggtgcaagccctggaacagcgcaaccagctgctggagacacgctggagcttcctgcagggccaggactcagccatcttcgacctcgggcatctctatgaggaatatcagggccggctgcaggaggaactgcgcaaagtgagccaggagcgggggcagctggaggccaacctgctgcaggtgctggagaaggttgaggagtttcgaatcaggtatgaggatgagatctccaagcgcacagacatggagttcacctttgttcagctgaagaaggacctggatgcagagtgtcttcatcggactgaactggaaaccaagttaaaaagcctggagagcttcgtggagttgatgaaaaccatctatgagcaggagctgaaggacctggcagcacaggtgaaggatgtgtcggtgaccgtcggcatggacagccgctgccacatcgacctgagcggcatcgtggaggaggtgaaggcccagtatgacgccgtcgcggctcgcagcctggaggaggccgaggcatactctcggagccagctggaggagcaggccgcccgctcggccgagtatgggagcagcctccagagcagccgcagcgagatcgcggatctcaatgtgcgcatccagaagctgcggtcccagatcctctctgtcaagagccattgcctgaaactggaggagaacatcaagacagctgaggagcagggtgagctggccttccaggatgccaagaccaagctggcccagctggaggccgccctgcagcaggccaagcaggacatggcgcggcagctgcgcaagtaccaggagctgatgaacgtcaagctggccctggacatcgagatcgccacctacaggaagctggtggagggcgaggagggcaggatggactcgccctcagccactgtggtcagcgctgtgcagtccaggtgcaaaaccgccccttccctcccctaccccttatgttccctgtagctgcctccagatcaggcctctccaaggccccctcccgaaagaagaagggcagcaaaggccccgtgatcaaaatcaccgaaatgtcagagaagtacttctcgcaggagtcggaggtctcagagtaaggcggctggaccccaggaaccccagggcactccactgcagcaggagggacttaagctagactcaagaaagcagcttggagcctctaggttgagaagagaggcaaaacctgatattgaactgagagaggggttcaaaactgactgtgttttgtgggctgccagggtgggagaggagcatcaccagctcctcagagccactccgctccatatcagtatctcacagtcccatccttccaaccttctggccagaggttttcctgatgggtgagtcggaattaggggtcagttttgtctccacctcctcgctcctctgaggctcctcctccagcatcaggctctgccaaggcccctctgactcttgcccaatccttgaccttgactcctatctcaagccttgccttgtctctgcctcggaactgggactgggactggctcatccacctatgtgcgggagccgaggaggacggcgtgggccctgtcctgtatctggaattcctgggaaggctggctgctgaagaccctcttggctttcccgtgctctttgggctccccagagacctgacagtattagggagtgaagggaggaggggccctggctatttgggacctaagcctaggccccagagatcagcccgaacacccgcatcccttcctcctcccatgggtccctcccagtaggcagtagtcagaactggatgggctgcccccagccagctcccagcagcttctccgnaagctgctcttgccataatcaactccctgggagtggaagccagatggcagcttgagattgggcaggagcattcgatcttcctttcacctccctgccatgctggggtcctacccagcctggatctgagctctgtgcccccagccgggttgttcccagcctgagcaccgggctttggtgcaccaggccttggagacccctggtcccacccctgccgtgaagccccaggcccacttcccaagaatctcacttctcagggcctctgttctcctctccactgggccaaatagcctggccctcccctccttggcattcatgggggagcccaggaaccccccacacctatggggttagagctcctcctttcttctcactccttccccttcctccctccatgcccactccccctgcctccagcaggccaggaagaaggcacagtccaggcaagtctgggagcttccaagcccttgaggtccagctgtggggcccaaatgacagccttacaagggttctaccagagaggaaaattccacatcccaccagaagacaggggtgttggcaggcatactcctatctcctcctcttggctctcaatgctgaggcttgcagaggcatcccagcggcaccagcctcccactgcacagcttccttccctccttcactctcctctcccctccctgccgtgaagccctgggcccacttcccaagaatctca

SEQ ID NO: 438740 - DNA, 3898 bp, Homo sapiens
  misc_feature (2227)..(2227): n is a, c, g, or t
gccccagctgtgaccagagcaaccagagcctgccacccgacgcaaccccaggctcactcgctcacccccctgggccctcctgcttccggccgggggcaccatggcctgccgctcctgcgtggttggcttcagcagcctcagcagctgtgaggtgaccccggtgggcagcccccggcctggaacctcaggatgggacagctgcagggcccccgggccgggcttcagctcccgcagcctcacaggctgctggtcggctggcactatctccaaggtgactgtgaaccccggcctgctggtgcccctggatgtcaagttggaccccgctgttcagcagctgaagaaccaggagaaggaggagatgaaggccctcaatgataaatttgcctccctaattggcaaggtgcaagccctggaacagcgcaaccagctgctggagacacgctggagcttcctgcagggccaggactcagccatcttcgacctcgggcatctctatgaggaatatcagggccggctgcaggaggaactgcgcaaagtgagccaggagcgggggcagctggaggccaacctgctgcaggtgctggagaaggttgaggagtttcgaatcaggtatgaggatgagatctccaagcgcacagacatggagttcacctttgttcagctgaagaaggacctggatgcagagtgtcttcatcggactgaactggaaaccaagttaaaaagcctggagagcttcgtggagttgatgaaaaccatctatgagcaggagctgaaggacctggcagcacaggtgaaggatgtgtcggtgaccgtcggcatggacagccgctgccacatcgacctgagcggcatcgtggaggaggtgaaggcccagtatgacgccgtcgcggctcgcagcctggaggaggccgaggcatactctcggagccagctggaggagcaggccgcccgctcggccgagtatgggagcagcctccagagcagccgcagcgagatcgcggatctcaatgtgcgcatccagaagctgcggtcccagatcctctctgtcaagagccattgcctgaaactggaggagaacatcaagacagctgaggagcagggtgagctggccttccaggatgccaagaccaagctggcccagctggaggccgccctgcagcaggccaagcaggacatggcgcggcagctgcgcaagtaccaggagctgatgaacgtcaagctggccctggacatcgagatcgccacctacaggaagctggtggagggcgaggagggcaggatggactcgccctcagccactgtggtcagcgctgtgcagtccaggtgcaaaaccgccccttccctcccctaccccttatgttccctgtagctgcctccagatcaggcctctccaaggccccctcccgaaagaagaagggcagcaaaggccccgtgatcaaaatcaccgaaatgtcagagaagtacttctcgcaggagtcggaggtctcagagtaaggcggctggaccccaggaaccccagggcactccactgcagcaggagggacttaagctagactcaagaaagcagcttggagcctctaggttgagaagagaggcaaaacctgatattgaactgagagaggggttcaaaactgactgtgttttgtgggctgccagggtgggagaggagcatcaccagctcctcagagccactccgctccatatcagtatctcacagtcccatccttccaaccttctggccagaggttttcctgatgggtgagtcggaattaggggtcagttttgtctccacctcctcgctcctctgaggctcctcctccagcatcaggctctgccaaggcccctctgactcttgcccaatccttgaccttgactcctatctcaagccttgccttgtctctgcctcggaactgggactgggactggctcatccacctatgtgcgggagccgaggaggacggcgtgggccctgtcctgtatctggaattcctgggaaggctggctgctgaagaccctcttggctttcccgtgctctttgggctccccagagacctgacagtattagggagtgaagggaggaggggccctggctatttgggacctaagcctaggccccagagatcagcccgaacacccgcatcccttcctcctcccatgggtccctcccagtaggcagtagtcagaactggatgggctgcccccagccagctcccagcagcttctccgnaagctgctcttgccataatcaactccctgggagtggaagccagatggcagcttgagattgggcaggagcattcgatcttcctttcacctccctgccatgctggggtcctacccagcctggatctgagctctgtgcccccagccgggttgttcccagcctgagcaccgggctttggtgcaccaggccttggagacccctggtcccacccctgccgtgaagccccaggcccacttcccaagaatctcacttctcagggcctctgttctcctctccactgggccaaatagcctggccctcccctccttggcattcatgggggagcccaggaaccccccacacctatggggttagagctcctcctttcttctcactccttccccttcctccctccatgcccactccccctgcctccagcaggccaggaagaaggcacagtccaggcaagtctgggagcttccaagcccttgaggtccagctgtggggcccaaatgacagccttacaagggttctaccagagaggaaaattccacatcccaccagaagacaggggtgttggcaggcatactcctatctcctcctcttggctctcaatgctgaggcttgcagaggcatcccagcggcaccagcctcccactgcacagcttccttccctccttcactctcctctcccctccctgccccttgcctcacctcctcttctagactgcattagattcattcatctcattttccaggacatgttggccagaggtctgggcccatcccaggcctcaaggccctccaggcctgtggggagcactggagggttactgactctctggccatgggaactcagagattctcatccccaaagtcccaaaagagggtgctgattggtgcttttcctcaggctcttcattggtttccaagggagcaaatcctcagtggggatacaagacatataaagtatatattattttttcataacttatgtggcttttaacttattgcttcccttcctgtttctgcatgatcagtctgtatgtactatctggaaagataacacatactccagccacctcacctgattggctatcttggggccatgtccccttcttgctgccacaggatgaataaagtgttgagatttgtctatggagaaagctgtgtgtctgtttttatctcccctctcaggaccagtcagccactggtcaatcaggctgatcatggaacattaggaattctccaattaagggagaaaaagtccagggacttagttatatcttcagaccagtgcagctgggacacacaaagttctcctgtctcaccatctgatatggtttggatgctcgtcccctccaaatctcatgttgaaatgtaattcccagtgttggaagtggagcctggtgggaagtatttggatcatgagagaggatccttcatgaatggctcagcaccatctccttggtgatgagtgagttctcactcaattcacatagatatggttgtttaaaagagtctgagacctctcccctctttctcgccatgtgatatgcctgctcccccttcaccttccgcctttactgtaagcttcctgaggccctcaccagaagctgagcaaatgttggtgccatgccagtacagcctgcagaattgtgagccaaaataaatgtcttttctttataaattaaa

SEQ ID NO: 438741 - DNA, 2603 bp, Homo sapiens
  misc_feature (35)..(36): n is a, c, g, or t
  misc_feature (932)..(932): n is a, c, g, or t
gaccggcgagatagcaggaaggaatacaggacagnnccacgcgtctcctcggtccgcacataggtgcaaaaccgctgcctccagatcaggcctctccaaggccccctcccgaaagaagaagggcagcaaaggccccgtgatcaaaatcaccgaaatgtcagagaagtacttctcgcaggagtcggaggtctcagagtaaggcggctggaccccaggaaccccagggcactccactgcagcaggagggacttaagctagactcaagaaagcagcttggagcctctaggttgagaagagaggcaaaacctgatattgaactgagagaggggttcaaaactgactgtgttttgtgggctgccagggtgggagaggagcatcaccagctcctcagagccactccgctccatatcagtatctcacagtcccatccttccaaccttctggccagaggttttcctgatgggtgagtcggaattaggggtcagttttgtctccacctcctcgctcctctgaggctcctcctccagcatcaggctctgccaaggcccctctgactcttgcccaatccttgaccttgactcctatctcaagccttgccttgtctctgcctcggaactgggactgggactggctcatccacctatgtgcgggagccgaggaggacggcgtgggccctgtcctgtatctggaattcctgggaaggctggctgctgaagaccctcttggctttcccgtgctctttgggctccccagagacctgacagtattagggagtgaagggaggaggggccctggctatttgggacctaagcctaggccccagagatcagcccgaacacccgcatcccttcctcctcccatgggtccctcccagtaggcagtagtcagaactggatgggctgcccccagccagctcccagcagcttctccgnaagctgctcttgccataatcaactccctgggagtggaagccagatggcagcttgagattgggcaggagcattcgatcttcctttcacctccctgccatgctggggtcctacccagcctggatctgagctctgtgcccccagccgggttgttcccagcctgagcaccgggctttggtgcaccaggccttggagacccctggtcccacccctgccgtgaagccccaggcccacttcccaagaatctcacttctcagggcctctgttctcctctccactgggccaaatagcctggccctcccctccttggcattcatgggggagcccaggaaccccccacacctatggggttagagctcctcctttcttctcactccttccccttcctccctccatgcccactccccctgcctccagcaggccaggaagaaggcacagtccaggcaagtctgggagcttccaagcccttgaggtccagctgtggggcccaaatgacagccttacaagggttctaccagagaggaaaattccacatcccaccagaagacaggggtgttggcaggcatactcctatctcctcctcttggctctcaatgctgaggcttgcagaggcatcccagcggcaccagcctcccactgcacagcttccttccctccttcactctcctctcccctccctgccccttgcctcacctcctcttctagactgcattagattcattcatctcattttccaggacatgttggccagaggtctgggcccatcccaggcctcaaggccctccaggcctgtggggagcactggagggttactgactctctggccatgggaactcagagattctcatccccaaagtcccaaaagagggtgctgattggtgcttttcctcaggctcttcattggtttccaagggagcaaatcctcagtggggatacaagacatataaagtatatattattttttcataacttatgtggcttttaacttattgcttcccttcctgtttctgcatgatcagtctgtatgtactatctggaaagataacacatactccagccacctcacctgattggctatcttggggccatgtccccttcttgctgccacaggatgaataaagtgttgagatttgtctatggagaaagctgtgtgtctgtttttatctcccctctcaggaccagtcagccactggtcaatcaggctgatcatggaacattaggaattctccaattaagggagaaaaagtccagggacttagttatatcttcagaccagtgcagctgggacacacaaagttctcctgtctcaccatctgatatggtttggatgctcgtcccctccaaatctcatgttgaaatgtaattcccagtgttggaagtggagcctggtgggaagtatttggatcatgagagaggatccttcatgaatggctcagcaccatctccttggtgatgagtgagttctcactcaattcacatagatatggttgtttaaaagagtctgagacctctcccctctttctcgccatgtgatatgcctgctcccccttcaccttccgcctttactgtaagcttcctgaggccctcaccagaagctgagcaaatgttggtgccatgccagtacagcctgcagaattgtgagccaaaataaatgtcttttctttataaattaaa

SEQ ID NO: 438742 - DNA, 3754 bp, Homo sapiens
  misc_feature (2227)..(2227): n is a, c, g, or t
gccccagctgtgaccagagcaaccagagcctgccacccgacgcaaccccaggctcactcgctcacccccctgggccctcctgcttccggccgggggcaccatggcctgccgctcctgcgtggttggcttcagcagcctcagcagctgtgaggtgaccccggtgggcagcccccggcctggaacctcaggatgggacagctgcagggcccccgggccgggcttcagctcccgcagcctcacaggctgctggtcggctggcactatctccaaggtgactgtgaaccccggcctgctggtgcccctggatgtcaagttggaccccgctgttcagcagctgaagaaccaggagaaggaggagatgaaggccctcaatgataaatttgcctccctaattggcaaggtgcaagccctggaacagcgcaaccagctgctggagacacgctggagcttcctgcagggccaggactcagccatcttcgacctcgggcatctctatgaggaatatcagggccggctgcaggaggaactgcgcaaagtgagccaggagcgggggcagctggaggccaacctgctgcaggtgctggagaaggttgaggagtttcgaatcaggtatgaggatgagatctccaagcgcacagacatggagttcacctttgttcagctgaagaaggacctggatgcagagtgtcttcatcggactgaactggaaaccaagttaaaaagcctggagagcttcgtggagttgatgaaaaccatctatgagcaggagctgaaggacctggcagcacaggtgaaggatgtgtcggtgaccgtcggcatggacagccgctgccacatcgacctgagcggcatcgtggaggaggtgaaggcccagtatgacgccgtcgcggctcgcagcctggaggaggccgaggcatactctcggagccagctggaggagcaggccgcccgctcggccgagtatgggagcagcctccagagcagccgcagcgagatcgcggatctcaatgtgcgcatccagaagctgcggtcccagatcctctctgtcaagagccattgcctgaaactggaggagaacatcaagacagctgaggagcagggtgagctggccttccaggatgccaagaccaagctggcccagctggaggccgccctgcagcaggccaagcaggacatggcgcggcagctgcgcaagtaccaggagctgatgaacgtcaagctggccctggacatcgagatcgccacctacaggaagctggtggagggcgaggagggcaggatggactcgccctcagccactgtggtcagcgctgtgcagtccaggtgcaaaaccgccccttccctcccctaccccttatgttccctgtagctgcctccagatcaggcctctccaaggccccctcccgaaagaagaagggcagcaaaggccccgtgatcaaaatcaccgaaatgtcagagaagtacttctcgcaggagtcggaggtctcagagtaaggcggctggaccccaggaaccccagggcactccactgcagcaggagggacttaagctagactcaagaaagcagcttggagcctctaggttgagaagagaggcaaaacctgatattgaactgagagaggggttcaaaactgactgtgttttgtgggctgccagggtgggagaggagcatcaccagctcctcagagccactccgctccatatcagtatctcacagtcccatccttccaaccttctggccagaggttttcctgatgggtgagtcggaattaggggtcagttttgtctccacctcctcgctcctctgaggctcctcctccagcatcaggctctgccaaggcccctctgactcttgcccaatccttgaccttgactcctatctcaagccttgccttgtctctgcctcggaactgggactgggactggctcatccacctatgtgcgggagccgaggaggacggcgtgggccctgtcctgtatctggaattcctgggaaggctggctgctgaagaccctcttggctttcccgtgctctttgggctccccagagacctgacagtattagggagtgaagggaggaggggccctggctatttgggacctaagcctaggccccagagatcagcccgaacacccgcatcccttcctcctcccatgggtccctcccagtaggcagtagtcagaactggatgggctgcccccagccagctcccagcagcttctccgnaagctgctcttgccataatcaactccctgggagtggaagccagatggcagcttgagattgggcaggagcattcgatcttcctttcacctccctgccatgctggggtcctacccagcctggatctgagctctgtgcccccagccgggttgttcccagcctgagcaccgggctttggtgcaccaggccttggagacccctggtcccacccctgccgtgaagccccaggcccacttcccaagaatctcacttctcagggcctctgttctcctctccactgggccaaatagcctggccctcccctccttggcattcatgggggagcccaggaaccccccacacctatggggttagagctcctcctttcttctcactccttccccttcctccctccatgcccactccccctgcctccagcaggccaggaagaaggcacagtccaggcaagtctgggagcttccaagcccttgaggtccagctgtggggcccaaatgacagccttacaagggttctaccagagaggaaaattccacatcccaccagaagacaggggtgttggcaggcatactcctatctcctcctcttggctctcaatgctgaggcttgcagaggcatcccagcggcaccagcctcccactgcacagcttccttccctccttcactctcctctcccctccctgccccttgcctcacctcctcttctagactgcattagattcattcatctcattttccaggacatgttggccagaggtctgggcccatcccaggcctcaaggccctccaggcctgtggggagcactggagggttactgactctctggccatgggaactcagagattctcatccccaaagtcccaaaagagggtgctgattggtgcttttcctcaggctcttcattggtttccaagggagcaaatcctcagtggggatacaagacatataaagtatatattattttttcataacttatgtggcttttaacttattgcttcccttcctgtttctgcatgatcagtctgtatgtactatctggaaagataacacatactccagccacctcacctgattggctatcttggggccatgtccccttcttgctgccacaggatgaataaagtgttgagatttgtctatggagaaaaaaacaaaaaaaaaaaacaacaaaaaaaaaacaaagaaaaaaacaaaaaaaaaacaaaaaaagcagggggggggcgccgcccacagagagagtctccccccggggggcccccacagtcccgcgcgccgccccccgagtcgttctagtgtgagaacacaagggggggcccccccaagaaagaggggcggccacgaatactaatgagaaaaacgaagaggagccggagggcgcagcgagtgattaaaaaaaacacggcgtgcgggccgacgacgcgggcaacacacacagcgcgagcacaagtcctgcgagggagaccactcgtgggggggcgaaagagcgagcccccctcacacaccaaaccgaggggaggagggggggagacaca

SEQ ID NO: 438743 - DNA, 369 bp, Homo sapiens
gtggaggttgcagttagccgagatcgcggcattgcactccagcctggatgacagagagagagactccgtctcaaaaaataataataataatagaaaagaaaaggaaggatgctccagcgctcctgaagtcctcccagcaaaagaaagggctgcccagcacaccctgccatagcaaccgtgcttttcggtcatccgtggttctccacggcagaattccaggcatccccgggccctctcctctctcttcccttctctattcaggaaacggtctctcctctcccaccttcacttgtcgcgaaggccatgtttctctttggcttgtcctcatagaggtggaaaacagcaggtttctaacctctgaactaccct

SEQ ID NO: 438744 - DNA, 557 bp, Homo sapiens
cggacgcgtgggtcgacccacgcgtccgattaaaggcgtcgcctcgcccctcgccttcctctttccgtctcaggtcgccgctgcggagggagccgccgccatgtctgcgcatctgcaatggatggtcgtgcggaactgctccagtttcctgatcaagaggaataagcagacctacagcactgagcccaataacttgaaggcccgcaattccttccgctacaacggactgattcaccgcaagactgtgggcgtggagccggcagccgacggcaaaggtgtcgtggtggtcattaagcggagatccggccagcggaagcctgccacctcctatgtgcggaccaccatcaacaagaatgctcgcgccacgctcagcagcatcagacacatgatccgcaagaacaagtaccgccccgacctgcgcatggcagccatccgcagggccagcgccatcctgcgcagccagaagcctgtgatggtgaagaggaagcggacccgccccaccaagagctcctgagccccctgcccccagagcaataaagtcagctggctttctcacc

SEQ ID NO: 438745 - DNA, 174 bp, Homo sapiens
ggatttgctggtgcagtacaactaggcttaatagggacatggcagccatccgcagggccagcgccatcctgcgcagccagaagcctgtgatggtgaagaggaagcggacccgccccaccaagagctcctgagccccctgcccccagagcaataaagtcagctggctttctcacc

SEQ ID NO: 438746 - DNA, 547 bp, Homo sapiens
aagacgccccaacagccccacccacaggttcacccaattacggctaggtacgaggcgggtggtggcgccgctgcgaagggagccgccgccatgtctgcgcatctgcaatggatggtcgtgcggaactgctccagtttcctgatcaagaggaataagcagacctacagcactgagcccaataacttgaaggcccgcaattccttccgctacaacggactgattcaccgcaagactgtgggcgtggagccggcagccgacggcaaaggtgtcgtggtggtcattaagcggagatccggccagcggaagcctgccacctcctatgtgcggaccaccatcaacaagaatgctcgcgccacgctcagcagcatcagacacatgatccgcaagaacaagtaccgccccgacctgcgcatggcagccatccgcagggccagcgccatcctgcgcagccagaagcctgtgatggtgaagaggaagcggacccgccccaccaagagctcctgagccccctgcccccagagcaataaagtcagctggctttctcacc

SEQ ID NO: 438747 - DNA, 746 bp, Homo sapiens
cggacgcgtgggtcgcccacgcgtcgcaggtcgccgctgcgaagggagccgccgccatgtctgcgcatctgcaatggatggtcgtgcggaactgctccagtttcctgatcaagaggaataagcagacctacagcactgagcccaataacttgaaggcccgcaattccttccgctacaacggactgattcaccgcaagactgtgggcgtggagccggcagccgacggcaaaggtgtcgtggtggtcattaagcggagatccggccagcggaagcctgccacctcctatgtgcggaccaccatcaacaagaatgctcgcgccacgctcagcagcatcagacacatgatccgcaagaacaagtaccgccccgacctgcgcatggcagccatccgcagggccagcgccatcctgcgcagccagaagcctgtgatggtgaagaggaagcggacccgccccaccaagagctcctgagccccctgcccccagagcaataaagtcagctggctttctcaccaaaacaaaaaaaaaggggccgggccgatcagataacgctcctcatattaggcctattaaccaacaattaaccatttaccaatgatgggcgcgatgtaccacgagacagcacataccagggcaccaaacaacaccttgtccaaaagggctcagaacgggataatcctattatacctcaaaaagtttttcctcgcaggatttctgggcctttaaccatccaggctagcctatccc

SEQ ID NO: 438748 - DNA, 195 bp, Homo sapiens
gcggccgcctactactactactactgctcgaattcaagcttctaacgatgtacggggacatggcagccatccgcagggccagcgccatcctgcgcagccagaagcctgtgatggtgaagaggaagcggacccgccccaccaagagctcctgagccccctgcccccagagcaataaagtcagctggctttctcacc

SEQ ID NO: 438749 - DNA, 511 bp, Homo sapiens
gtggatcccccgggctgcaggcggcacgacgccgctgcgaagggagccgccgccatgtctgcgcatctgcaatggatggtcgtgcggaactgctccagtttcctgatcaagaggaataagcagacctacagcactgagcccaataacttgaaggcccgcaattccttccgctacaacggactgattcaccgcaagactgtgggcgtggagccggcagccgacggcaaaggtgtcgtggtggtcattaagcggagatccggccagcggaagcctgccacctcctatgtgcggaccaccatcaacaagaatgctcgcgccacgctcagcagcatcagacacatgatccgcaagaacaagtaccgccccgacctgcgcatggcagccatccgcagggccagcgccatcctgcgcagccagaagcctgtgatggtgaagaggaagcggacccgccccaccaagagctcctgagccccctgcccccagagcaataaagtcagctggctttctcacc

SEQ ID NO: 438750 - DNA, 395 bp, Homo sapiens
  misc_feature (3)..(4): n is a, c, g, or t
  misc_feature (6)..(7): n is a, c, g, or t
gcnncnnctactactactactactaaattcgcggccggtcgacaattccttccgctacaacggactgattcaccgcaagactgtgggcgtggagccggcagccgacggcaaaggtgtcgtggtggtcattaagcggagatccggccagcggaagcctgccacctcctatgtgcggaccaccatcaacaagaatgctcgcgccacgctcagcagcatcagacacatgatccgcaagaacaagtaccgccccgacctgcgcatggcagccatccgcagggccagcgccatcctgcgcagccagaagcctgtgatggtgaagaggaagcggacccgccccaccaagagctcctgagccccctgcccccagagcaataaagtcagctggctttctcacc

SEQ ID NO: 438751 - DNA, 773 bp, Homo sapiens
  misc_feature (3)..(4): n is a, c, g, or t
  misc_feature (6)..(7): n is a, c, g, or t
gcnncnnctactactactactactaaattcgcggccggtcgacaattccttccgctacaacggactgattcaccgcaagactgtgggcgtggagccggcagccgacggcaaaggtgtcgtggtggtcattaagcggagatccggccagcggaagcctgccacctcctatgtgcggaccaccatcaacaagaatgctcgcgccacgctcagcagcatcagacacatgatccgcaagaacaagtaccgccccgacctgcgcatggcagccatccgcagggccagcgccatcctgcgcagccagaagcctgtgatggtgaagaggaagcggacccgccccaccaagagctcctgagccccctgcccccagagcaataaagtcagctggctttctcaccaaaaaaaaaaaaaaaaaaaaaaaaaaaaaaaaaaaaaaaaaaaaaaaaaaaaaagaaaaaaaaagaaaaaaacaacgagaaggcggaaaacagaaactacagaaagcagcgcacgagagaggaaggaacagacaacgaacaaaggcaaacagaactacgacgagcgggacgagaagaaggtaagaacgaacgaaccagaggccgcgcaaagtacaccagaggaagggaggagagggagcaacaacctcagggggggagcacacagcaggagcaacaccgaaaccgcgagagcaaagcgcgagaacaaagagaacaaggacaaggcggaaacacgacgacaagggcgcaagaaggaggagagaagaaaaaaaaaggaca

SEQ ID NO: 438752 - DNA, 896 bp, Homo sapiens
  misc_feature (644)..(644): n is a, c, g, or t
  misc_feature (648)..(648): n is a, c, g, or t
cggtgacacaactaggctaggtacgaggcctgggtgttggcgccgctgcgaagggagccgccgccatgtctgcgcatctgcaatggatggtcgtgcggaactgctccagtttcctgatcaagaggaataagcagacctacagcactgagcccaataacttgaaggcccgcaattccttccgctacaacggactgattcaccgcaagactgtgggcgtggagccggcagccgacggcaaaggtgtcgtggtggtcattaagcggagatccggccagcggaagcctgccacctcctatgtgcggaccaccatcaacaagaatgctcgcgccacgctcagcagcatcagacacatgatccgcaagaacaagtaccgccccgacctgcgcatggcagccatccgcagggccagcgccatcctgcgcagccagaagcctgtgatggtgaagaggaagcggacccgccccaccaagagctcctgagccccctgcccccagagcaataaagtcagctggctttctcaccaaaaaaaaaaaaaaaaaaacaaagaaaaaaaaaaacaaaaaaaaacaaaaaaacagaaacaaaaaaaaaaaaaaaaaaaaaaaaaaaagggggggggggggaaaaaaaaaccgaggggggcncaanatatagcgaccacacaccttcgtgggagagaagaggccgccacacagcgagggtcatacaacaaaacagcgggcggcgcgccgcaaaaaaacacggcgcggggggcacaaacgtcagcgtggctatctgggagaagacccctgccggcggggagcgacacagcgagacccccccgagcaagagacgcggggcgaaaaactggtccgttggcgcacacccgcagtcggcgcgaacgcgccggttacaaa

SEQ ID NO: 438753 - DNA, 921 bp, Homo sapiens
gatggtgacagaaagcctcatgagagaaacacatgagaactggtgtccttttttatcaggtcctcctccttgttgtataaagtactgctccaagttatcacagtcaattttggttctacagaagataattgcttgatccatcttatgttccttgattgcccggacagcatactcccctttcaggattttaatagcttcagaccacatctctggactattagcaccaggtcttgtgttatcttttgcatgtacatcatcagttctaatgtggctctttccaagcctttcccgtcgccgctgcgaagggagccgccgccatgtctgcgcatctgcaatggatggtcgtgcggaactgctccagtttcctgatcaagaggaataagcagacctacagcactgagcccaataacttgaaggcccgcaattccttccgctacaacggactgattcaccgcaagactgtgggcgtggagccggcagccgacggcaaaggtgtcgtggtggtcattaagcggagatccggccagcggaagcctgccacctcctatgtgcggaccaccatcaacaagaatgctcgcgccacgctcagcagcatcagacacatgatccgcaagaacaagtaccgccccgacctgcgcatggcagccatccgcagggccagcgccatcctgcgcagccagaagcctgtgatggtgaagaggaagcggacccgccccaccaagagctcctgagccccctgcccccagagcaataaagtcagctggctttctcaccaaaaaaaaaaaaaaaaaaaaaaaaaaaaaacccgggtccggggggggggggggggaaaaatccggggaaatcggggggggaccaccgggtttttgggcaacggttcttgggccccaaaaagggcaaggggaaaacgggccgggggaa

SEQ ID NO: 438754 - DNA, 1334 bp, Homo sapiens
cagggagctgatggggtgtgacaggcacaccataggctggaggcacaggtggagggcagggaagaggaccggcaaatctatagaatcctaaagggagccaagagaagccacatgcaaatctccctccctccaaacaattctcccttagagggcatccgcgctcccctggggtggcagtcagcgagaagtttccgtgtaggttctccccaggcttaaacagtttaagagttttatttcaagaaaaccctggggagggcgaactgcaagagggctgccaggattagccgagggattccgaatgaagacggagtatttccgaacatacacacctctcccaagagcgtttccggagggttccgaaaatacccgagcgggcctcggcgccctcattggccatcaccgcgagggcttacgaagaccggaaatatccaaaggtgccggggctaggcttatatagttcacgcattcaccagttcattcataaaacaaatgtttgttgagcgcccatcatatgccaatcacagtgacaagtgctgggtgagcaatactggagagataacgctgaggtatgggtcccaggacctctcgaattggagccactcggaaatccagcggtagagtttcgaaaacttccgaacggttcccggaatacgctctcggccctctaaccgaagagttccgaatattcccgagcgttgagcgaattgtcggcggaagcagccgaacatcatcgagccgcctcggaggtggggaccgacaactcctgtcgtgcccgccggagaggaagcggaaatgcgtgtacggtattaaaggcgtcgcctcgcccctcgccttcctctttccgtctcaggtcgccgctgcgaagggagccgccgccatgtctgcgcatctgcaatggatggtcgtgcggaactgctccagtttcctgatcaagaggaataagcagacctacagcactgagcccaataacttgaaggcccgcaattccttccgctacaacggactgattcaccgcaagactgtgggcgtggagccggcagccgacggcaaaggtgtcgtggtggtcattaagcggagatccggccagcggaagcctgccacctcctatgtgcggaccaccatcaacaagaatgctcgcgccacgctcagcagcatcagacacatgatccgcaagaacaagtaccgccccgacctgcgcatggcagccatccgcagggccagcgccatcctgcgcagccagaagcctgtgatggtgaagaggaagcggacccgccccaccaagagctcctgagccccctgcccccagagcaataaagtcagctggctttctcacc

SEQ ID NO: 438755 - DNA, 514 bp, Homo sapiens
  misc_feature (41)..(41): n is a, c, g, or t
agcgactaaggctagggtacgaggccgggggttaatcggcngagggggagccgcgccatgtctgcgcatctgcaatggatggtcgtgcggaactgctccagtttcctgatcaagaggaataagcagacctacagcactgagcccaataacttgaaggcccgcaattccttccgctacaacggactgattcaccgcaagactgtgggcgtggagccggcagccgacggcaaaggtgtcgtggtggtcattaagcggagatccggccagcggaagcctgccacctcctatgtgcggaccaccatcaacaagaatgctcgcgccacgctcagcagcatcagacacatgatccgcaagaacaagtaccgccccgacctgcgcatggcagccatccgcagggccagcgccatcctgcgcagccagaagcctgtgatggtgaagaggaagcggacccgccccaccaagagctcctgagccccctgcccccagagcaataaagtcagctggctttctcacc

SEQ ID NO: 438756 - DNA, 388 bp, Homo sapiens
aaagcaggctggtacaggccggaattttcgggatataattccttccgctacaacggactgattcaccgcaagactgtgggcgtggagccggcagccgacggcaaaggtgtcgtggtggtcattaagcggagatccggccagcggaagcctgccacctcctatgtgcggaccaccatcaacaagaatgctcgcgccacgctcagcagcatcagacacatgatccgcaagaacaagtaccgccccgacctgcgcatggcagccatccgcagggccagcgccatcctgcgcagccagaagcctgtgatggtgaagaggaagcggacccgccccaccaagagctcctgagccccctgcccccagagcaataaagtcagctggctttctcacc

SEQ ID NO: 438757 - DNA, 522 bp, Homo sapiens
cggtgacacaactaggctaggtacgaggcctgggtgttggcgccgctgcgaagggagccgccgccatgtctgcgcatctgcaatggatggtcgtgcggaactgctccagtttcctgatcaagaggaataagcagacctacagcactgagcccaataacttgaaggcccgcaattccttccgctacaacggactgattcaccgcaagactgtgggcgtggagccggcagccgacggcaaaggtgtcgtggtggtcattaagcggagatccggccagcggaagcctgccacctcctatgtgcggaccaccatcaacaagaatgctcgcgccacgctcagcagcatcagacacatgatccgcaagaacaagtaccgccccgacctgcgcatggcagccatccgcagggccagcgccatcctgcgcagccagaagcctgtgatggtgaagaggaagcggacccgccccaccaagagctcctgagccccctgcccccagagcaataaagtcagctggctttctcacc

SEQ ID NO: 438758 - DNA, 556 bp, Homo sapiens
accaccaccacacaacaccgcccccccccccccacgacgaacataggtcagtacaggccttgggtgttgcaggtcgccgctgcggagggagccgccgccatgtctgcgcatctgcaatggatggtcgtgcggaactgctccagtttcctgatcaagaggaataagcagacctacagcactgagcccaataacttgaaggcccgcaattccttccgctacaacggactgattcaccgcaagactgtgggcgtggagccggcagccgacggcaaaggtgtcgtggtggtcattaagcggagatccggccagcggaagcctgccacctcctatgtgcggaccaccatcaacaagaatgctcgcgccacgctcagcagcatcagacacatgatccgcaagaacaagtaccgccccgacctgcgcatggcagccatccgcagggccagcgccatcctgcgcagccagaagcctgtgatggtgaagaggaagcggacccgccccaccaagagctcctgagccccctgcccccagagcaataaagtcagctggctttctcacc

SEQ ID NO: 438759 - DNA, 405 bp, Homo sapiens
  misc_feature (396)..(396): n is a, c, g, or t
  misc_feature (403)..(403): n is a, c, g, or t
cagtggagatgaagcctaagaatatgatcaggtaactttcgaccgactttccccaagagaaaattccttccgctacaacggactgattcaccgcaagactgtgggcgtggagccggcagccgacggcaaaggtgtcgtggtggtcattaagcggagatccggccagcggaagcctgccacctcctatgtgcggaccaccatcaacaagaatgctcgcgccacgctcagcagcatcagacacatgatccgcaagaacaagtaccgccccgacctgcgcatggcagccatccgcagggccagcgccatcctgcgcagccagaagcctgtgatggtgaagaggaagcggacccgccccaccaagagctcctgagccccctgcccccagagcaataaagncagctgnct

SEQ ID NO: 438760 - DNA, 516 bp, Homo sapiens
attaaatcccccctatgcaccttttattttaagatttgttggttaggtaattggccgccatgtctgcgcatctgcaatggatggtcgtgcggaactgctccagtttcctgatcaagaggaataagcagacctacagcactgagcccaataacttgaaggcccgcaattccttccgctacaacggactgattcaccgcaagactgtgggcgtggagccggcagccgacggcaaaggtgtcgtggtggtcattaagcggagatccggccagcggaagcctgccacctcctatgtgcggaccaccatcaacaagaatgctcgcgccacgctcagcagcatcagacacatgatccgcaagaacaagtaccgccccgacctgcgcatggcagccatccgcagggccagcgccatcctgcgcagccagaagcctgtgatggtgaagaggaagcggacccgccccaccaagagctcctgagccccctgcccccagagcaataaagtcagctggctttctcacc

SEQ ID NO: 438761 - DNA, 308 bp, Homo sapiens
  misc_feature (25)..(25): n is a, c, g, or t
agaggatcccctgtagtgctctggnacgcaagactgtgggcgtggagccggcagccgacggcaaaggtgtcgtggtggtcattaagcggagatccggccagcggaagcctgccacctcctatgtgcggaccaccatcaacaagaatgctcgcgccacgctcagcagcatcagacacatgatccgcaagaacaagtaccgccccgacctgcgcatggcagccatccgcagggccagcgccatcctgcgcagccagaagcctgtgatggtgaagaggaagcggacccgcccacaatccaggcgcccacaa

SEQ ID NO: 438762 - DNA, 321 bp, Homo sapiens
cggtacccgatcaaaccttttatgttgctgtgcggaactgctccagtttcctgatcaagaggaataagcagacctacagcactgagcccaataacttgaaggcccgcaattccttccgctacaacggactgattcaccgcaagactgtgggcgtggagccggcagccgacggcaaaggtgtcgtggtggtcattaagcggagatccggccagcggaagcctgccacctcctatgtgcggaccaccatcaacaagaatgctcgcgccacgctcagcagcatcagacacatgatccgcacagcaacataaaagggtttgatcg

SEQ ID NO: 438763 - DNA, 683 bp, Homo sapiens
  misc_feature (19)..(19): n is a, c, g, or t
  misc_feature (32)..(32): n is a, c, g, or t
  misc_feature (57)..(57): n is a, c, g, or t
  misc_feature (311)..(311): n is a, c, g, or t
  misc_feature (643)..(643): n is a, c, g, or t
  misc_feature (645)..(645): n is a, c, g, or t
  misc_feature (650)..(650): n is a, c, g, or t
  misc_feature (654)..(655): n is a, c, g, or t
ccccggcatgtgctgtagnccagcgagaagtnccacagcgacgatgcggtgcgccgnctgtgggtgtccgtccatgccacggcacacagcgcgatggggtggtcggggatgacatggatgtcggtgatgcgctgttccagcagcaggtcttcggcttcgaagcgtcgggtcatgtagggcgccgtcagggcaaaagaaaaggggcggacccgcacctggcgagccgcccccacgacctgcggcttaacgctgctggcggttgccgccctgctcgcggttcgagccttcgttgccgcggttggcctcttcangctgtacatcgagctcggtacctggcgatgtcgcgtgccatgtctgcgcatctgcaatggatggtcgtgcggaactgctccagtttcctgatcaagaggaataagcagacctacagcactgagcccaataacttgaaggcccgcaattccttccgctacaacggactgattcaccgcaagactgtgggcgtggagccggcagccgacggcaaaggtgtcgtggtggtcattaagcggagatccggccagcggaagcctgccacctcctatgtgcggaccaccatcaacaagaatgctcgcgccacgctcagcagcatcagacacatggcacncngacanagcnnggtacagagctcgattcgtatatgtcat

SEQ ID NO: 438764 - DNA, 750 bp, Homo sapiens
cttagaggatccccaagttagtcgggacgcaagtatgtcgggacgtacttgctctttccgtctcaggtcgccgctgcgaagggagccgccgccatgtctgcgcatctgcaatggatggtcgtgcggaactgctccagtttcctgatcaagaggaataagcagacctacagcactgagcccaataacttgaaggcccgcaattccttccgctacaacggactgattcaccgcaagactgtgggcgtggagccggcagccgacggcaaaggtgtcgtggtggtcattaagcggagatccggccagcggaagcctgccacctcctatgtgcggaccaccatcaacaagaatgctcgcgccacgctcagcagcatcagacacatgatccgcaagaacaagtaccgccccgacctgcgcatgcttgcgggaagggttgggaggcagcaggctgtaagcagcctggagcaccagcctagaccaggacgcctccacctcagcaacaccgcagccaggtcattctgtgtcatggagccatctcgtacgctgcaggatttgggcagcacccttggcctccacccactagatgctagtggcacccccgagttgtgacaaccctttctggtctcctgacaatgcataataccccttggggggcaaaatcacctctggctgagaaacactggtttatgaaccctatcgctattaaaaaaccactgaactgtacacaataaaaaaaaaaattctccaagggcg

SEQ ID NO: 438765 - DNA, 352 bp, Homo sapiens
gcttcaggtgccgctgcgaaggtgcgcgccatgtctgcgcatctgcaatggatggtcgtgcggaactgctccagtttcctgatcaagaggaataagcagacctacagcactgagcccaataacttgaaggcccgcaattccttccgctacaacggactgattcaccgcaagactgtgggcgtgggccggcagccgacggcaaaggtgatcttgaggtgatcttctgcacgataaggtgatcttctgcacgacgaggtgatcttctgcacgataaggtgatcttctgcacgatgaggtgatcttctgcacgataaggtgatcttctgcacgataaggtgatcttctgcacgat

SEQ ID NO: 438766 - DNA, 536 bp, Homo sapiens
aggatccttaattaaattaatcttccccccccccccgctctttccgtctcaggtcgccgctgcgaagggagccgccgccatgtctgcgcatctgcaatggatggtcgtgcggaactgctccagtttcctgatcaagaggaataagcagacctacagcactgagcccaataacttgaaggcccgcaattccttccgctacaacggactgattcaccgcaagactgtgggcgtggagccggcagccgacggcaaaggtgtcgtggtggtcattaagcggagatccggccagcggaagcctgccacctcctatgtgcggaccaccatcaacaagaatgctcgcgccacgctcagcagcatcagacacatgatccgcaagaacaagtaccgccccgacctgcgcatggcagccatccgcagggccagcgccatcctgcgcagccagaagcctgtgatggtgaagaggaagcggacccgccccaccaagagctcctgagccccctgcccccagagcaataaagtcagctggctttctcacc

SEQ ID NO: 438767 - DNA, 4275 bp, Homo sapiens
aggatccttaattaaattaatcttccccccccccccgctctttccgtctcaggtccccgctttccgtctcaggtcgccgctgcgaagggagccgccgccatgtctgcgcatctgcaatggatggtcgtgcggaactgctccagtttcctgatcaagaggaataagcagacctacagcactgagcccaataacttgaaggcccgcaattccttccgctacaacggactgattcaccgcaagactgtgggcgtggagccggcagccgacggcaaaggtgtcgtggtggtcattaagcggagatccggccagcggaagcctgccacctcctatgtgcggaccaccatcaacaagaatgctcgcgccacgctcagcagcatcagacacatgatccgcaagaacaagtaccgccccgacctgcgcatggcagccatccgcagggccagcgccatcctgcgcagccagaagcctgtgatggtgaagaggaagcggacccgccccaccaagagctcctgagccccctgcccccagagcaataaagtcagctggctttctcacctgcctcgactgggcctccctttttgaaacgctctggggagctctggccctgtgtgttgtcattcaggccatgtcatcaaaactctgcatgtcaccttgtccatctggaggtgatgtcaatggctggccatgcaggaggggtggggtagctgccttgtccctggtgagggcaagggtcactgtcttcacagaaaaagtttgctgacttgtgattgagacctactgtcccattgtgaggtggcctgaagaatcccagctggggcagtggcttccattcagaagaagaaaggccttttctagcccagaagggtgcaggctgagggctgggccctgggccctggtgctgtagcacggtttggggacttggggtgttcccaagacctgggggacgacagacatcacgggaggaagatgagatgacttttgcatccagggagtgggtgcagccacatttggaggggatgggctttacttgatgcaacctcatctctgagatgggcaacttggtgggtggtggcttataactgtaagggagatggcagccccagggtacagccagcaggcattgagcagccttagcattgtccccctactcccgtcctccaggtgtccccatccctcccctgtctctttgagctggctcttgtcacttaggtctcatctcagtggccgctcctgggccaccctgtcacccaagctttcctgattgcccagccctcttgtttcctttggcctgtttgctccctagtgtttattacagcttgtgaggccaggagtttgagaccatcctaggcaacataatgagacaccgtctctaaaataaaattagctgggtgtggtggtgcaccgcctgtggtcccagctcctcagaggttgagtagaggctgaggtgagcggagcacttgagccaagagtatgaggctgcagtgagcccatgagccccaccactacactccagcctggaagacaccatgacacacagtgaggcctggatggggaaagagtcctgctgttgatcctcacatgtttcctgggcacctaactctgtcagccactgccagggaccaaggatccagcatccatggcacccctggttcctgccatcctggggtacccgattcaaagagggactctgctccctgtctgagaccacccccggctctgactgagagtaaggggactgtcagggcctcgacttgccattggttggggtcgtacggggctgggagccctgcgttttgaggcagaccactgcccttccgacctcagtcctgtctgctccagtcttgcccagctcgaaggagagcagatctgaccacttgccagcccctgtctgctgtgaattaccatttcctttgtccttcccttagttgggtctattagctcagattgagaggtgttgccttaaaactgagttgggtgacttggtacctgctcaggaccccccgcactgtcccaatcccactcaggcccacctccagctggcctcactccgctggtgacttcgtacctgctcaggagcccccactgtcccagtcccactcaggcccatctctggctggcctcactgcgctgggactccgccttcataaggagagctcactgctcacgttagtagatggccccttctcgtgaggcctctcccctggcacctgcttcagttgtcctccacagcactgatttgcagcccacaagctggcaggtttatctgtctcatgtttgtcttgtgctggtgggcaaggggtttgtctagcacaccagcatataatgagatgcttgatgaatggtgcatattgaatgtataaagcccaccggtcctgagagtttgctcactggagactttctggagatggagtctcgctctgttgcccaggctggcgagtgcaatggcgcgatcttggctcactgcaacctccacctcctgggttcaagcgattctcctgcctcagcctcccgagtagctgggattacaggtgggtgtcaccacacccagctcagtattgtatttttagcagagatggggtttcaccattttgcccaggctggtttggaactcctgacttcaaattacccacctgcctcagcctcccaaagtgctggcattacaggcgctcgaggctttctgatgtggctgctgctgctcagaaggccttgtccttaaccacctccttgcctgccctggaggcttgtgcctctaggccccaccccctgtggagtcctgctggctttctccatccctatctgaatcctccctgctgtgtggcctcccctggtctcatccgtaacacagcccagcttagtgggcctctgttcctgcgggtggccagcctgtctgtgtggctgggctggggaggccacgtctggtatctgaatgctatcggtgggttggggtggaggaaccaggagagggctggagggagggagatggtctcagccccacagagtttggagtcctcagtgtgctgagcaaacgtggagacaccatttccctcctctagacctcatcttggagagagagatgttggatggggccatctattccagctttattcacacaaatcatgtctgttggcctggaaattggaaaaccagttaaaccaaaaacatgatattaagaaaacaggcaggctcaccatagtaaaaatgctgaaagccaaagacaaaattgggagaacaaaagaaaagcgtcttgtcacatacagaaggtccctgataaagttagtagctgccctcatcagaaaccaggcccaggcagtggggacacatccagagtgctgaaagaacctcccccaggtcatcctatccccaagagtgatgcccggcagcattcccagctcagggctaatggttcacggaagccaggaatcaaactgcctgggttccagtcccagctctgccagttatgcccagctgtggggacttgggcagctcgtttagtagcaccgtgcctcagtttcccatatgtaaaaggccattttgagtgcctttcacagccctgcataaggcaggtgtctcagtgttcactgctgtctctccagctcttagtccagtagctgcatggtgagtgagcgtagggcgcaccctggaaggctgccaagcccaaagttgtgcagagcgctggggactccagactccccacagcagcagagactcgggactgaggcatcctctgttcacaggacatgctggcatctactgggtcagggctctgctgctcggtggctgtgcaaccttgggcaagttcctcaacctctctgtgtcttcgtaccctcatctgtaacatgcgtgtcgatagaccctactactcagggttgatgagaagattaaatgtgcaaaacctgcttgactgtgcccacaaatcctgattgtaggaataaattaatgactttttataaatattttgatcagatggactcagatgatcacagatgtcttcacatgcctatgactaatttgtacacaaactaatgctcgtgtttcccaagcacctggaagacatgccagatccatgtgcagtaatgcctggtggctccaggtctgccccgccgtcctgtggggctgtgagctttcccagcctcctgcccgtgtttgtgaatatcattctgtcctcagctgcatttccagcccaggctgtttggcgctgcccaggaatggtatcaattcccctgtttctcttgtagccagttactagaataaaatcatctactttaaaatctttca

SEQ ID NO: 438768 - DNA, 561 bp, Homo sapiens
aggatccttaattaaattaatcttccccccccccccgctctttccgtctcaggtccccgctttccgtctcaggtcaggtcgccgctgcggagggagccgccgccatgtctgcgcatctgcaatggatggtcgtgcggaactgctccagtttcctgatcaagaggaataagcagacctacagcactgagcccaataacttgaaggcccgcaattccttccgctacaacggactgattcaccgcaagactgtgggcgtggagccggcagccgacggcaaaggtgtcgtggtggtcattaagcggagatccggccagcggaagcctgccacctcctatgtgcggaccaccatcaacaagaatgctcgcgccacgctcagcagcatcagacacatgatccgcaagaacaagtaccgccccgacctgcgcatggcagccatccgcagggccagcgccatcctgcgcagccagaagcctgtgatggtgaagaggaagcggacccgccccaccaagagctcctgagccccctgcccccagagcaataaagtcagctggctttctcacc

SEQ ID NO: 438769 - DNA, 949 bp, Homo sapiens
aggatccttaattaaattaatcttccccccccccccgctctttccgtctcaggtccccgctttccgtctcaggtcaggtcgccgctgcggagggagccgcctgagcgttcgtcttcctcgcgtggtcgccatctccggcccgccgcgcactccctctcagtcctctgcctgccttctccccttgcgcctcaagggtcattggcggaccccaacccctccccgtgaagtcgttgtgaattttcaagttattttcccctcactctcattcgccgcagctagtctcggctgcctgaattcggtcccgccgccttaggtcactcagtcccgcctgacaagagttctaggtcgctgtctgccctcaggggtctcccattcacccaagttcccagtcgctctcttcctctgctgtccgagcgtggcccgtggcctaacgctgctttagttctctgtgtctgacgctttccctgtgcccgtttccccgcagccgccgccatgtctgcgcatctgcaatggatggtcgtgcggaactgctccagtttcctgatcaagaggaataagcagacctacagcactgagcccaataacttgaaggcccgcaattccttccgctacaacggactgattcaccgcaagactgtgggcgtggagccggcagccgacggcaaaggtgtcgtggtggtcattaagcggagatccggccagcggaagcctgccacctcctatgtgcggaccaccatcaacaagaatgctcgcgccacgctcagcagcatcagacacatgatccgcaagaacaagtaccgccccgacctgcgcatggcagccatccgcagggccagcgccatcctgcgcagccagaagcctgtgatggtgaagaggaagcggacccgccccaccaagagctcctgagccccctgcccccagagcaataaagtcagctggctttctcacc

SEQ ID NO: 438770 - DNA, 3949 bp, Homo sapiens
aggatccttaattaaattaatcttccccccccccccgctctttccgtctcaggtccccgctttccgtctcaggtcgccgctgcgaagggagccgccgccatgtctgcgcatctgcaatggatggtcgtgcggaactgctccagtttcctgatcaagaggaataagcagacctacagcactgagcccaataacttgaaggcccgcaattccttccgctacaacggactgattcaccgcaagactgtgggcgtggagccggcagccgacggcaaaggtgtcgtggtggtcattaagcggagatccggccagcggaagcctgccacctcctatgtgcggaccaccatcaacaagaatgctcgcgccacgctcagcagcatcagacacatgatccgcaagaacaagtaccgccccgacctgcgcatggcagccatccgcagggccagcgccatcctgcgcagccagaagcctgtgatggtgaagaggaagcggacccgccccaccaagagctcctgagccccctgcccccagagcaataaagtcagctggctttctcacctgcctcgactgggcctccctttttgaaacgctctggggagctctggccctgtgtgttgtcattcaggccatgtcatcaaaactctgcatgtcaccttgtccatctggaggtgatgtcaatggctggccatgcaggaggggtggggtagctgccttgtccctggtgagggcaagggtcactgtcttcacagaaaaagtttgctgacttgtgattgagacctactgtcccattgtgaggtggcctgaagaatcccagctggggcagtggcttccattcagaagaagaaaggccttttctagcccagaagggtgcaggctgagggctgggccctgggccctggtgctgtagcacggtttggggacttggggtgttcccaagacctgggggacgacagacatcacgggaggaagatgagatgacttttgcatccagggagtgggtgcagccacatttggaggggatgggctttacttgatgcaacctcatctctgagatgggcaacttggtgggtggtggcttataactgtaagggagatggcagccccagggtacagccagcaggcattgagcagccttagcattgtccccctactcccgtcctccaggtgtccccatccctcccctgtctctttgagctggctcttgtcacttaggtctcatctcagtggccgctcctgggccaccctgtcacccaagctttcctgattgcccagccctcttgtttcctttggcctgtttgctccctagtgtttattacagcttgtgaggccaggagtttgagaccatcctaggcaacataatgagacaccgtctctaaaataaaattagctgggtgtggtggtgcaccgcctgtggtcccagctcctcagaggttgagtagaggctgaggtgagcggagcacttgagccaagagtatgaggctgcagtgagcccatgagccccaccactacactccagcctggaagacaccatgacacacagtgaggcctggatggggaaagagtcctgctgttgatcctcacatgtttcctgggcacctaactctgtcagccactgccagggaccaaggatccagcatccatggcacccctggttcctgccatcctggggtacccgattcaaagagggactctgctccctgtctgagaccacccccggctctgactgagagtaaggggactgtcagggcctcgacttgccattggttggggtcgtacggggctgggagccctgcgttttgaggcagaccactgcccttccgacctcagtcctgtctgctccagtcttgcccagctcgaaggagagcagatctgaccacttgccagcccctgtctgctgtgaattaccatttcctttgtccttcccttagttgggtctattagctcagattgagaggtgttgccttaaaactgagttgggtgacttggtacctgctcaggaccccccgcactgtcccaatcccactcaggcccacctccagctggcctcactccgctggtgacttcgtacctgctcaggagcccccactgtcccagtcccactcaggcccatctctggctggcctcactgcgctgggactccgccttcataaggagagctcactgctcacgttagtagatggccccttctcgtgaggcctctcccctggcacctgcttcagttgtcctccacagcactgatttgcagcccacaagctggcaggtttatctgtctcatgtttgtcttgtgctggtgggcaaggggtttgtctagcacaccagcatataatgagatgcttgatgaatggtgcatattgaatgtataaagcccaccggtcctgagagtttgctcactggagactttctggagatggagtctcgctctgttgcccaggctggcgagtgcaatggcgcgatcttggctcactgcaacctccacctcctgggttcaagcgattctcctgcctcagcctcccgagtagctgggattacaggtgggtgtcaccacacccagctcagtattgtatttttagcagagatggggtttcaccattttgcccaggctggtttggaactcctgacttcaaattacccacctgcctcagcctcccaaagtgctggcattacaggcgctcgaggctttctgatgtggctgctgctgctcagaaggccttgtccttaaccacctccttgcctgccctggaggcttgtgcctctaggccccaccccctgtggagtcctgctggctttctccatccctatctgaatcctccctgctgtgtggcctcccctggtctcatccgtaacacagcccagcttagtgggcctctgttcctgcgggtggccagcctgtctgtgtggctgggctggggaggccacgtctggtatctgaatgctatcggtgggttggggtggaggaaccaggagagggctggagggagggagatggtctcagccccacagagtttggagtcctcagtgtgctgagcaaacgtggagacaccatttccctcctctagacctcatcttggagagagagatgttggatggggccatctattccagctttattcacacaaatcatgtctgttggcctggaaattggaaaaccagttaaaccaaaaacatgatattaagaaaacaggcaggctcaccatagtaaaaatgctgaaagccaaagacaaaattgggagaacaaaagaaaagcgtcttgtcacatacagaaggtccctgataaagttagtagctgccctcatcagaaaccaggcccaggcagtggggacacatccagagtgctgaaagaacctcccccaggtcatcctatccccaagagtgatgcccggcagcattcccagctcagggctaatggttcacggaagccaggaatcaaactgcctgggttccagtcccagctctgccagttatgcccagctgtggggacttgggcagctcgtttagtagcaccgtgcctcagtttcccatatgtaaaaggccattttgagtgcctttcacagccctgcataaggcaggtgtctcagtgttcactgctgtctctccagctcttagtccagtagctgcatggtgagtgagcgtagggcgcaccctggaaggctgccaagcccaaagttgtgcagagcgctggggactccagactccccacagcagcagagactcgggactgaggcatcctctgttcacaggacatgctggcatctactgggtcagggctctgctgctcggtggctgtgcaaccttgggcaagttcctcaacctctctgtgtcttcgtaccctcatctgtaacatgcgtgtcgatagaccctactactcagggttgatgagaagattaaatgtgcaaaacctgcttgactgtgcccacaaatcctgattgtaggaataaattaatgactttttata

SEQ ID NO: 438771 - DNA, 688 bp, Homo sapiens
  misc_feature (581)..(583): n is a, c, g, or t
aggatccttaattaaattaatcttccccccccccccgctctttccgtctcaggtccccgctttccgtctcaggtcgccgctgcgaagggagccgccgccatgtctgcgcatctgcaatggatggtcgtgcggaactgctccagtttcctgatcaagaggaataagcagacctacagcactgagcccaataacttgaaggcccgcaattccttccgctacaacggactgattcaccgcaagactgtgggcgtggagccggcagccgacggcaaaggtgtcgtggtggtcattaagcggagatccggccagcggaagcctgccacctcctatgtgcggaccaccatcaacaagaatgctcgcgccacgctcagcagcatcagacacatgatccgcaagaacaagtaccgccccgacctgcgcatggcagccatccgcagggccagcgccatcctgcgcagccagaagcctgtgatggtgaagaggaagcggacccgccccaccaagagctcctgagccccctgcccccagagcaataaagtcagctggctttctcaccaaaaaaaaaaaaaaaaaaaaaaaannngggggggttccttttaaagcccccctgagggattcaaattttgaaattggccgtttttttaccccgggaaaaatttttgcccttttttgcttttcccttgggggg

SEQ ID NO: 438772 - DNA, 930 bp, Homo sapiens
  misc_feature (678)..(678): n is a, c, g, or t
  misc_feature (682)..(682): n is a, c, g, or t
aggatccttaattaaattaatcttccccccccccccgctctttccgtctcaggtccccgctttccgtctcaggtcgccgctgcgaagggagccgccgccatgtctgcgcatctgcaatggatggtcgtgcggaactgctccagtttcctgatcaagaggaataagcagacctacagcactgagcccaataacttgaaggcccgcaattccttccgctacaacggactgattcaccgcaagactgtgggcgtggagccggcagccgacggcaaaggtgtcgtggtggtcattaagcggagatccggccagcggaagcctgccacctcctatgtgcggaccaccatcaacaagaatgctcgcgccacgctcagcagcatcagacacatgatccgcaagaacaagtaccgccccgacctgcgcatggcagccatccgcagggccagcgccatcctgcgcagccagaagcctgtgatggtgaagaggaagcggacccgccccaccaagagctcctgagccccctgcccccagagcaataaagtcagctggctttctcaccaaaaaaaaaaaaaaaaaaacaaagaaaaaaaaaaacaaaaaaaaacaaaaaaacagaaacaaaaaaaaaaaaaaaaaaaaaaaaaaaagggggggggggggaaaaaaaaaccgaggggggcncaanatatagcgaccacacaccttcgtgggagagaagaggccgccacacagcgagggtcatacaacaaaacagcgggcggcgcgccgcaaaaaaacacggcgcggggggcacaaacgtcagcgtggctatctgggagaagacccctgccggcggggagcgacacagcgagacccccccgagcaagagacgcggggcgaaaaactggtccgttggcgcacacccgcagtcggcgcgaacgcgccggttacaaa

SEQ ID NO: 438773 - DNA, 677 bp, Homo sapiens
  misc_feature (567)..(567): n is a, c, g, or t
aggatccttaattaaattaatcttccccccccccccgctctttccgtctcaggtccccgctttccgtctcaggtcgccgctgcgaagggagccgccgccatgtctgcgcatctgcaatggatggtcgtgcggaactgctccagtttcctgatcaagaggaataagcagacctacagcactgagcccaataacttgaaggcccgcaattccttccgctacaacggactgattcaccgcaagactgtgggcgtggagccggcagccgacggcaaaggtgtcgtggtggtcattaagcggagatccggccagcggaagcctgccacctcctatgtgcggaccaccatcaacaagaatgctcgcgccacgctcagcagcatcagacacatgatccgcaagaacaagtaccgccccgacctgcgcatggcagccatccgcagggccagcgccatcctgcgcagccagaagcctgtgatggtgaagaggaagcggacccgccccaccaagagctcctgagccccctgcccccagagcaataaagtcagctggctttctcacctaaaaaaaaanccaaaagcaaacaatttaaatcttgaggcggtgcccagaaccaaataggacctaaggtgagcccgtttacattctccgtagaggggtagatttctatccttggctctttc

SEQ ID NO: 438774 - DNA, 789 bp, Homo sapiens
aggatccttaattaaattaatcttccccccccccccgctctttccgtctcaggtccccgctttccgtctcaggtcgccgctgcgaagggagccgccgccatgtctgcgcatctgcaatggatggtcgtgcggaactgctccagtttcctgatcaagaggaataagcagacctacagcactgagcccaataacttgaaggcccgcaattccttccgctacaacggactgattcaccgcaagactgtgggcgtggagccggcagccgacggcaaaggtgtcgtggtggtcattaagcggagatccggccagcggaagcctgccacctcctatgtgcggaccaccatcaacaagaatgctcgcgccacgctcagcagcatcagacacatgatccgcaagaacaagtaccgccccgacctgcgcatggcagccatccgcagggccagcgccatcctgcgcagccagaagcctgtgatggtgaagaggaagcggacccgccccaccaagagctcctgagccccctgcccccagagcaataaagtcagctggctttctcaccaaaacaaaaaaaaaggggccgggccgatcagataacgctcctcatattaggcctattaaccaacaattaaccatttaccaatgatgggcgcgatgtaccacgagacagcacataccagggcaccaaacaacaccttgtccaaaagggctcagaacgggataatcctattatacctcaaaaagtttttcctcgcaggatttctgggcctttaaccatccaggctagcctatccc

SEQ ID NO: 438775 - DNA, 770 bp, Homo sapiens
aggatccttaattaaattaatcttccccccccccccgctctttccgtctcaggtccccgctttccgtctcaggtcgccgctgcgaagggagccgccgccatgtctgcgcatctgcaatggatggtcgtgcggaactgctccagtttcctgatcaagaggaataagcagacctacagcactgagcccaataacttgaaggcccgcaattccttccgctacaacggactgattcaccgcaagactgtgggcgtggagccggcagccgacggcaaaggtgtcgtggtggtcattaagcggagatccggccagcggaagcctgccacctcctatgtgcggaccaccatcaacaagaatgctcgcgccacgctcagcagcatcagacacatgatccgcaagaacaagtaccgccccgacctgcgcatggcagccatccgcagggccagcgccatcctgcgcagccagaagcctgtgatggtgaagaggaagcggacccgccccaccaagagctcctgagccccctgcccccagagcaataaagtcagctggctttctcaccaaaaacaaaaaaaaaaaaaaaaaaaaaaaaaaaaaaaaaaaagacacggcggaggagcaacacatgtgggcggggcgcgagagaaagagaggtacaatgaaggggcacgagggggaacagagggacaccgcaccccacttcttgtcacacagggggacactacgggggccccccatagggggcagataatcagacaacacgtgtgccgcaatag

SEQ ID NO: 438776 - DNA, 553 bp, Homo sapiens
aggatccttaattaaattaatcttccccccccccccgctctttccgtctcaggtccccgctttccgtctcaggtcgccgctgcgaagggagccgccgccatgtctgcgcatctgcaatggatggtcgtgcggaactgctccagtttcctgatcaagaggaataagcagacctacagcactgagcccaataacttgaaggcccgcaattccttccgctacaacggactgattcaccgcaagactgtgggcgtggagccggcagccgacggcaaaggtgtcgtggtggtcattaagcggagatccggccagcggaagcctgccacctcctatgtgcggaccaccatcaacaagaatgctcgcgccacgctcagcagcatcagacacatgatccgcaagaacaagtaccgccccgacctgcgcatggcagccatccgcagggccagcgccatcctgcgcagccagaagcctgtgatggtgaagaggaagcggacccgccccaccaagagctcctgagccccctgcccccagagcaataagtcgcgtgcctatccct

SEQ ID NO: 438777 - DNA, 799 bp, Homo sapiens
aggatccttaattaaattaatcttccccccccccccgctctttccgtctcaggtccccgctttccgtctcaggtcaggtcgccgctgcggagggagccgccgccatgtctgcgcatctgcaatggatggtcgtgcggaactgctccagtttcctgatcaagaggaataagcagacctacagcactgagcccaataacttgaaggcccgcaattccttccgctacaacggactgattcaccgcaagactgtgggcgtggagccggcagccgacggcaaaggtgtcgtggtggtcattaagcggagatccggccagcggaagcctgccacctcctatgtgcggaccaccatcaacaagaatgctcgcgccacgctcagcagcatcagacacatgatccgcaagaacaagtaccgccccgacctgcgcatggcagccatccgcagggccagcgccatcctgcgcagccagaagcctgtgatggtgaagaggaagcggacccgccccaccaagagctcctgagccccctgcccccagagcaataaagtcagctggctttctcaccaaaaaaaaaaaaaaaaaaaaaaaaaaaaacaaaaaaaaaaaaaaaaaaaaaaaaaaaaaaaaaaaagacacggcggaggagcaacacatgtgggcggggcgcgagagaaagagaggtacaatgaaggggcacgagggggaacagagggacaccgcaccccacttcttgtcacacagggggacactacgggggccccccatagggggcagataatcagacaacacgtgtgccgcaatag

SEQ ID NO: 438778 - DNA, 638 bp, Homo sapiens
aggatccttaattaaattaatcttccccccccccccgctctttccgtctcaggtccccgctttccgtctcaggtcaggtcgccgctgcggagggagccgccgccatgtctgcgcatctgcaatggatggtcgtgcggaactgctccagtttcctgatcaagaggaataagcagacctacagcactgagcccaataacttgaaggcccgcaattccttccgctacaacggactgattcaccgcaagactgtgggcgtggagccggcagccgacggcaaaggtgtcgtggtggtcattaagcggagatccggccagcggaagcctgccacctcctatgtgcggaccaccatcaacaagaatgctcgcgccacgctcagcagcatcagacacatgatccgcaagaacaagtaccgccccgacctgcgcatggcagccatccgcagggccagcgccatcctgcgcagccagaagcctgtgatggtgaagaggaagcggacccgccccaccaagagctcctgagccccctgcccccagagcaataaagtcagctggctttctcaccaaaaaaaaaaaaaaaaaaaaaaaagaggggggcccggtacccaattcgcctattaggggcggtttacacattactgg

SEQ ID NO: 438779 - DNA, 744 bp, Homo sapiens
aggatccttaattaaattaatcttccccccccccccgctctttccgtctcaggtccccgctttccgtctcaggtcaggtcgccgctgcggagggagccgccgccatgtctgcgcatctgcaatggatggtcgtgcggaactgctccagtttcctgatcaagaggaataagcagacctacagcactgagcccaataacttgaaggcccgcaattccttccgctacaacggactgattcaccgcaagactgtgggcgtggagccggcagccgacggcaaaggtgtcgtggtggtcattaagcggagatccggccagcggaagcctgccacctcctatgtgcggaccaccatcaacaagaatgctcgcgccacgctcagcagcatcagacacatgatccgcaagaacaagtaccgccccgacctgcgcatggcagccatccgcagggccagcgccatcctgcgcagccagaagcctgtgatggtgaagaggaagcggacccgccccaccaagagctcctgagccccctgcccccagagcaataaagtcagctggctttctcaccaaaaaaaaaaaaaaaaaaaaaaaaaaaaaaaaaaaaaaaaaaaaaaaaacaaaaaaaaaaaaaaaaaacgaggggggaaaattatggggggggggggagaaaagagaagaaagagggaggaggggggaaaaaggtttggcgacccacattttgaggcaaaggggggaagagaggggggccata

SEQ ID NO: 438780 - DNA, 706 bp, Homo sapiens
aggatccttaattaaattaatcttccccccccccccgctctttccgtctcaggtccccgctttccgtctcaggtcgccgctgcgaagggagccgccgccatgtctgcgcatctgcaatggatggtcgtgcggaactgctccagtttcctgatcaagaggaataagcagacctacagcactgagcccaataacttgaaggcccgcaattccttccgctacaacggactgattcaccgcaagactgtgggcgtggagccggcagccgacggcaaaggtgtcgtggtggtcattaagcggagatccggccagcggaagcctgccacctcctatgtgcggaccaccatcaacaagaatgctcgcgccacgctcagcagcatcagacacatgatccgcaagaacaagtaccgccccgacctgcgcatggcagccatccgcagggccagcgccatcctgcgcagccagaagcctgtgatggtgaagaggaaacgccggggacccggccccccaacccaaaggagcttcccttggaaggcccccccttggcccccccaaggaaggcaaattaaaaggttcaaggcttgggctttttctcaaaaataaacagaacaaagaaaaagaacaaaaaaaaaggcacgaccaggaaaaaaaccaccgtgcagcagcacaaaaaatgggggggcccccaataaacccccccgggcgggcc

SEQ ID NO: 438781 - DNA, 827 bp, Homo sapiens
aggatccttaattaaattaatcttccccccccccccgctctttccgtctcaggtccccgctttccgtctcaggtcaggtcgccgctgcggagggagccgccgccatgtctgcgcatctgcaatggatggtcgtgcggaactgctccagtttcctgatcaagaggaataagcagacctacagcactgagcccaataacttgaaggcccgcaattccttccgctacaacggactgattcaccgcaagactgtgggcgtggagccggcagccgacggcaaaggtgtcgtggtggtcattaagcggagatccggccagcggaagcctgccacctcctatgtgcggaccaccatcaacaagaatgctcgcgccacgctcagcagcatcagacacatgatccgcaagaacaagtaccgccccgacctgcgcatggcagccatccgcagggccagcgccatcctgcgcagccagaagcctgtgatggtgaagaggaagcggacccgccccaccaagagctcctgagccccctgcccccagagcaataaagtcagctggctttctcaccaaaaaaagaaaaaagaccggggcgcttcgagagatgcgcgttactcagaagtcgaccgagcgtgctcatccggaagctgccctcccagaggtgggcgagggagatcgcgcggatttccaaaaccgacctgaggttcagagcgcagccatcggtgcgctgcagaggctaacgaagcgacccgggggcctgcccaagatccacccgggtgcaccacgcagagagccccatggccaaaaccagggccccgacagggaaaccaagagggt

SEQ ID NO: 438782 - DNA, 964 bp, Homo sapiens
aggatccttaattaaattaatcttccccccccccccgctctttccgtctcaggtccccgctttccgtctcaggtcgccgctgcgaagggagccgccgccatgtctgcgcatctgcaatggatggtcgtgcggaactgctccagtttcctgatcaagaggaataagcagacctacagcactgagcccaataacttgaaggcccgcaattccttccgctacaacggactgattcaccgcaagactgtgggcgtggagccggcagccgacggcaaaggtgtcgtggtggtcattaagcggagatccggccagcggaagcctgccacctcctatgtgcggaccaccatcaacaagaatgctcgcgccacgctcagcagcatcagacacatgatccgcaagaacaagtaccgccccgacctgcgcatggacatgctggcatctactgggtcagggctctgctgctcggtggctgtgcaaccttgggcaagttcctcaacctctctgtgtcttcgtaccctcatctgtaacatgcgtgtcgatagaccctactactcagggttgatgagaagattaaatgtgcaaaacctgcttgactgtgcccacaaatcctgattgtaggaataaattaatgactttttataaatattttgatcagatggactcagatgatcacagatgtcttcacatgcctatgactaatttgtacacaaactaatgctcgtgtttcccaagcacctggaagacatgccagatccatgtgcagtaatgcctggtggctccaggtctgccccgccgtcctgtggggctgtgagctttcccagcctcctgcccgtgtttgtgaatatcattctgtcctcagctgcatttccagcccaggctgtttggcgctgcccaggaatggtatcaattcccctgtttctcttgtagccagttactagaataaaatcatctactttaaaatctttca

SEQ ID NO: 438783 - DNA, 609 bp, Homo sapiens
  misc_feature (555)..(555): n is a, c, g, or t
aggatccttaattaaattaatcttccccccccccccgctctttccgtctcaggtccccgctttccgtctcaggtcgccgctgcgaagggagccgccgccatgtctgcgcatctgcaatggatggtcgtgcggaactgctccagtttcctgatcaagaggaataagcagacctacagcactgagcccaataacttgaaggcccgcaattccttccgctacaacggactgattcaccgcaagactgtgggcgtggagccggcagccgacggcaaaggtgtcgtggtggtcattaagcggagatccggccagcggaagcctgccacctcctatgtgcggaccaccatcaacaagaatgctcgcgccacgctcagcagcatcagacacatgatccgcaagaacaagtaccgccccgacctgcgcatggcagccatccgcagggccagcgcagttcaaaccacacaaactccagcctgtgggagagggatccttcatcctggacgcacctgccctctgcccagccactataaaaaccagagccacgtgccccttcttttngcttgagtgtgggccctgctgtccccagaaagcctcatttacccacactttcca

SEQ ID NO: 438784 - DNA, 638 bp, Homo sapiens
aggatccttaattaaattaatcttccccccccccccgctctttccgtctcaggtccccgctttccgtctcaggtcgccgctgcgaagggagccgccgccatgtctgcgcatctgcaatggatggtcgtgcggaactgctccagtttcctgatcaagaggaataagcagacctacagcactgagcccaataacttgaaggcccgcaattccttccgctacaacggactgattcaccgcaagactgtgggcgtggagccggcagccgacggcaaaggtgtcgtggtggtcattaagcggagatccggccagcggaagcctgccacctcctatgtgcggaccaccatcaacaagaatgctcgcgccacgctcagcagcatcagacacatgatccgcaagaacaagtaccgccccgacctgcgcatggacatgctggcatctactgggtcagggctctgctgctcggtggctgtgcaaccttgggcaagttcctcaacctctctgtgtcttcgtaccctcatctgtaacatgcgtgtcgatagaccctactactcagggttgatgagaagattaaatgtgcaaaacctgcttgactgtgcccacaaatcctgattgtaggaataaattaatgactttttata

SEQ ID NO: 438785 - DNA, 750 bp, Homo sapiens
aggatccttaattaaattaatcttccccccccccccgctctttccgtctcaggtccccgctttccgtctcaggtcgccgctgcgaagggagccgccgccatgtctgcgcatctgcaatggatggtcgtgcggaactgctccagtttcctgatcaagaggaataagcagacctacagcactgagcccaataacttgaaggcccgcaattccttccgctacaacggactgattcaccgcaagactgtgggcgtggagccggcagccgacggcaaaggtgtcgtggtggtcattaagcggagatccggccagcggaagcctgccacctcctatgtgcggaccaccatcaacaagaatgctcgcgccacgctcagcagcatcagacacatgatccgcaagaacaagtaccgccccgacctgcgcatggtgagctggggtttggggatcaggcttggggagactggccagtgctgtggggaagggcctcccactactggttgcaatatgggctggagagggatggattcttgctttcagcctactccccacacccagcattggcctagggggcggcttgtggagtgtatgggctgagccttgctctgctcccccgcccccaggcagccatccgcagggccagcgccatcctgcgcagccagaagcctgtgatggtgaagaggaagcggacccgccccaccaagagctcctgagccccctgcccccagagcaataaagtcagctggctttctcacc

SEQ ID NO: 438786 - DNA, 756 bp, Homo sapiens
aggatccttaattaaattaatcttccccccccccccgctctttccgtctcaggtccccgctttccgtctcaggtcgccgctgcgaagggagccgccgccatgtctgcgcatctgcaatggatggtcgtgcggaactgctccagtttcctgatcaagaggaataagcagacctacagcactgagcccaataacttgaaggcccgcaattccttccgctacaacggactgattcaccgcaagactgtgggcgtggagccggcagccgacggcaaaggtgtcgtggtggtcattaagcggagatccggccagcggaagcctgccacctcctatgtgcggaccaccatcaacaagaatgctcgcgccacgctcagcagcatcagacacatgatccgcaagaacaagtaccgccccgacctgcgcatgcttgcgggaagggttgggaggcagcaggctgtaagcagcctggagcaccagcctagaccaggacgcctccacctcagcaacaccgcagccaggtcattctgtgtcatggagccatctcgtacgctgcaggatttgggcagcacccttggcctccacccactagatgctagtggcacccccgagttgtgacaaccctttctggtctcctgacaatgcataataccccttggggggcaaaatcacctctggctgagaaacactggtttatgaaccctatcgctattaaaaaaccactgaactgtacacaataaaaaaaaaaattctccaagggcg

SEQ ID NO: 438787 - DNA, 831 bp, Homo sapiens
aggatccttaattaaattaatcttccccccccccccgctctttccgtctcaggtccccgctttccgtctcaggtcgccgctgcgaagggagccgccgccatgtctgcgcatctgcaatggatggtcgtgcggaactgctccagtttcctgatcaagaggaataagcagacctacagcactgagcccaataacttgaaggcccgcaattccttccgctacaacggactgattcaccgcaagactgtgggcgtggagccggcagccgacggcaaaggtgtcgtggtggtcattaagcggagatccggccagcggaagcctgccacctcctatgtgcggaccaccatcaacaagaatgctcgcgccacgctcagcagcatcagacacatgatccgcaagaacaagtaccgccccgacctgcgcatgcttgcgggaagggttgggaggcagcaggctgtaagcagcctggagcaccagcctagaccaggacgcctccacctcagcaacaccgcagccaggtcattctgtgtcatggagccatctcgtacgctgcaggatttgggcagcacccttggcctccacccactagatgctagtggcacccccgagttgtgacaaccctttctggtctcctgacaatgcataataccccttggggggcaaaatcacctctggctgagaaacactggtttatgaaccctatcgctattaaaaaaccactgaactgtatactttggaactgagttttacggcatgtaagctcagctttagcaaaaaagcctctaatgagaccccatctctgcaaaccataaaaatataaaaactaaaaaaaaa

SEQ ID NO: 438788 - DNA, 423 bp, Homo sapiens
aggatccttaattaaattaatcttccccccccccccgctctttccgtctcaggtccccgctttccgtctcaggtcgccgctgcgaagggagccgccgccatgtctgcgcatctgcaatggatggtcgtgcggaactgctccagtttcctgatcaagaggaataagcagacctacagcactgagcccaataacttgaaggcccgcaattccttccgctacaacggactgattcaccgcaagactgtgggcgtggagccggcagccgacggcaaaggtgtcgtggtggtcattaagcggagatccggccagcggaagcctgccacctcctatgtgcggaccaccatcaacaagaatgctcgcgccacgctcagcagcatcagacacatggcacgcgacatcgccaggtaccgagctgatttattg

SEQ ID NO: 438789 - DNA, 5457 bp, Homo sapiens
aggatccttaattaaattaatcttccccccccccccgctctttccgtctcaggtccccgctttccgtctcaggtcgccgctgcgaagggagccgccgccatgtctgcgcatctgcaatggatggtcgtgcggaactgctccagtttcctgatcaagaggaataagcagacctacagcactgagcccaataacttgaaggcccgcaattccttccgctacaacggactgattcaccgcaagactgtgggcgtggagccggcagccgacggcaaaggtgtcgtggtggtcattaagcggagatccggtgagttttgtctggtttgggccagagagcggcccctttcccgggtctgggagctgtgattttttactgtcaggcaggaagagcggtaactgccatcgcggcgggcatccctggcgccagggtgttggtctgggtaccggcttccctctcggccgacttgtcagctctgtgagccgcgcgcgtctgagcccgtgtcctcacctgtaaagtggagaaatgattttcagatgaaattctcaaagcaagtcagggtggggatggatggtttcatcccacaggtgggaagattgaggcacaacaggggaggggccctcgctaccacacttaggaggggacaggctgggttggttgcagccatttgattcccattttgcctgtgtaggttagagaagaggtcttggggaccccactccatacattgtgctgtcaggtgcaggcctttttggggattccctgaatgttcgtgtgagtcgggggtctctaatggaggagtccagcttcacatgtgttcttgacagggctgtattttctttttagagtgagtttttctcaggtccttgattggaactgcctcagagccaagggtccttttactcagtggcagcaacaaacgcagtctgttggctagtgatcctcctgtctcagggacacgtagtccagggagcagccaattgcttggcacttggggaccccgttctggggagtcctgaaagctttcacctcttggattgccgaatacatgggtggcccttcctagactaagggactggcctgagtgaggctgggcctctcagccaagctgatgttgaaccactgctgtggggatgggcctggggttcctgggaagctgttcatacccattgccaggagcgtgggctctggctggacctggatcagatcctaactgaagcggcagctttctggcatgagaaaggagtgttttcatggtggacagaattgggctatgagtgtggcagaagctgtgtcctcagtactccgtgatgacgagtgagcctctgtgaaatggacaggtgggaaaacagctacctgctggcctgcccaggcacccgccacgggcccacgctgctcagcttctcaatgtgagactgtccacacctgcgaggtgtgctaaaggtgcaggttaggtggactgaccccaggacctccctgacccccaaccaggccagcggaagcctgccacctcctatgtgcggaccaccatcaacaagaatgctcgcgccacgctcagcagcatcagacacatgatccgcaagaacaagtaccgccccgacctgcgcatggcagccatccgcagggccagcgccatcctgcgcagccagaagcctgtgatggtgaagaggaagcggacccgccccaccaagagctcctgagccccctgcccccagagcaataaagtcagctggctttctcacctgcctcgactgggcctccctttttgaaacgctctggggagctctggccctgtgtgttgtcattcaggccatgtcatcaaaactctgcatgtcaccttgtccatctggaggtgatgtcaatggctggccatgcaggaggggtggggtagctgccttgtccctggtgagggcaagggtcactgtcttcacagaaaaagtttgctgacttgtgattgagacctactgtcccattgtgaggtggcctgaagaatcccagctggggcagtggcttccattcagaagaagaaaggccttttctagcccagaagggtgcaggctgagggctgggccctgggccctggtgctgtagcacggtttggggacttggggtgttcccaagacctgggggacgacagacatcacgggaggaagatgagatgacttttgcatccagggagtgggtgcagccacatttggaggggatgggctttacttgatgcaacctcatctctgagatgggcaacttggtgggtggtggcttataactgtaagggagatggcagccccagggtacagccagcaggcattgagcagccttagcattgtccccctactcccgtcctccaggtgtccccatccctcccctgtctctttgagctggctcttgtcacttaggtctcatctcagtggccgctcctgggccaccctgtcacccaagctttcctgattgcccagccctcttgtttcctttggcctgtttgctccctagtgtttattacagcttgtgaggccaggagtttgagaccatcctaggcaacataatgagacaccgtctctaaaataaaattagctgggtgtggtggtgcaccgcctgtggtcccagctcctcagaggttgagtagaggctgaggtgagcggagcacttgagccaagagtatgaggctgcagtgagcccatgagccccaccactacactccagcctggaagacaccatgacacacagtgaggcctggatggggaaagagtcctgctgttgatcctcacatgtttcctgggcacctaactctgtcagccactgccagggaccaaggatccagcatccatggcacccctggttcctgccatcctggggtacccgattcaaagagggactctgctccctgtctgagaccacccccggctctgactgagagtaaggggactgtcagggcctcgacttgccattggttggggtcgtacggggctgggagccctgcgttttgaggcagaccactgcccttccgacctcagtcctgtctgctccagtcttgcccagctcgaaggagagcagatctgaccacttgccagcccctgtctgctgtgaattaccatttcctttgtccttcccttagttgggtctattagctcagattgagaggtgttgccttaaaactgagttgggtgacttggtacctgctcaggaccccccgcactgtcccaatcccactcaggcccacctccagctggcctcactccgctggtgacttcgtacctgctcaggagcccccactgtcccagtcccactcaggcccatctctggctggcctcactgcgctgggactccgccttcataaggagagctcactgctcacgttagtagatggccccttctcgtgaggcctctcccctggcacctgcttcagttgtcctccacagcactgatttgcagcccacaagctggcaggtttatctgtctcatgtttgtcttgtgctggtgggcaaggggtttgtctagcacaccagcatataatgagatgcttgatgaatggtgcatattgaatgtataaagcccaccggtcctgagagtttgctcactggagactttctggagatggagtctcgctctgttgcccaggctggcgagtgcaatggcgcgatcttggctcactgcaacctccacctcctgggttcaagcgattctcctgcctcagcctcccgagtagctgggattacaggtgggtgtcaccacacccagctcagtattgtatttttagcagagatggggtttcaccattttgcccaggctggtttggaactcctgacttcaaattacccacctgcctcagcctcccaaagtgctggcattacaggcgctcgaggctttctgatgtggctgctgctgctcagaaggccttgtccttaaccacctccttgcctgccctggaggcttgtgcctctaggccccaccccctgtggagtcctgctggctttctccatccctatctgaatcctccctgctgtgtggcctcccctggtctcatccgtaacacagcccagcttagtgggcctctgttcctgcgggtggccagcctgtctgtgtggctgggctggggaggccacgtctggtatctgaatgctatcggtgggttggggtggaggaaccaggagagggctggagggagggagatggtctcagccccacagagtttggagtcctcagtgtgctgagcaaacgtggagacaccatttccctcctctagacctcatcttggagagagagatgttggatggggccatctattccagctttattcacacaaatcatgtctgttggcctggaaattggaaaaccagttaaaccaaaaacatgatattaagaaaacaggcaggctcaccatagtaaaaatgctgaaagccaaagacaaaattgggagaacaaaagaaaagcgtcttgtcacatacagaaggtccctgataaagttagtagctgccctcatcagaaaccaggcccaggcagtggggacacatccagagtgctgaaagaacctcccccaggtcatcctatccccaagagtgatgcccggcagcattcccagctcagggctaatggttcacggaagccaggaatcaaactgcctgggttccagtcccagctctgccagttatgcccagctgtggggacttgggcagctcgtttagtagcaccgtgcctcagtttcccatatgtaaaaggccattttgagtgcctttcacagccctgcataaggcaggtgtctcagtgttcactgctgtctctccagctcttagtccagtagctgcatggtgagtgagcgtagggcgcaccctggaaggctgccaagcccaaagttgtgcagagcgctggggactccagactccccacagcagcagagactcgggactgaggcatcctctgttcacaggacatgctggcatctactgggtcagggctctgctgctcggtggctgtgcaaccttgggcaagttcctcaacctctctgtgtcttcgtaccctcatctgtaacatgcgtgtcgatagaccctactactcagggttgatgagaagattaaatgtgcaaaacctgcttgactgtgcccacaaatcctgattgtaggaataaattaatgactttttataaatattttgatcagatggactcagatgatcacagatgtcttcacatgcctatgactaatttgtacacaaactaatgctcgtgtttcccaagcacctggaagacatgccagatccatgtgcagtaatgcctggtggctccaggtctgccccgccgtcctgtggggctgtgagctttcccagcctcctgcccgtgtttgtgaatatcattctgtcctcagctgcatttccagcccaggctgtttggcgctgcccaggaatggtatcaattcccctgtttctcttgtagccagttactagaataaaatcatctactttaaaatctttca

SEQ ID NO: 438790 - DNA, 5511 bp, Homo sapiens
aggatccttaattaaattaatcttccccccccccccgctctttccgtctcaggtccccgctttccgtctcaggtcgccgctgcgaagggagccgccgccatgtctgcgcatctgcaatggatggtcgtgcggaactgctccagtttcctgatcaagaggaataagcagacctacagcactgagcccaataacttgaaggcccgcaattccttccgctacaacggactgattcaccgcaagactgtgggcgtggagccggcagccgacggcaaaggtgtcgtggtggtcattaagcggagatccggtgagttttgtctggtttgggccagagagcggcccctttcccgggtctgggagctgtgattttttactgtcaggcaggaagagcggtaactgccatcgcggcgggcatccctggcgccagggtgttggtctgggtaccggcttccctctcggccgacttgtcagctctgtgagccgcgcgcgtctgagcccgtgtcctcacctgtaaagtggagaaatgaaaaaggacctgaacttcctcggtggttgttgagagttaaggcacggggttgatgttttcagatgaaattctcaaagcaagtcagggtggggatggatggtttcatcccacaggtgggaagattgaggcacaacaggggaggggccctcgctaccacacttaggaggggacaggctgggttggttgcagccatttgattcccattttgcctgtgtaggttagagaagaggtcttggggaccccactccatacattgtgctgtcaggtgcaggcctttttggggattccctgaatgttcgtgtgagtcgggggtctctaatggaggagtccagcttcacatgtgttcttgacagggctgtattttctttttagagtgagtttttctcaggtccttgattggaactgcctcagagccaagggtccttttactcagtggcagcaacaaacgcagtctgttggctagtgatcctcctgtctcagggacacgtagtccagggagcagccaattgcttggcacttggggaccccgttctggggagtcctgaaagctttcacctcttggattgccgaatacatgggtggcccttcctagactaagggactggcctgagtgaggctgggcctctcagccaagctgatgttgaaccactgctgtggggatgggcctggggttcctgggaagctgttcatacccattgccaggagcgtgggctctggctggacctggatcagatcctaactgaagcggcagctttctggcatgagaaaggagtgttttcatggtggacagaattgggctatgagtgtggcagaagctgtgtcctcagtactccgtgatgacgagtgagcctctgtgaaatggacaggtgggaaaacagctacctgctggcctgcccaggcacccgccacgggcccacgctgctcagcttctcaatgtgagactgtccacacctgcgaggtgtgctaaaggtgcaggttaggtggactgaccccaggacctccctgacccccaaccaggccagcggaagcctgccacctcctatgtgcggaccaccatcaacaagaatgctcgcgccacgctcagcagcatcagacacatgatccgcaagaacaagtaccgccccgacctgcgcatggcagccatccgcagggccagcgccatcctgcgcagccagaagcctgtgatggtgaagaggaagcggacccgccccaccaagagctcctgagccccctgcccccagagcaataaagtcagctggctttctcacctgcctcgactgggcctccctttttgaaacgctctggggagctctggccctgtgtgttgtcattcaggccatgtcatcaaaactctgcatgtcaccttgtccatctggaggtgatgtcaatggctggccatgcaggaggggtggggtagctgccttgtccctggtgagggcaagggtcactgtcttcacagaaaaagtttgctgacttgtgattgagacctactgtcccattgtgaggtggcctgaagaatcccagctggggcagtggcttccattcagaagaagaaaggccttttctagcccagaagggtgcaggctgagggctgggccctgggccctggtgctgtagcacggtttggggacttggggtgttcccaagacctgggggacgacagacatcacgggaggaagatgagatgacttttgcatccagggagtgggtgcagccacatttggaggggatgggctttacttgatgcaacctcatctctgagatgggcaacttggtgggtggtggcttataactgtaagggagatggcagccccagggtacagccagcaggcattgagcagccttagcattgtccccctactcccgtcctccaggtgtccccatccctcccctgtctctttgagctggctcttgtcacttaggtctcatctcagtggccgctcctgggccaccctgtcacccaagctttcctgattgcccagccctcttgtttcctttggcctgtttgctccctagtgtttattacagcttgtgaggccaggagtttgagaccatcctaggcaacataatgagacaccgtctctaaaataaaattagctgggtgtggtggtgcaccgcctgtggtcccagctcctcagaggttgagtagaggctgaggtgagcggagcacttgagccaagagtatgaggctgcagtgagcccatgagccccaccactacactccagcctggaagacaccatgacacacagtgaggcctggatggggaaagagtcctgctgttgatcctcacatgtttcctgggcacctaactctgtcagccactgccagggaccaaggatccagcatccatggcacccctggttcctgccatcctggggtacccgattcaaagagggactctgctccctgtctgagaccacccccggctctgactgagagtaaggggactgtcagggcctcgacttgccattggttggggtcgtacggggctgggagccctgcgttttgaggcagaccactgcccttccgacctcagtcctgtctgctccagtcttgcccagctcgaaggagagcagatctgaccacttgccagcccctgtctgctgtgaattaccatttcctttgtccttcccttagttgggtctattagctcagattgagaggtgttgccttaaaactgagttgggtgacttggtacctgctcaggaccccccgcactgtcccaatcccactcaggcccacctccagctggcctcactccgctggtgacttcgtacctgctcaggagcccccactgtcccagtcccactcaggcccatctctggctggcctcactgcgctgggactccgccttcataaggagagctcactgctcacgttagtagatggccccttctcgtgaggcctctcccctggcacctgcttcagttgtcctccacagcactgatttgcagcccacaagctggcaggtttatctgtctcatgtttgtcttgtgctggtgggcaaggggtttgtctagcacaccagcatataatgagatgcttgatgaatggtgcatattgaatgtataaagcccaccggtcctgagagtttgctcactggagactttctggagatggagtctcgctctgttgcccaggctggcgagtgcaatggcgcgatcttggctcactgcaacctccacctcctgggttcaagcgattctcctgcctcagcctcccgagtagctgggattacaggtgggtgtcaccacacccagctcagtattgtatttttagcagagatggggtttcaccattttgcccaggctggtttggaactcctgacttcaaattacccacctgcctcagcctcccaaagtgctggcattacaggcgctcgaggctttctgatgtggctgctgctgctcagaaggccttgtccttaaccacctccttgcctgccctggaggcttgtgcctctaggccccaccccctgtggagtcctgctggctttctccatccctatctgaatcctccctgctgtgtggcctcccctggtctcatccgtaacacagcccagcttagtgggcctctgttcctgcgggtggccagcctgtctgtgtggctgggctggggaggccacgtctggtatctgaatgctatcggtgggttggggtggaggaaccaggagagggctggagggagggagatggtctcagccccacagagtttggagtcctcagtgtgctgagcaaacgtggagacaccatttccctcctctagacctcatcttggagagagagatgttggatggggccatctattccagctttattcacacaaatcatgtctgttggcctggaaattggaaaaccagttaaaccaaaaacatgatattaagaaaacaggcaggctcaccatagtaaaaatgctgaaagccaaagacaaaattgggagaacaaaagaaaagcgtcttgtcacatacagaaggtccctgataaagttagtagctgccctcatcagaaaccaggcccaggcagtggggacacatccagagtgctgaaagaacctcccccaggtcatcctatccccaagagtgatgcccggcagcattcccagctcagggctaatggttcacggaagccaggaatcaaactgcctgggttccagtcccagctctgccagttatgcccagctgtggggacttgggcagctcgtttagtagcaccgtgcctcagtttcccatatgtaaaaggccattttgagtgcctttcacagccctgcataaggcaggtgtctcagtgttcactgctgtctctccagctcttagtccagtagctgcatggtgagtgagcgtagggcgcaccctggaaggctgccaagcccaaagttgtgcagagcgctggggactccagactccccacagcagcagagactcgggactgaggcatcctctgttcacaggacatgctggcatctactgggtcagggctctgctgctcggtggctgtgcaaccttgggcaagttcctcaacctctctgtgtcttcgtaccctcatctgtaacatgcgtgtcgatagaccctactactcagggttgatgagaagattaaatgtgcaaaacctgcttgactgtgcccacaaatcctgattgtaggaataaattaatgactttttataaatattttgatcagatggactcagatgatcacagatgtcttcacatgcctatgactaatttgtacacaaactaatgctcgtgtttcccaagcacctggaagacatgccagatccatgtgcagtaatgcctggtggctccaggtctgccccgccgtcctgtggggctgtgagctttcccagcctcctgcccgtgtttgtgaatatcattctgtcctcagctgcatttccagcccaggctgtttggcgctgcccaggaatggtatcaattcccctgtttctcttgtagccagttactagaataaaatcatctactttaaaatctttca

SEQ ID NO: 438791 - DNA, 4364 bp, Homo sapiens
aggatccttaattaaattaatcttccccccccccccgctctttccgtctcaggtccccgctttccgtctcaggtcgccgctgcgaagggagccgccgccatgtctgcgcatctgcaatggatggtcgtgcggaactgctccagtttcctgatcaagaggaataagcagacctacagcactgagcccaataacttgaaggcccgcaattccttccgctacaacggactgattcaccgcaagactgtgggcgtgggccggcagccgacggcaaaggtgtcgtggtggtcattaagcggagatccggccagcggaagcctgccacctcctatgtgcggaccaccaagccggcagccgacggcaaaggtgtcgtggtggtcattaagcggagatccggccagcggaagcctgccacctcctatgtgcggaccaccatcaacaagaatgctcgcgccacgctcagcagcatcagacacatgatccgcaagaacaagtaccgccccgacctgcgcatggcagccatccgcagggccagcgccatcctgcgcagccagaagcctgtgatggtgaagaggaagcggacccgccccaccaagagctcctgagccccctgcccccagagcaataaagtcagctggctttctcacctgcctcgactgggcctccctttttgaaacgctctggggagctctggccctgtgtgttgtcattcaggccatgtcatcaaaactctgcatgtcaccttgtccatctggaggtgatgtcaatggctggccatgcaggaggggtggggtagctgccttgtccctggtgagggcaagggtcactgtcttcacagaaaaagtttgctgacttgtgattgagacctactgtcccattgtgaggtggcctgaagaatcccagctggggcagtggcttccattcagaagaagaaaggccttttctagcccagaagggtgcaggctgagggctgggccctgggccctggtgctgtagcacggtttggggacttggggtgttcccaagacctgggggacgacagacatcacgggaggaagatgagatgacttttgcatccagggagtgggtgcagccacatttggaggggatgggctttacttgatgcaacctcatctctgagatgggcaacttggtgggtggtggcttataactgtaagggagatggcagccccagggtacagccagcaggcattgagcagccttagcattgtccccctactcccgtcctccaggtgtccccatccctcccctgtctctttgagctggctcttgtcacttaggtctcatctcagtggccgctcctgggccaccctgtcacccaagctttcctgattgcccagccctcttgtttcctttggcctgtttgctccctagtgtttattacagcttgtgaggccaggagtttgagaccatcctaggcaacataatgagacaccgtctctaaaataaaattagctgggtgtggtggtgcaccgcctgtggtcccagctcctcagaggttgagtagaggctgaggtgagcggagcacttgagccaagagtatgaggctgcagtgagcccatgagccccaccactacactccagcctggaagacaccatgacacacagtgaggcctggatggggaaagagtcctgctgttgatcctcacatgtttcctgggcacctaactctgtcagccactgccagggaccaaggatccagcatccatggcacccctggttcctgccatcctggggtacccgattcaaagagggactctgctccctgtctgagaccacccccggctctgactgagagtaaggggactgtcagggcctcgacttgccattggttggggtcgtacggggctgggagccctgcgttttgaggcagaccactgcccttccgacctcagtcctgtctgctccagtcttgcccagctcgaaggagagcagatctgaccacttgccagcccctgtctgctgtgaattaccatttcctttgtccttcccttagttgggtctattagctcagattgagaggtgttgccttaaaactgagttgggtgacttggtacctgctcaggaccccccgcactgtcccaatcccactcaggcccacctccagctggcctcactccgctggtgacttcgtacctgctcaggagcccccactgtcccagtcccactcaggcccatctctggctggcctcactgcgctgggactccgccttcataaggagagctcactgctcacgttagtagatggccccttctcgtgaggcctctcccctggcacctgcttcagttgtcctccacagcactgatttgcagcccacaagctggcaggtttatctgtctcatgtttgtcttgtgctggtgggcaaggggtttgtctagcacaccagcatataatgagatgcttgatgaatggtgcatattgaatgtataaagcccaccggtcctgagagtttgctcactggagactttctggagatggagtctcgctctgttgcccaggctggcgagtgcaatggcgcgatcttggctcactgcaacctccacctcctgggttcaagcgattctcctgcctcagcctcccgagtagctgggattacaggtgggtgtcaccacacccagctcagtattgtatttttagcagagatggggtttcaccattttgcccaggctggtttggaactcctgacttcaaattacccacctgcctcagcctcccaaagtgctggcattacaggcgctcgaggctttctgatgtggctgctgctgctcagaaggccttgtccttaaccacctccttgcctgccctggaggcttgtgcctctaggccccaccccctgtggagtcctgctggctttctccatccctatctgaatcctccctgctgtgtggcctcccctggtctcatccgtaacacagcccagcttagtgggcctctgttcctgcgggtggccagcctgtctgtgtggctgggctggggaggccacgtctggtatctgaatgctatcggtgggttggggtggaggaaccaggagagggctggagggagggagatggtctcagccccacagagtttggagtcctcagtgtgctgagcaaacgtggagacaccatttccctcctctagacctcatcttggagagagagatgttggatggggccatctattccagctttattcacacaaatcatgtctgttggcctggaaattggaaaaccagttaaaccaaaaacatgatattaagaaaacaggcaggctcaccatagtaaaaatgctgaaagccaaagacaaaattgggagaacaaaagaaaagcgtcttgtcacatacagaaggtccctgataaagttagtagctgccctcatcagaaaccaggcccaggcagtggggacacatccagagtgctgaaagaacctcccccaggtcatcctatccccaagagtgatgcccggcagcattcccagctcagggctaatggttcacggaagccaggaatcaaactgcctgggttccagtcccagctctgccagttatgcccagctgtggggacttgggcagctcgtttagtagcaccgtgcctcagtttcccatatgtaaaaggccattttgagtgcctttcacagccctgcataaggcaggtgtctcagtgttcactgctgtctctccagctcttagtccagtagctgcatggtgagtgagcgtagggcgcaccctggaaggctgccaagcccaaagttgtgcagagcgctggggactccagactccccacagcagcagagactcgggactgaggcatcctctgttcacaggacatgctggcatctactgggtcagggctctgctgctcggtggctgtgcaaccttgggcaagttcctcaacctctctgtgtcttcgtaccctcatctgtaacatgcgtgtcgatagaccctactactcagggttgatgagaagattaaatgtgcaaaacctgcttgactgtgcccacaaatcctgattgtaggaataaattaatgactttttataaatattttgatcagatggactcagatgatcacagatgtcttcacatgcctatgactaatttgtacacaaactaatgctcgtgtttcccaagcacctggaagacatgccagatccatgtgcagtaatgcctggtggctccaggtctgccccgccgtcctgtggggctgtgagctttcccagcctcctgcccgtgtttgtgaatatcattctgtcctcagctgcatttccagcccaggctgtttggcgctgcccaggaatggtatcaattcccctgtttctcttgtagccagttactagaataaaatcatctactttaaaatctttca

SEQ ID NO: 438792 - DNA, 1738 bp, Homo sapiens
aggatccttaattaaattaatcttccccccccccccgctctttccgtctcaggtccccgctttccgtctcaggtcgccgctgcgaagggagccgccgccatgtctgcgcatctgcaatggatggtcgtgcggaactgctccagtttcctgatcaagaggaataagcagacctacagcactgagcccaataacttgaaggcccgcaattccttccgctacaacggactgattcaccgcaagactgtgggcgtggagccggcagccgacggcaaaggtgtcgtggtggtcattaagcggagatccggtgagttttgtctggtttgggccagagagcggcccctttcccgggtctgggagctgtgattttttactgtcaggcaggaagagcggtaactgccatcgcggcgggcatccctggcgccagggtgttggtctgggtaccggcttccctctcggccgacttgtcagctctgtgagccgcgcgcgtctgagcccgtgtcctcacctgtaaagtggagaaatgattttcagatgaaattctcaaagcaagtcagggtggggatggatggtttcatcccacaggtgggaagattgaggcacaacaggggaggggccctcgctaccacacttaggaggggacaggctgggttggttgcagccatttgattcccattttgcctgtgtaggttagagaagaggtcttggggaccccactccatacattgtgctgtcaggtgcaggcctttttggggattccctgaatgttcgtgtgagtcgggggtctctaatggaggagtccagcttcacatgtgttcttgacagggctgtattttctttttagagtgagtttttctcaggtccttgattggaactgcctcagagccaagggtccttttactcagtggcagcaacaaacgcagtctgttggctagtgatcctcctgtctcagggacacgtagtccagggagcagccaattgcttggcacttggggaccccgttctggggagtcctgaaagctttcacctcttggattgccgaatacatgggtggcccttcctagactaagggactggcctgagtgaggctgggcctctcagccaagctgatgttgaaccactgctgtggggatgggcctggggttcctgggaagctgttcatacccattgccaggagcgtgggctctggctggacctggatcagatcctaactgaagcggcagctttctggcatgagaaaggagtgttttcatggtggacagaattgggctatgagtgtggcagaagctgtgtcctcagtactccgtgatgacgagtgagcctctgtgaaatggacaggtgggaaaacagctacctgctggcctgcccaggcacccgccacgggcccacgctgctcagcttctcaatgtgagactgtccacacctgcgaggtgtgctaaaggtgcaggttaggtggactgaccccaggacctccctgacccccaaccaggccagcggaagcctgccacctcctatgtgcggaccaccatcaacaagaatgctcgcgccacgctcagcagcatcagacacatgatccgcaagaacaagtaccgccccgacctgcgcatggcagccatccgcagggccagcgccatcctgcgcagccagaagcctgtgatggtgaagaggaagcggacccgccccaccaagagctcctgagccccctgcccccagagcaataaagtcagctggctttctcacc

SEQ ID NO: 438793 - DNA, 4273 bp, Homo sapiens
  misc_feature (190)..(190): n is a, c, g, or t
  misc_feature (194)..(194): n is a, c, g, or t
  misc_feature (198)..(198): n is a, c, g, or t
  misc_feature (202)..(202): n is a, c, g, or t
  misc_feature (266)..(266): n is a, c, g, or t
  misc_feature (294)..(294): n is a, c, g, or t
aagacgccccaacagccccacccacaggttcacccaattacggctaggtacgaggcgggtggtggcgccgctgcgaagggagccgccgccatgtctgcgcatctgcaatggatggtcgtgcggaactgctccagtttcctgatcaagaggaataagcagacctacagcactgagcccaataatcttgaangccngcanctcncttccgctacaatcggactgaattcaccgcaagactgttggcgttgagccagcgcagccgacgncaaaggtgtcctggcttggcaaaacccntagatccggccagcggaagcctgccacctcctatgtgcggaccaccatcaacaagaatgctcgcgccacgctcagcagcatcagacacatgatccgcaagaacaagtaccgccccgacctgcgcatggcagccatccgcagggccagcgccatcctgcgcagccagaagcctgtgatggtgaagaggaagcggacccgccccaccaagagctcctgagccccctgcccccagagcaataaagtcagctggctttctcacctgcctcgactgggcctccctttttgaaacgctctggggagctctggccctgtgtgttgtcattcaggccatgtcatcaaaactctgcatgtcaccttgtccatctggaggtgatgtcaatggctggccatgcaggaggggtggggtagctgccttgtccctggtgagggcaagggtcactgtcttcacagaaaaagtttgctgacttgtgattgagacctactgtcccattgtgaggtggcctgaagaatcccagctggggcagtggcttccattcagaagaagaaaggccttttctagcccagaagggtgcaggctgagggctgggccctgggccctggtgctgtagcacggtttggggacttggggtgttcccaagacctgggggacgacagacatcacgggaggaagatgagatgacttttgcatccagggagtgggtgcagccacatttggaggggatgggctttacttgatgcaacctcatctctgagatgggcaacttggtgggtggtggcttataactgtaagggagatggcagccccagggtacagccagcaggcattgagcagccttagcattgtccccctactcccgtcctccaggtgtccccatccctcccctgtctctttgagctggctcttgtcacttaggtctcatctcagtggccgctcctgggccaccctgtcacccaagctttcctgattgcccagccctcttgtttcctttggcctgtttgctccctagtgtttattacagcttgtgaggccaggagtttgagaccatcctaggcaacataatgagacaccgtctctaaaataaaattagctgggtgtggtggtgcaccgcctgtggtcccagctcctcagaggttgagtagaggctgaggtgagcggagcacttgagccaagagtatgaggctgcagtgagcccatgagccccaccactacactccagcctggaagacaccatgacacacagtgaggcctggatggggaaagagtcctgctgttgatcctcacatgtttcctgggcacctaactctgtcagccactgccagggaccaaggatccagcatccatggcacccctggttcctgccatcctggggtacccgattcaaagagggactctgctccctgtctgagaccacccccggctctgactgagagtaaggggactgtcagggcctcgacttgccattggttggggtcgtacggggctgggagccctgcgttttgaggcagaccactgcccttccgacctcagtcctgtctgctccagtcttgcccagctcgaaggagagcagatctgaccacttgccagcccctgtctgctgtgaattaccatttcctttgtccttcccttagttgggtctattagctcagattgagaggtgttgccttaaaactgagttgggtgacttggtacctgctcaggaccccccgcactgtcccaatcccactcaggcccacctccagctggcctcactccgctggtgacttcgtacctgctcaggagcccccactgtcccagtcccactcaggcccatctctggctggcctcactgcgctgggactccgccttcataaggagagctcactgctcacgttagtagatggccccttctcgtgaggcctctcccctggcacctgcttcagttgtcctccacagcactgatttgcagcccacaagctggcaggtttatctgtctcatgtttgtcttgtgctggtgggcaaggggtttgtctagcacaccagcatataatgagatgcttgatgaatggtgcatattgaatgtataaagcccaccggtcctgagagtttgctcactggagactttctggagatggagtctcgctctgttgcccaggctggcgagtgcaatggcgcgatcttggctcactgcaacctccacctcctgggttcaagcgattctcctgcctcagcctcccgagtagctgggattacaggtgggtgtcaccacacccagctcagtattgtatttttagcagagatggggtttcaccattttgcccaggctggtttggaactcctgacttcaaattacccacctgcctcagcctcccaaagtgctggcattacaggcgctcgaggctttctgatgtggctgctgctgctcagaaggccttgtccttaaccacctccttgcctgccctggaggcttgtgcctctaggccccaccccctgtggagtcctgctggctttctccatccctatctgaatcctccctgctgtgtggcctcccctggtctcatccgtaacacagcccagcttagtgggcctctgttcctgcgggtggccagcctgtctgtgtggctgggctggggaggccacgtctggtatctgaatgctatcggtgggttggggtggaggaaccaggagagggctggagggagggagatggtctcagccccacagagtttggagtcctcagtgtgctgagcaaacgtggagacaccatttccctcctctagacctcatcttggagagagagatgttggatggggccatctattccagctttattcacacaaatcatgtctgttggcctggaaattggaaaaccagttaaaccaaaaacatgatattaagaaaacaggcaggctcaccatagtaaaaatgctgaaagccaaagacaaaattgggagaacaaaagaaaagcgtcttgtcacatacagaaggtccctgataaagttagtagctgccctcatcagaaaccaggcccaggcagtggggacacatccagagtgctgaaagaacctcccccaggtcatcctatccccaagagtgatgcccggcagcattcccagctcagggctaatggttcacggaagccaggaatcaaactgcctgggttccagtcccagctctgccagttatgcccagctgtggggacttgggcagctcgtttagtagcaccgtgcctcagtttcccatatgtaaaaggccattttgagtgcctttcacagccctgcataaggcaggtgtctcagtgttcactgctgtctctccagctcttagtccagtagctgcatggtgagtgagcgtagggcgcaccctggaaggctgccaagcccaaagttgtgcagagcgctggggactccagactccccacagcagcagagactcgggactgaggcatcctctgttcacaggacatgctggcatctactgggtcagggctctgctgctcggtggctgtgcaaccttgggcaagttcctcaacctctctgtgtcttcgtaccctcatctgtaacatgcgtgtcgatagaccctactactcagggttgatgagaagattaaatgtgcaaaacctgcttgactgtgcccacaaatcctgattgtaggaataaattaatgactttttataaatattttgatcagatggactcagatgatcacagatgtcttcacatgcctatgactaatttgtacacaaactaatgctcgtgtttcccaagcacctggaagacatgccagatccatgtgcagtaatgcctggtggctccaggtctgccccgccgtcctgtggggctgtgagctttcccagcctcctgcccgtgtttgtgaatatcattctgtcctcagctgcatttccagcccaggctgtttggcgctgcccaggaatggtatcaattcccctgtttctcttgtagccagttactagaataaaatcatctactttaaaatctttca

SEQ ID NO: 438794 - DNA, 1870 bp, Homo sapiens
  misc_feature (1763)..(1765): n is a, c, g, or t
aggatccttaattaaattaatcttccccccccccccgctctttccgtctcaggtccccgctttccgtctcaggtcgccgctgcgaagggagccgccgccatgtctgcgcatctgcaatggatggtcgtgcggaactgctccagtttcctgatcaagaggaataagcagacctacagcactgagcccaataacttgaaggcccgcaattccttccgctacaacggactgattcaccgcaagactgtgggcgtggagccggcagccgacggcaaaggtgtcgtggtggtcattaagcggagatccggtgagttttgtctggtttgggccagagagcggcccctttcccgggtctgggagctgtgattttttactgtcaggcaggaagagcggtaactgccatcgcggcgggcatccctggcgccagggtgttggtctgggtaccggcttccctctcggccgacttgtcagctctgtgagccgcgcgcgtctgagcccgtgtcctcacctgtaaagtggagaaatgattttcagatgaaattctcaaagcaagtcagggtggggatggatggtttcatcccacaggtgggaagattgaggcacaacaggggaggggccctcgctaccacacttaggaggggacaggctgggttggttgcagccatttgattcccattttgcctgtgtaggttagagaagaggtcttggggaccccactccatacattgtgctgtcaggtgcaggcctttttggggattccctgaatgttcgtgtgagtcgggggtctctaatggaggagtccagcttcacatgtgttcttgacagggctgtattttctttttagagtgagtttttctcaggtccttgattggaactgcctcagagccaagggtccttttactcagtggcagcaacaaacgcagtctgttggctagtgatcctcctgtctcagggacacgtagtccagggagcagccaattgcttggcacttggggaccccgttctggggagtcctgaaagctttcacctcttggattgccgaatacatgggtggcccttcctagactaagggactggcctgagtgaggctgggcctctcagccaagctgatgttgaaccactgctgtggggatgggcctggggttcctgggaagctgttcatacccattgccaggagcgtgggctctggctggacctggatcagatcctaactgaagcggcagctttctggcatgagaaaggagtgttttcatggtggacagaattgggctatgagtgtggcagaagctgtgtcctcagtactccgtgatgacgagtgagcctctgtgaaatggacaggtgggaaaacagctacctgctggcctgcccaggcacccgccacgggcccacgctgctcagcttctcaatgtgagactgtccacacctgcgaggtgtgctaaaggtgcaggttaggtggactgaccccaggacctccctgacccccaaccaggccagcggaagcctgccacctcctatgtgcggaccaccatcaacaagaatgctcgcgccacgctcagcagcatcagacacatgatccgcaagaacaagtaccgccccgacctgcgcatggcagccatccgcagggccagcgccatcctgcgcagccagaagcctgtgatggtgaagaggaagcggacccgccccaccaagagctcctgagccccctgcccccagagcaataaagtcagctggctttctcaccaaaaaaaaaaaaaaaaaaaaaaaannngggggggttccttttaaagcccccctgagggattcaaattttgaaattggccgtttttttaccccgggaaaaatttttgcccttttttgcttttcccttgggggg

SEQ ID NO: 438795 - DNA, 549 bp, Homo sapiens
aggatccttaattaaattaatcttccccccccccccgctctttccgtctcaggtccccgctttccgtctcaggtcgccgctgcgaagggagccgccgccatgtctgcgcatctgcaatggatggtcgtgcggaactgctccagtttcctgatcaagaggaataagcagacctacagcactgagcccaataacttgaaggcccgcaattccttccgctacaacggactgattcaccgcaagactgtgggcgtggagccggcagccgacggcaaaggtgtcgtggtggtcattaagcggagatccaccccaaaaaaccaaaacccccacccacccccacaacaacccaaaacccccccaagaaaagaagaatcagacacatgatccgcaagaacaagtaccgccccgacctgcgcatggcagccatccgcagggccagcgccatcctgcgcagccagaagcctgtgatggtgaagaggaagcggacccgccccaccaagagctcctgagccccctgcccccagagcaataaagtcagctggctttctcacc

SEQ ID NO: 438796 - DNA, 344 bp, Homo sapiens
  misc_feature (256)..(257): n is a, c, g, or t
  misc_feature (262)..(262): n is a, c, g, or t
  misc_feature (264)..(265): n is a, c, g, or t
  misc_feature (267)..(269): n is a, c, g, or t
  misc_feature (271)..(271): n is a, c, g, or t
aggatccttaattaaattaatcttccccccccccccgctctttccgtctcaggtccccgctttccgtctcaggtcgccgctgcgaagggagccgccgccatgtctgcgcatctgcaatggatggtcgtgcggaactgctccagtttcctgatcaagaggaataagcagacctacagcactgagcccaataacttgaaggcccgcaattccttccgctacaacggactgattcaccgcaagactgtgggcgtgggcnngcatncnngnnnanggtggtccgcacataggaggtggcaggcttccgctggccggatctccgcttaatgaccaccacgacacctttg

SEQ ID NO: 438797 - DNA, 307 bp, Homo sapiens
aagacgccccaacagccccacccacaggttcacccaattacggctaggtacgaggcgggtggtggcgccgctgcgaagggagccgccgccatgtctgcgcatctgcaatggatggtcgtgcggaactgctccagtttcctgatcaagaggaataagcagacctacagcactgaggcagccatccgcagggccagcgccatcctgcgcagccagaagcctgtgatggtgaagaggaagcggacccgccccaccaagagctcctgagccccctgcccccagagcaataaagtcagctggctttctcacc

SEQ ID NO: 438798 - DNA, 604 bp, Homo sapiens
aggatccttaattaaattaatcttccccccccccccgctctttccgtctcaggtccccgctttccgtctcaggtcaggtcgccgctgcggagggagccgccgccatgtctgcgcatctgcaatggatggtcgtgcggaactgctccagtttcctgatcaagaggaataagcagacctacagcactgagcccaataacttgaaggcccgcaattccttccgctacaacggactgattcaccgcaagactgtgggcgtgggccggcagccggcggcgttggatgcagtcagcggcgttggatgcagtcagcggcgttggatgcagtcagcggcgttggatgcagtcagcggcgttggatgcagtccgcggcgttggatgcagtcagcggcgttggatgcagtccgcggcgtgggatgcagtcagcggcgttggatgcagtcagtcggcggcgttggatgcagtcagtcggcggcgttggatgcagtcagtcggcggggttggatgcagtcaggcggcgttggatgcagtcagcggcgttggatgcagtcagcggcgttggatgcagtcagcggcgttggatgcagtcagcggcgttgggcagtcag

SEQ ID NO: 438799 - DNA, 873 bp, Homo sapiens
  misc_feature (597)..(597): n is a, c, g, or t
  misc_feature (599)..(599): n is a, c, g, or t
  misc_feature (627)..(627): n is a, c, g, or t
  misc_feature (646)..(646): n is a, c, g, or t
  misc_feature (719)..(719): n is a, c, g, or t
cggacgcgtgggtcgcccacgcgtcgcaggtcgccgctgcgaagggagccgccgccatgtctgcgcatctgcaatggatggtcgtgcggaactgctccagtttcctgatcaagaggaataagcagacctacagcactgagcccaataacttgaaggcccgcaattccttccgctacaacggactgattcaccgcaagactgtgggcgtggagccggcagccgacggcaaaggtgtcgtggtggtcattaagcggagatccggccagcggaagcctgccacctcctatgtgcggaccaccatcaacaagaatgctcgcgccacgctcagcagcatcagacacatgatccgcaagaacaagtaccgccccgacctgcgcatggcagccatccgcagggccagcgccatcctgcgcagccagaagcctgtgatggtgaagaggaagcggacccgccccaccaagagctcctgagccccctgcccccagagcaataaagtcagctggctttctcaccaaaaaaaaaaaaaaaaaaaaaaaaaccccggggcatcaagtgcgggggggggaaaaaggggacggaaggggcccggggccaaangnggttcccgggacccaagttttctggtcncacagggggtaaaaccggncgggacccccaaaaagggggccggaataaattccgaaaaccccgggtaacctggcttaggagcccgggaaagncccccggactacaccccgctaataacgacggaatcaggggacaaggacttgctgcagaccaacccagcaaggaaccgcgggccgagcaagcgatgcagcacaccgcagtgagcacgaacagccaaaacaccagagcaggacgacgcagacagtg

SEQ ID NO: 438800 - DNA, 870 bp, Homo sapiens
  misc_feature (586)..(586): n is a, c, g, or t
  misc_feature (597)..(598): n is a, c, g, or t
aggatccttaattaaattaatcttccccccccccccgctctttccgtctcaggtcgccgctgcgaagggagccgccgccatgtctgcgcatctgcaatggatggtcgtgcggaactgctccagtttcctgatcaagaggaataagcagacctacagcactgagcccaataacttgaaggcccgcaattccttccgctacaacggactgattcaccgcaagactgtgggcgtggagccggcagccgacggcaaaggtgtcgtggtggtcattaagcggagatccggccagcggaagcctgccacctcctatgtgcggaccaccatcaacaagaatgctcgcgccacgctcagcagcatcagacacatgatccgcaagaacaagtaccgccccgacctgcgcatggcagccatccgcagggccagcgccatcctgcgcagccagaagcctgtgatggtgaagaggaagcggacccgccccaccaagagctcctgagccccctgcccccagagcaataaagtcagctggctttctcaccaaaaaaaaaaaaaaaaaaaaaaaaaaaaaaaaaaaaacggggggtttttnggggggggggnnaaaagggttaataaaaagcgaccagttggtccctaatgtgtttttcgcgacccgcgtttttcttgtcaacaggcgtgaaatcacaggggccccccaaaaggagagcgcatataaatttcgaaaccgcgcgttacctgtttattgttttcacgcacaacacaaagatggaaagagcacaaacgacactgagaacgggacgataacatgtgtacacaccatggaacacaaccacaccacagaacaatgactcatactcaaccgcacagtaatac

SEQ ID NO: 438801 - DNA, 837 bp, Homo sapiens
  misc_feature (29)..(30): n is a, c, g, or t
  misc_feature (35)..(36): n is a, c, g, or t
  misc_feature (40)..(41): n is a, c, g, or t
  misc_feature (43)..(43): n is a, c, g, or t
  misc_feature (45)..(45): n is a, c, g, or t
  misc_feature (48)..(48): n is a, c, g, or t
tgccacctcctatgtgcggaccaccatcnncaagnntgcnngngnccnccagcccaataacttgaaggcccgcaattccttccgctacaacggactgattcaccgcaagactgtgggcgtggagccggcagccgacggcaaaggtgtcgtggtggtcattaagcggagatccggccagcggaagcctgccacctcctatgtgcggaccaccatcaacaagaatgctcgcgccacgctcagcagcatcagacacatgatccgcaagaacaagtaccgccccgacctgcgcatggcagccatccgcagggccagcgccatcctgcgcagccagaagcctgtgatggtgaagaggaagcggacccgccccaccaagagctcctgagccccctgcccccagagcaataaagtcagctggctttctcaccaaaaaaaaaaaaaaaaaaaaaaaaaaaaaaaaaaaaaaaaaacaaaaaaaaaaaaaaaaaaaaaaaaaaaaaaaaaaaaaaaaacaacaaaacaaaaaaaccaaagaggcgcggggcgcgccccgaacaaaacatactacccgagcggggcggggacgcaccagagagcagccgcgcaccccgaactctggagaacaaagagagaggcgccccacagagagagcggcaggatcaacataaagcagccgaccagaccggcagcgcaaaaacaacacagcgccgcgggaaaaaaaaatgcaggcaccgacgaacctcgggaagcgaacccacaccccccggtggcgggccaaacaatagagcgacccccacacccccagaagataaaacgccgacggacgagacaaacacacgg

SEQ ID NO: 438802 - DNA, 694 bp, Homo sapiens
  misc_feature (1)..(1): n is a, c, g, or t
nggctccacccggtggggccgttctagaactagtgattccccgggctgcagaattcggcacgaggggtcgccgctgcgaagggagccgccgccatgtctgcgcatctgcaatggatggtcgtgcggaactgctccagtttcctgatcaagaggaataagcagacctacagcactgagcccaataacttgaaggcccgcaattccttccgctacaacggactgattcaccgcaagactgtgggcgtggagccggcagccgacggcaaaggtgtcgtggtggtcattaagcggagatccggccagcggaagcctgccacctcctatgtgcggaccaccatcaacaagaatgctcgcgccacgctcagcagcatcagacacatgatccgcaagaacaagtaccgccccgacctgcgcatggcagccatccgcagggccagcgccatcctgcgcagccagaagcctgtgatggtgaagaggaagcggacccgccccaccaagagctcctgagccccctgcccccagagcaataaagtcagctggctttctcaccaaaaaaaaaaagaaaaaagcccaaggagacaacaaaaaaaaaggggggggcgccaaaaaagaacccccggggggggcccaaagatagggcgacgcccacggttgtggggacaaaaggggggcgccaaaaggggggcgcaaaaac

SEQ ID NO: 438803 - DNA, 346 bp, Homo sapiens
  misc_feature (3)..(4): n is a, c, g, or t
  misc_feature (6)..(7): n is a, c, g, or t
gcnncnnctactactactactactaaattcgcggccggtcgacagccggcagccgacggcaaaggtgtcgtggtggtcattaagcggagatccggccagcggaagcctgccacctcctatgtgcggaccaccatcaacaagaatgctcgcgccacgctcagcagcatcagacacatgatccgcaagaacaagtaccgccccgacctgcgcatggcagccatccgcagggccagcgccatcctgcgcagccagaagcctgtgatggtgaagaggaagcggacccgccccaccaagagctcctgagccccctgcccccagagcaataaagtcagctggctttctcacc

SEQ ID NO: 438804 - DNA, 503 bp, Homo sapiens
gctgataccgcccccggaatttagcgccgctgcgaagggagccgccgccatgtctgcgcatctgcaatggatggtcgtgcggaactgctccagtttcctgatcaagaggaataagcagacctacagcactgagcccaataacttgaaggcccgcaattccttccgctacaacggactgattcaccgcaagactgtgggcgtggagccggcagccgacggcaaaggtgtcgtggtggtcattaagcggagatccggccagcggaagcctgccacctcctatgtgcggaccaccatcaacaagaatgctcgcgccacgctcagcagcatcagacacatgatccgcaagaacaagtaccgccccgacctgcgcatggcagccatccgcagggccagcgccatcctgcgcagccagaagcctgtgatggtgaagaggaagcggacccgccccaccaagagctcctgagccccctgcccccagagcaataagtcgcgtgcctatccct

SEQ ID NO: 438805 - DNA, 674 bp, Homo sapiens
  misc_feature (19)..(19): n is a, c, g, or t
  misc_feature (32)..(32): n is a, c, g, or t
  misc_feature (57)..(57): n is a, c, g, or t
  misc_feature (311)..(311): n is a, c, g, or t
ccccggcatgtgctgtagnccagcgagaagtnccacagcgacgatgcggtgcgccgnctgtgggtgtccgtccatgccacggcacacagcgcgatggggtggtcggggatgacatggatgtcggtgatgcgctgttccagcagcaggtcttcggcttcgaagcgtcgggtcatgtagggcgccgtcagggcaaaagaaaaggggcggacccgcacctggcgagccgcccccacgacctgcggcttaacgctgctggcggttgccgccctgctcgcggttcgagccttcgttgccgcggttggcctcttcangctgtacatcgagctcggtacctggcgatgtcgcgtgccatgtctgcgcatctgcaatggatggtcgtgcggaactgctccagtttcctgatcaagaggaataagcagacctacagcactgagcccaataacttgaaggcccgcaattccttccgctacaacggactgattcaccgcaagactgtgggcgtggagccggcagccgacggcaaaggtgtcgtggtggtcattaagcggagatccggccagcggaagcctgccacctcctatgtgcggaccaccatcaacaagaatgctcgcgccacgctcagcagcatcagacacatggcacgcgacatcgccaggtaccgagctgatttattg

SEQ ID NO: 438806 - DNA, 669 bp, Homo sapiens
tctagaggatcccttcggctctaccttgtttcaaggtcgccgctgcgaagggagccgccgccatgtctgcgcatctgcaatggatggtcgtgcggaactgctccagtttcctgatcaagaggaataagcagacctacagcactgagcccaataacttgaaggcccgcaattccttccgctacaacggactgattcaccgcaagactgtgggcgtggagccggcagccgacggcaaaggtgtcgtggtggtcattaagcggagatccggccagcggaagcctgccacctcctatgtgcggaccaccatcaacaagaatgctcgcgccacgctcagcagcatcagacacatgatccgcaagaacaagtaccgccccgacctgcgcatggcagccatccgcagggccagcgccatcctgcgcagccagaagcctgtgatggtgaagaggaaacgccggggacccggccccccaacccaaaggagcttcccttggaaggcccccccttggcccccccaaggaaggcaaattaaaaggttcaaggcttgggctttttctcaaaaataaacagaacaaagaaaaagaacaaaaaaaaaggcacgaccaggaaaaaaaccaccgtgcagcagcacaaaaaatgggggggcccccaataaacccccccgggcgggcc

SEQ ID NO: 438807 - DNA, 3585 bp, Homo sapiens
aggatccttaattaaattaatcttccccccccccccgctctttccgtctcaggtccccgctttccgtctcaggtcgccgctgcgaagggagccgccgccatgtctgcgcatctgcaatggatggtcgtgcggaactgctccagtttcctgatcaagaggaataagcagacctacagcactgagcccaataacttgaaggcccgcaattccttccgctacaacggactgattcaccgcaagactgtgggcgtggagccggcagccgacggcaaaggtgtcgtggtggtcattaagcggagatccggccagcggaagcctgccacctcctatgtgcggaccaccatcaacaagaatgctcgcgccacgctcagcagcatcagacacatgatccgcaagaacaagtaccgccccgacctgcgcatggcagccatccgcagggccagcgccatcctgcgcagccagaagcctgtgatggtgaagaggaagcggacccgccccaccaagagctcctgagccccctgcccccagagcaataaagtcagctggctttctcacctgcctcgactgggcctccctttttgaaacgctctggggagctctggccctgtgtgttgtcattcaggccatgtcatcaaaactctgcatgtcaccttgtccatctggaggtgatgtcaatggctggccatgcaggaggggtggggtagctgccttgtccctggtgagggcaagggtcactgtcttcacagaaaaagtttgctgacttgtgattgagacctactgtcccattgtgaggtggcctgaagaatcccagctggggcagtggcttccattcagaagaagaaaggccttttctagcccagaagggtgcaggctgagggctgggccctgggccctggtgctgtagcacggtttggggacttggggtgttcccaagacctgggggacgacagacatcacgggaggaagatgagatgacttttgcatccagggagtgggtgcagccacatttggaggggatgggctttacttgatgcaacctcatctctgagatgggcaacttggtgggtggtggcttataactgtaagggagatggcagccccagggtacagccagcaggcattgagcagccttagcattgtccccctactcccgtcctccaggtgtccccatccctcccctgtctctttgagctggctcttgtcacttaggtctcatctcagtggccgctcctgggccaccctgtcacccaagctttcctgattgcccagccctcttgtttcctttggcctgtttgctccctagtgtttattacagcttgtgaggccaggagtttgagaccatcctaggcaacataatgagacaccgtctctaaaataaaattagctgggtgtggtggtgcaccgcctgtggtcccagctcctcagaggttgagtagaggctgaggtgagcggagcacttgagccaagagtatgaggctgcagtgagcccatgagccccaccactacactccagcctggaagacaccatgacacacagtgaggcctggatggggaaagagtcctgctgttgatcctcacatgtttcctgggcacctaactctgtcagccactgccagggaccaaggatccagcatccatggcacccctggttcctgccatcctggggtacccgattcaaagagggactctgctccctgtctgagaccacccccggctctgactgagagtaaggggactgtcagggcctcgacttgccattggttggggtcgtacggggctgggagccctgcgttttgaggcagaccactgcccttccgacctcagtcctgtctgctccagtcttgcccagctcgaaggagagcagatctgaccacttgccagcccctgtctgctgtgaattaccatttcctttgtccttcccttagttgggtctattagctcagattgagaggtgttgccttaaaactgagttgggtgacttggtacctgctcaggaccccccgcactgtcccaatcccactcaggcccacctccagctggcctcactccgctggtgacttcgtacctgctcaggagcccccactgtcccagtcccactcaggcccatctctggctggcctcactgcgctgggactccgccttcataaggagagctcactgctcacgttagtagatggccccttctcgtgaggcctctcccctggcacctgcttcagttgtcctccacagcactgatttgcagcccacaagctggcaggtttatctgtctcatgtttgtcttgtgctggtgggcaaggggtttgtctagcacaccagcatataatgagatgcttgatgaatggtgcatattgaatgtataaagcccaccggtcctgagagtttgctcactggagactttctggagatggagtctcgctctgttgcccaggctggcgagtgcaatggcgcgatcttggctcactgcaacctccacctcctgggttcaagcgattctcctgcctcagcctcccgagtagctgggattacaggtgggtgtcaccacacccagctcagtattgtatttttagcagagatggggtttcaccattttgcccaggctggtttggaactcctgacttcaaattacccacctgcctcagcctcccaaagtgctggcattacaggcgctcgaggctttctgatgtggctgctgctgctcagaaggccttgtccttaaccacctccttgcctgccctggaggcttgtgcctctaggccccaccccctgtggagtcctgctggctttctccatccctatctgaatcctccctgctgtgtggcctcccctggtctcatccgtaacacagcccagcttagtgggcctctgttcctgcgggtggccagcctgtctgtgtggctgggctggggaggccacgtctggtatctgaatgctatcggtgggttggggtggaggaaccaggagagggctggagggagggagatggtctcagctccagactccccacagcagcagagactcgggactgaggcatcctctgttcacaggacatgctggcatctactgggtcagggctctgctgctcggtggctgtgcaaccttgggcaagttcctcaacctctctgtgtcttcgtaccctcatctgtaacatgcgtgtcgatagaccctactactcagggttgatgagaagattaaatgtgcaaaacctgcttgactgtgcccacaaatcctgattgtaggaataaattaatgactttttataaatattttgatcagatggactcagatgatcacagatgtcttcacatgcctatgactaatttgtacacaaactaatgctcgtgtttcccaagcacctggaagacatgccagatccatgtgcagtaatgcctggtggctccaggtctgccccgccgtcctgtggggctgtgagctttcccagcctcctgcccgtgtttgtgaatatcattctgtcctcagctgcatttccagcccaggctgtttggcgctgcccaggaatggtatcaattcccctgtttctcttgtagccagttactagaataaaatcatctactttaaaatctttca

SEQ ID NO: 438808 - DNA, 1606 bp, Homo sapiens
aggatccttaattaaattaatcttccccccccccccgctctttccgtctcaggtccccgctttccgtctcaggtcgccgctgcgaagggagccgccgccatgtctgcgcatctgcaatggatggtcgtgcggaactgctccagtttcctgatcaagaggaataagcagacctacagcactgagcccaataacttgaaggcccgcaattccttccgctacaacggactgattcaccgcaagactgtgggcgtggagccggcagccgacggcaaaggtgtcgtggtggtcattaagcggagatccggccagcggaagcctgccacctcctatgtgcggaccaccatcaacaagaatgctcgcgccacgctcagcagcatcagacacatgatccgcaagaacaagtaccgccccgacctgcgcatggcagccatccgcagggccagcgccatcctgcgcagccagaagcctgtgatggtgaagaggaagcggacccgccccaccaagagctcctgagccccctgcccccagagcaataaagtcagctggctttctcaccaaaaaaaaaaaaaaaaaaaaaaaaaaaaaagaaaaaaaaaagaaaaaaaaacgagaggaagaagtatcaccgcggggaggggcggctaaaagaggaggggcggcgggggagcgccaccgagggagagacgagagaaaacaaagaggaggggggaccccacacggacgaggggagcagcggcgcgggcgaacgggggggaaagaagagaaacagaggagccgagcaagagcacgaagaacggagacaggagtaaaagacgacgcgcaccgcgcggaggcagcgagacacgagagaggaggcgggcggaaggagagaagagaggggagagaaaacaccaacaacggagcgcgcgagagcgggggcagacagacgcagacggtggtgagaccagaaggacagcgagagagggagatgatttatgtgggataaaaaccaaacaaggagggcaagcaagagagaacgtgaaggaagcaaagatagatagaaaaaaagacggacggagaggcgataccacatctaaaatgagagaggcagaacaaagaccggaggtgggtaggtagtagcgacagactaatttttatagaggcaccacacgccccgggagcgagaaaaacaccaagacaagaaagagagagacgcagagggaggcgagggaagcacgagaacgaccgctgcccgggggaggcgcccacgcggcgagccctcacccgcgcaagagcgacagcacaacgaagaagagcaacacgctaccgcgacgaagacgaacaacaagggctccgagacaaggagcgggagacaggtcggtgaggggaagtacatactagaggcgcaggacgacacacctgagcaagcacaccgagcaccaagcagaacgtagctattatcctccaaccttcatgcagtagcgcagtgcggccaaggcaacaacgacgaggaacgcagccggcagccgccgtcccgtcacacaacagacggagtcgattcataaggagaggtatcgtggcttatgctcacacccacacaagtagcgtaggtgaggaacgtaaggtg

SEQ ID NO: 438809 - DNA, 822 bp, Homo sapiens
aggatccttaattaaattaatcttccccccccccccgctctttccgtctcaggtccccgctttccgtctcaggtcgccgctgcgaagggagccgccgccatgtctgcgcatctgcaatggatggtcgtgcggaactgctccagtttcctgatcaagaggaataagcagacctacagcactgagcccaataacttgaaggcccgcaattccttccgctacaacggactgattcaccgcaagactgtgggcgtggagccggcagccgacggcaaaggtgtcgtggtggtcattaagcggagatccggccagcggaagcctgccacctcctatgtgcggaccaccatcaacaagaatgctcgcgccacgctcagcagcatcagacacatgatccgcaagaacaagtaccgccccgacctgcgcatggcagccatccgcagggccagcgccatcctgcgcagccagaagcctgtgatggtgaagaggaagcggacccgccccaccaagagctcctgagccccctgcccccagagcaataaagtcagctggctttctcaccaaaaaaagaaaaaagaccggggcgcttcgagagatgcgcgttactcagaagtcgaccgagcgtgctcatccggaagctgccctcccagaggtgggcgagggagatcgcgcggatttccaaaaccgacctgaggttcagagcgcagccatcggtgcgctgcagaggctaacgaagcgacccgggggcctgcccaagatccacccgggtgcaccacgcagagagccccatggccaaaaccagggccccgacagggaaaccaagagggt

SEQ ID NO: 438810 - DNA, 656 bp, Homo sapiens
aggatccttaattaaattaatcttccccccccccccgctctttccgtctcaggtccccgctttccgtctcaggtcgccgctgcgaagggagccgccgccatgtctgcgcatctgcaatggatggtcgtgcggaactgctccagtttcctgatcaagaggaataagcagacctacagcactgagcccaataacttgaaggcccgcaattccttccgctacaacggactgattcaccgcaagactgtgggcgtggagccggcagccgacggcaaaggtgtcgtggtggtcattaagcggagatccggccagcggaagcctgccacctcctatgtgcggaccaccatcaacaagaatgctcgcgccacgctcagcagcatcagacacatgatccgcaagaacaagtaccgccccgacctgcgcatggcagccatccgcagggccagcgccatcctgcgcagccagaagcctgtgatggtgaagaggaagcggacccgccccaccaagagctcctgagccccctgcccccagagcaataaagtcagctggctttctcaccatggcgctggccctgcgatgctgccatgcgcaggtcgggcggataattgttcttgcggatcatgtgtctgatgctgctgagcgtggcgcgagcattcttg

SEQ ID NO: 438811 - DNA, 548 bp, Homo sapiens
  misc_feature (539)..(539): n is a, c, g, or t
  misc_feature (546)..(546): n is a, c, g, or t
aggatccttaattaaattaatcttccccccccccccgctctttccgtctcaggtccccgctttccgtctcaggtcgccgctgcgaagggagccgccgccatgtctgcgcatctgcaatggatggtcgtgcggaactgctccagtttcctgatcaagaggaataagcagacctacagcactgagcccaataacttgaaggcccgcaattccttccgctacaacggactgattcaccgcaagactgtgggcgtggagccggcagccgacggcaaaggtgtcgtggtggtcattaagcggagatccggccagcggaagcctgccacctcctatgtgcggaccaccatcaacaagaatgctcgcgccacgctcagcagcatcagacacatgatccgcaagaacaagtaccgccccgacctgcgcatggcagccatccgcagggccagcgccatcctgcgcagccagaagcctgtgatggtgaagaggaagcggacccgccccaccaagagctcctgagccccctgcccccagagcaataaagncagctgnct

SEQ ID NO: 438812 - DNA, 505 bp, Homo sapiens
aggatccttaattaaattaatcttccccccccccccgctctttccgtctcaggtccccgctttccgtctcaggtcgccgctgcgaagggagccgccgccatgtctgcgcatctgcaatggatggtcgtgcggaactgctccagtttcctgatcaagaggaataagcagacctacagcactgagcccaataacttgaaggcccgcaattccttccgctacaacggactgattcaccgcaagactgtgggcgtggagccggcagccgacggcaaaggtgtcgtggtggtcattaagcggagatccggccagcggaagcctgccacctcctatgtgcggaccaccatcaacaagaatgctcgcgccacgctcagcagcatcagacacatgatccgcaagaacaagtaccgccccgacctgcgcatggcagccatccgcagggccagcgccatcctgcgcagccagaagcctgtgatggtgaagaggaatttaaagcccgccagagttg

SEQ ID NO: 438813 - DNA, 623 bp, Homo sapiens
aggatccttaattaaattaatcttccccccccccccgctctttccgtctcaggtccccgctttccgtctcaggtcaggtcgccgctgcggagggagccgccgccatgtctgcgcatctgcaatggatggtcgtgcggaactgctccagtttcctgatcaagaggaataagcagacctacagcactgagcccaataacttgaaggcccgcaattccttccgctacaacggactgattcaccgcaagactgtgggcgtggagccggcagccgacggcaaaggtgtcgtggtggtcattaagcggagatccggccagcggaagcctgccacctcctatgtgcggaccaccatcaacaagaatgctcgcgccacgctcagcagcatcagacacatgatccgcaagaacaagtaccgccccgacctgcgcatggcagccatccgcagggccagcgccatcctgcgcagccagaagcctgtgatggtgaagaggaagcggacccgccccaccaagagctcctgagccccctgcccccagagcaataaagtcagctggctttctcacctaatagagaagaatcaacaaaatgggttccctaagaaaatccaaaggaagaaatcctcggaa

SEQ ID NO: 438814 - DNA, 1084 bp, Homo sapiens
aggatccttaattaaattaatcttccccccccccccgctctttccgtctcaggtccccgctttccgtctcaggtcaggtcgccgctgcggagggagccgcctgagcgttcgtcttcctcgcgtggtcgccatctccggcccgccgcgcactccctctcagtcctctgcctgccttctccccttgcgcctcaagggtcattggcggaccccaacccctccccgtgaagtcgttgtgaattttcaagttattttcccctcactctcattcgccgcagctagtctcggctgcctgaattcggtcccgccgccttaggtcactcagtcccgcctgacaagagttctaggtcgctgtctgccctcaggggtctcccattcacccaagttcccagtcgctctcttcctctgctgtccgagcgtggcccgtggcctaacgctgctttagttctctgtgtctgacgctttccctgtgcccgtttccccgcagccgccgccatgtctgcgcatctgcaatggatggtcgtgcggaactgctccagtttcctgatcaagaggaataagcagacctacagcactgagcccaataacttgaaggcccgcaattccttccgctacaacggactgattcaccgcaagactgtgggcgtggagccggcagccgacggcaaaggtgtcgtggtggtcattaagcggagatccggccagcggaagcctgccacctcctatgtgcggaccaccatcaacaagaatgctcgcgccacgctcagcagcatcagacacatgatccgcaagaacaagtaccgccccgacctgcgcatggcagccatccgcagggccagcgccatcctgcgcagccagaagcctgtgatggtgaagaggaagcggacccgccccaccaagagctcctgagccccctgcccccagagcaataaagtcagctggctttctcaccgtaaaaaaaaaaataaaaactcgagggggggcccggttcccaattgcacctattgggagtccgattccatttactggccgacgttttcctacggcgggatgggaaaaccctggtggtccccactttaatcccttg

SEQ ID NO: 438815 - DNA, 487 bp, Homo sapiens
aggatccttaattaaattaatcttccccccccccccgctctttccgtctcaggtccccgctttccgtctcaggtcgccgctgcgaagggagccgccgccatgtctgcgcatctgcaatggatggtcgtgcggaactgctccagtttcctgatcaagaggaataagcagacctacagcactgagcccaataacttgaaggcccgcaattccttccgctacaacggactgattcaccgcaagactgtgggcgtggagccggcagccgacggcaaaggtgtcgtggtggtcattaagcggagatccggccagcggaagcctgccacctcctatgtgcggaccaccatcaacaagaatgctcgcgccacgctcagcagcatcagacacatgatggcgctggccctgcgatgctgccatgcgcaggtcgggcggataattgttcttgcggatcatgtgtctgatgctgctgagcgtggcgcgagcattcttg

SEQ ID NO: 438816 - DNA, 5438 bp, Homo sapiens
aggatccttaattaaattaatcttccccccccccccgctctttccgtctcaggtccccgctttccgtctcaggtcgccgctgcgaagggagccgccgccatgtctgcgcatctgcaatggatggtcgtgcggaactgctccagtttcctgatcaagaggaataagcagacctacagcactgagcccaataacttgaaggcccgcaattccttccgctacaacggactgattcaccgcaagactgtgggcgtggagccggcagccgacggcaaaggtgtcgtggtggtcattaagcggagatccggcaggaagagcggtaactgccatcgcggcgggcatccctggcgccagggtgttggtctgggtaccggcttccctctcggccgacttgtcagctctgtgagccgcgcgcgtctgagcccgtgtcctcacctgtaaagtggagaaatgaaaaaggacctgaacttcctcggtggttgttgagagttaaggcacggggttgatgttttcagatgaaattctcaaagcaagtcagggtggggatggatggtttcatcccacaggtgggaagattgaggcacaacaggggaggggccctcgctaccacacttaggaggggacaggctgggttggttgcagccatttgattcccattttgcctgtgtaggttagagaagaggtcttggggaccccactccatacattgtgctgtcaggtgcaggcctttttggggattccctgaatgttcgtgtgagtcgggggtctctaatggaggagtccagcttcacatgtgttcttgacagggctgtattttctttttagagtgagtttttctcaggtccttgattggaactgcctcagagccaagggtccttttactcagtggcagcaacaaacgcagtctgttggctagtgatcctcctgtctcagggacacgtagtccagggagcagccaattgcttggcacttggggaccccgttctggggagtcctgaaagctttcacctcttggattgccgaatacatgggtggcccttcctagactaagggactggcctgagtgaggctgggcctctcagccaagctgatgttgaaccactgctgtggggatgggcctggggttcctgggaagctgttcatacccattgccaggagcgtgggctctggctggacctggatcagatcctaactgaagcggcagctttctggcatgagaaaggagtgttttcatggtggacagaattgggctatgagtgtggcagaagctgtgtcctcagtactccgtgatgacgagtgagcctctgtgaaatggacaggtgggaaaacagctacctgctggcctgcccaggcacccgccacgggcccacgctgctcagcttctcaatgtgagactgtccacacctgcgaggtgtgctaaaggtgcaggttaggtggactgaccccaggacctccctgacccccaaccaggccagcggaagcctgccacctcctatgtgcggaccaccatcaacaagaatgctcgcgccacgctcagcagcatcagacacatgatccgcaagaacaagtaccgccccgacctgcgcatggcagccatccgcagggccagcgccatcctgcgcagccagaagcctgtgatggtgaagaggaagcggacccgccccaccaagagctcctgagccccctgcccccagagcaataaagtcagctggctttctcacctgcctcgactgggcctccctttttgaaacgctctggggagctctggccctgtgtgttgtcattcaggccatgtcatcaaaactctgcatgtcaccttgtccatctggaggtgatgtcaatggctggccatgcaggaggggtggggtagctgccttgtccctggtgagggcaagggtcactgtcttcacagaaaaagtttgctgacttgtgattgagacctactgtcccattgtgaggtggcctgaagaatcccagctggggcagtggcttccattcagaagaagaaaggccttttctagcccagaagggtgcaggctgagggctgggccctgggccctggtgctgtagcacggtttggggacttggggtgttcccaagacctgggggacgacagacatcacgggaggaagatgagatgacttttgcatccagggagtgggtgcagccacatttggaggggatgggctttacttgatgcaacctcatctctgagatgggcaacttggtgggtggtggcttataactgtaagggagatggcagccccagggtacagccagcaggcattgagcagccttagcattgtccccctactcccgtcctccaggtgtccccatccctcccctgtctctttgagctggctcttgtcacttaggtctcatctcagtggccgctcctgggccaccctgtcacccaagctttcctgattgcccagccctcttgtttcctttggcctgtttgctccctagtgtttattacagcttgtgaggccaggagtttgagaccatcctaggcaacataatgagacaccgtctctaaaataaaattagctgggtgtggtggtgcaccgcctgtggtcccagctcctcagaggttgagtagaggctgaggtgagcggagcacttgagccaagagtatgaggctgcagtgagcccatgagccccaccactacactccagcctggaagacaccatgacacacagtgaggcctggatggggaaagagtcctgctgttgatcctcacatgtttcctgggcacctaactctgtcagccactgccagggaccaaggatccagcatccatggcacccctggttcctgccatcctggggtacccgattcaaagagggactctgctccctgtctgagaccacccccggctctgactgagagtaaggggactgtcagggcctcgacttgccattggttggggtcgtacggggctgggagccctgcgttttgaggcagaccactgcccttccgacctcagtcctgtctgctccagtcttgcccagctcgaaggagagcagatctgaccacttgccagcccctgtctgctgtgaattaccatttcctttgtccttcccttagttgggtctattagctcagattgagaggtgttgccttaaaactgagttgggtgacttggtacctgctcaggaccccccgcactgtcccaatcccactcaggcccacctccagctggcctcactccgctggtgacttcgtacctgctcaggagcccccactgtcccagtcccactcaggcccatctctggctggcctcactgcgctgggactccgccttcataaggagagctcactgctcacgttagtagatggccccttctcgtgaggcctctcccctggcacctgcttcagttgtcctccacagcactgatttgcagcccacaagctggcaggtttatctgtctcatgtttgtcttgtgctggtgggcaaggggtttgtctagcacaccagcatataatgagatgcttgatgaatggtgcatattgaatgtataaagcccaccggtcctgagagtttgctcactggagactttctggagatggagtctcgctctgttgcccaggctggcgagtgcaatggcgcgatcttggctcactgcaacctccacctcctgggttcaagcgattctcctgcctcagcctcccgagtagctgggattacaggtgggtgtcaccacacccagctcagtattgtatttttagcagagatggggtttcaccattttgcccaggctggtttggaactcctgacttcaaattacccacctgcctcagcctcccaaagtgctggcattacaggcgctcgaggctttctgatgtggctgctgctgctcagaaggccttgtccttaaccacctccttgcctgccctggaggcttgtgcctctaggccccaccccctgtggagtcctgctggctttctccatccctatctgaatcctccctgctgtgtggcctcccctggtctcatccgtaacacagcccagcttagtgggcctctgttcctgcgggtggccagcctgtctgtgtggctgggctggggaggccacgtctggtatctgaatgctatcggtgggttggggtggaggaaccaggagagggctggagggagggagatggtctcagccccacagagtttggagtcctcagtgtgctgagcaaacgtggagacaccatttccctcctctagacctcatcttggagagagagatgttggatggggccatctattccagctttattcacacaaatcatgtctgttggcctggaaattggaaaaccagttaaaccaaaaacatgatattaagaaaacaggcaggctcaccatagtaaaaatgctgaaagccaaagacaaaattgggagaacaaaagaaaagcgtcttgtcacatacagaaggtccctgataaagttagtagctgccctcatcagaaaccaggcccaggcagtggggacacatccagagtgctgaaagaacctcccccaggtcatcctatccccaagagtgatgcccggcagcattcccagctcagggctaatggttcacggaagccaggaatcaaactgcctgggttccagtcccagctctgccagttatgcccagctgtggggacttgggcagctcgtttagtagcaccgtgcctcagtttcccatatgtaaaaggccattttgagtgcctttcacagccctgcataaggcaggtgtctcagtgttcactgctgtctctccagctcttagtccagtagctgcatggtgagtgagcgtagggcgcaccctggaaggctgccaagcccaaagttgtgcagagcgctggggactccagactccccacagcagcagagactcgggactgaggcatcctctgttcacaggacatgctggcatctactgggtcagggctctgctgctcggtggctgtgcaaccttgggcaagttcctcaacctctctgtgtcttcgtaccctcatctgtaacatgcgtgtcgatagaccctactactcagggttgatgagaagattaaatgtgcaaaacctgcttgactgtgcccacaaatcctgattgtaggaataaattaatgactttttataaatattttgatcagatggactcagatgatcacagatgtcttcacatgcctatgactaatttgtacacaaactaatgctcgtgtttcccaagcacctggaagacatgccagatccatgtgcagtaatgcctggtggctccaggtctgccccgccgtcctgtggggctgtgagctttcccagcctcctgcccgtgtttgtgaatatcattctgtcctcagctgcatttccagcccaggctgtttggcgctgcccaggaatggtatcaattcccctgtttctcttgtagccagttactagaataaaatcatctactttaaaatctttca

SEQ ID NO: 438817 - DNA, 755 bp, Homo sapiens
aggatccttaattaaattaatcttccccccccccccgctctttccgtctcaggtccccgctttccgtctcaggtcaggtcgccgctgcggagggagccgccgccatgtctgcgcatctgcaatggatggtcgtgcggaactgctccagtttcctgatcaagaggaataagcagacctacagcactgagcccaataacttgaaggcccgcaattccttccgctacaacggactgattcaccgcaagactgtgggcgtggagccggcagccgacggcaaaggtgtcgtggtggtcattaagcggagatccggccagcggaagcctgccacctcctatgtgcggaccaccatcaacaagaatgctcgcgccacgctcagcagcatcagacacatgatccgcaagaacaagtaccgccccgacctgcgcatggtgagctggggtttggggatcaggcttggggagactggccagtgctgtggggaagggcctcccactactggttgcaatatgggctggagagggatggattcttgctttcagcctactccccacacccagcattggcctagggggcggcttgtggagtgtatgggctgagccttgctctgctcccccgcccccaggcagccatccgcagggccagcgccatcctgcgcagccagaagcctgtgatggtgaagaggaagcggacccgccccaccaagagctcctgagccccctgcccccagagcaataaagtcagctggctttctcacc

SEQ ID NO: 438818 - DNA, 546 bp, Homo sapiens
aggatccttaattaaattaatcttccccccccccccgctctttccgtctcaggtccccgctttccgtctcaggtcgccgctgcgaagggagccgccgccatgtctgcgcatctgcaatggatggtcgtgcggaactgctccagtttcctgatcaagaggaataagcagacctacagcactgagcccaataacttgaaggcccgcaattccttccgctacaacggactgattcaccgcaagactgtgggcgtgggccggcagccgacggcaaaggtgtcgtggtggtcattaagcggagatccggccagcggaagcctgccacctcctatgtgcggaccaccatcaacaagaatgctcgcgccacgctcagcagcatcagacacatgatccgcaagaacaagtaccgccccgacctgcgcatgaacacatccgcaggcacaccatcctgcgcagccagaagcctgtgatggtgaagaggaacgaacccaccccaccaagagataaagagaaccctgccaccagaaaaataaaatctgctacttcaaa

SEQ ID NO: 438819 - DNA, 922 bp, Homo sapiens
aggatccttaattaaattaatcttccccccccccccgctctttccgtctcaggtccccgctttccgtctcaggtcgccgctgcgaagggagccgccgccatgtctgcgcatctgcaatggatggtcgtgcggaactgctccagtttcctgatcaagaggaataagcagacctacagcactgagcccaataacttgaaggcccgcaattccttccgctacaacggactgattcaccgcaagactgtgggcgtggagccggcagccgacggcaaaggtgtcgtggtggtcattaagcggagatccggccagcggaagcctgccacctcctatgtgcggaccaccatcaacaagaatgctcgcgccacgctcagcagcatcagacacatgatccgcaagaacaagtaccgccccgacctgcgcatggcagccatccgcagggccagcgccatcctgcgcagccagaagcctgtgatggtgaagaggaagcggacccgccccaccaagagctcctgagccccctgcccccagagcaataaagtcagctggctttctcaccatagaataaaagatcatatggatcatttaacttagcataactctatgaccacagaacaatgtaaagcgcccgggctgcaaaagagggcggagaccagatgaggaagtataaatgccatccaggcactatggctggttcatagcaactgcagactgtttttctggaacgggagtggcaatgatccgccggggggccctcccattaaagagggcagtggagataataatttggacagcccggcggttactgtgttattttttgctcgtctaagcaactgccctacgttaaaacgggtcaagcaaggccagaacctacttagtgtagtcggggcagcgtggactcatggagacccaacccccatccccg

SEQ ID NO: 438820 - DNA, 794 bp, Homo sapiens
aggatccttaattaaattaatcttccccccccccccgctctttccgtctcaggtccccgctttccgtctcaggtcgccgctgcgaagggagccgccgccatgtctgcgcatctgcaatggatggtcgtgcggaactgctccagtttcctgatcaagaggaataagcagacctacagcactgagcccaataacttgaaggcccgcaattccttccgctacaacggactgattcaccgcaagactgtgggcgtggagccggcagccgacggcaaaggtgtcgtggtggtcattaagcggagatccggccagcggaagcctgccacctcctatgtgcggaccaccatcaacaagaatgctcgcgccacgctcagcagcatcagacacatgatccgcaagaacaagtaccgccccgacctgcgcatggcagccatccgcagggccagcgccatcctgcgcagccagaagcctgtgatggtgaagaggaagcggacccgccccaccaagagctcctgagccccctgcccccagagcaataaagtcagctggctttctcaccaaaaaaaaaaaaaaaaaaaaaaaaaaaaacaaaaaaaaaaaaaaaaaaaaaaaaaaaaaaaaaaaagacacggcggaggagcaacacatgtgggcggggcgcgagagaaagagaggtacaatgaaggggcacgagggggaacagagggacaccgcaccccacttcttgtcacacagggggacactacgggggccccccatagggggcagataatcagacaacacgtgtgccgcaatag

SEQ ID NO: 438821 - DNA, 556 bp, Homo sapiens
aggatccttaattaaattaatcttccccccccccccgctctttccgtctcaggtccccgctttccgtctcaggtcgccgctgcgaagggagccgccgccatgtctgcgcatctgcaatggatggtcgtgcggaactgctccagtttcctgatcaagaggaataagcagacctacagcactgagcccaataacttgaaggcccgcaattccttccgctacaacggactgattcaccgcaagactgtgggcgtggagccggcagccgacggcaaaggtgtcgtggtggtcattaagcggagatccggccagcggaagcctgccacctcctatgtgcggaccaccatcaacaagaatgctcgcgccacgctcagcagcatcagacacatgatccgcaagaacaagtaccgccccgacctgcgcatggcagccatccgcagggccagcgccatcctgcgcagccagaagcctgtgatggtgaagaggaagcggacccgccccaccaagagctcctgagccccctgcccccagagcaataaagtcagctggctttctcacc

SEQ ID NO: 438822 - DNA, 550 bp, Homo sapiens
  misc_feature (1)..(1): n is a, c, g, or t
nggctccacccggtggggccgttctagaactagtgattccccgggctgcagaattcggcacgaggggtcgccgctgcgaagggagccgccgccatgtctgcgcatctgcaatggatggtcgtgcggaactgctccagtttcctgatcaagaggaataagcagacctacagcactgagcccaataacttgaaggcccgcaattccttccgctacaacggactgattcaccgcaagactgtgggcgtggagccggcagccgacggcaaaggtgtcgtggtggtcattaagcggagatccggccagcggaagcctgccacctcctatgtgcggaccaccatcaacaagaatgctcgcgccacgctcagcagcatcagacacatgatccgcaagaacaagtaccgccccgacctgcgcatggcagccatccgcagggccagcgccatcctgcgcagccagaagcctgtgatggtgaagaggaagcggacccgccccaccaagagctcctgagccccctgcccccagagcaataaagtcagctggctttctcacc

SEQ ID NO: 438823 - DNA, 785 bp, Homo sapiens
aagacgccccaacagccccacccacaggttcacccaattacggctaggtacgaggcgggtggtggcgccgctgcgaagggagccgccgccatgtctgcgcatctgcaatggatggtcgtgcggaactgctccagtttcctgatcaagaggaataagcagacctacagcactgagcccaataacttgaaggcccgcaattccttccgctacaacggactgattcaccgcaagactgtgggcgtggagccggcagccgacggcaaaggtgtcgtggtggtcattaagcggagatccggccagcggaagcctgccacctcctatgtgcggaccaccatcaacaagaatgctcgcgccacgctcagcagcatcagacacatgatccgcaagaacaagtaccgccccgacctgcgcatggcagccatccgcagggccagcgccatcctgcgcagccagaagcctgtgatggtgaagaggaagcggacccgccccaccaagagctcctgagccccctgcccccagagcaataaagtcagctggctttctcaccaaaaaaaaaaaaaaaaaaaaaaaaaaaaacaaaaaaaaaaaaaaaaaaaaaaaaaaaaaaaaaaaagacacggcggaggagcaacacatgtgggcggggcgcgagagaaagagaggtacaatgaaggggcacgagggggaacagagggacaccgcaccccacttcttgtcacacagggggacactacgggggccccccatagggggcagataatcagacaacacgtgtgccgcaatag

SEQ ID NO: 438824 - DNA, 513 bp, Homo sapiens
cggacgcgtgggtcgcccacgcgtcgcaggtcgccgctgcgaagggagccgccgccatgtctgcgcatctgcaatggatggtcgtgcggaactgctccagtttcctgatcaagaggaataagcagacctacagcactgagcccaataacttgaaggcccgcaattccttccgctacaacggactgattcaccgcaagactgtgggcgtggagccggcagccgacggcaaaggtgtcgtggtggtcattaagcggagatccggccagcggaagcctgccacctcctatgtgcggaccaccatcaacaagaatgctcgcgccacgctcagcagcatcagacacatgatccgcaagaacaagtaccgccccgacctgcgcatggcagccatccgcagggccagcgccatcctgcgcagccagaagcctgtgatggtgaagaggaagcggacccgccccaccaagagctcctgagccccctgcccccagagcaataaagtcagctggctttctcacc

SEQ ID NO: 438825 - DNA, 1402 bp, Homo sapiens
gtggtaccggccgggagtacgggatgaagtttccgggactgtccccacgacagtccggtttgtagattccctgatctgcaattcttcccgttccttcatggatttgaaggctctcctttcttccttgaatgactttgcatccctctcgtttgctgagagttgggacaatgttggattactggtggaaccaagcccaccacatactgtaaatacactcttcctgaccaatgacctgactgaggaagtgatggaggaggtgctgcaaaagaaggcagacctcattctctcctaccatccgcctatcttccgacccatgaagcgcataacctggaacacatggaaggagcgcctggtgatccgggctctggagaacagagtcggtatctactctcctcatacagcctatgatgctgcgccccagggcgtcaacaactggttggctaaagggcttggagcttgtacctccaggcccatacatccttccaaagctcccaactaccctacagagggaaaccaccgagtagaattcaacgttaactacacccaagacctggacaaagtcatgtctgcagtgaaaggaattgacggtgtttctgtcacttctttttctgctaggactggtaatgaggaacaaacacggattaatctgaattgtactcagaaggctttgatgcaggtggtagattttctttcccggaacaaacaactttatcagaagacggaaattctgtcactggagaagcctttgcttctacatactggaatgggacggttatgcacactggatgaatctgtctccctggcaaccatgattgatcgaataaaaagacacctaaaactatctcatattcgcttagcccttggggtggggagaaccttagagtctcaagtcaaagtcgtggccctgtgtgctggttctgggagcagcgttctgcagggtgttgaggctgacctttacctcacaggtgagatgtcccatcatgatactttggatgctgcttcccaaggaataaatgtcatcctctgtgaacacagcaacactgaacgaggctttctttctgaccttcgagatatgctggattctcacttggagaataagataaatattatcctatcagagactgacagggaccctcttcaggtggtataattgcagaaacatcaggataacacattctacaaatcagctggatgccaacttaaatttgtaacatgagtcagtgggactggtgtgcttccagagagtgtcttcgagggtatcatcatttccggtttgttaatcttattcaccaaatgttctatcgctcgtaaggtaaaactgtaatataactaccatattaaataacaaatgttcattataaactctaggaaagattgaataaaatctgtttacttaacattc

SEQ ID NO: 438826 - DNA, 1685 bp, Homo sapiens
ttccggggactggtgagtagtgggcgatttaaaaacccgcgagtgtagttgtgaccttcgcggtaggtgccggttggggccggctgtgattgttatcttggtgctgcagaggacagcagaagaggagattgggtcagaaaactgccctgccgcaccagagcacagcgcactagtgggacaggggtcctgactcagacttaactggctgtgtctcgtggtttttcactgtcctggaaaaggcctgaagtggcactgaaatgaggcatagatgagaaacttgaactttacctgatttctgtatgttgtcatcttgcgtacgcccagtccccacgacagtccggtttgtagattccctgatctgcaattcttcccgttccttcatggatttgaaggctctcctttcttccttgaatgactttgcatccctctcgtttgctgagagttgggacaatgttggattactggtggaaccaagcccaccacatactgtaaatacactcttcctgaccaatgacctgactgaggaagtgatggaggaggtgctgcaaaagaaggcagacctcattctctcctaccatccgcctatcttccgacccatgaagcgcataacctggaacacatggaaggagcgcctggtgatccgggctctggagaacagagtcggtatctactctcctcatacagcctatgatgctgcgccccagggcgtcaacaactggttggctaaagggcttggagcttgtacctccaggcccatacatccttccaaagctcccaactaccctacagagggaaaccaccgagtagaattcaacgttaactacacccaagacctggacaaagtcatgtctgcagtgaaaggaattgacggtgtttctgtcacttctttttctgctaggactggtaatgaggaacaaacacggattaatctgaattgtactcagaaggctttgatgcaggtggtagattttctttcccggaacaaacaactttatcagaagacggaaattctgtcactggagaagcctttgcttctacatactggaatgggacggttatgcacactggatgaatctgtctccctggcaaccatgattgatcgaataaaaagacacctaaaactatctcatattcgcttagcccttggggtggggagaaccttagagtctcaagtcaaagtcgtggccctgtgtgctggttctgggagcagcgttctgcagggtgttgaggctgacctttacctcacaggtgagatgtcccatcatgatactttggatgctgcttcccaaggaataaatgtcatcctctgtgaacacagcaacactgaacgaggctttctttctgaccttcgagatatgctggattctcacttggagaataagataaatattatcctatcagagactgacagggaccctcttcaggtggtataattgcagaaacatcaggataacacattctacaaatcagctggatgccaacttaaatttgtaacatgagtcagtgggactggtgtgcttccagagagtgtcttcgagggtatcatcatttccggtttgttaatcttattcaccaaatgttctatcgctcgtaaggtaaaactgtaatataactaccatattaaataacaaatgttcattataaactctaggaaagattgaataaaatctgtttacttaacattc

SEQ ID NO: 438827 - DNA, 2349 bp, Homo sapiens
ctcccaggttcaagtgattctcctgcgtcagcctcccgagtagctgggactacaggtgcacaccaccatgcccagctaatttttgtatttttagtagagacggtttcaccacgttggccaggatagtctttatctcttgactttgtgatcctcacgaggcgccccgccacattattctgttttttggtaacgcacattgtaatgccagtatataccaccccaactccaaattctgttgcaatcaggggaggcgggcagtgtcattctatgcagtaagcatttagtgctggcttatattagtgatactgagatttattgaagttagttcctattacatagtagctttagcataatgggcacacacagaattatgagaatactgagggtagatgctggggagccttgggaaggatgctgaaaagggaggtcaagaaaagttttatttaagaagttggagggggcttgggaaaaggaaaggtaatatttagagaaatggattagggaggaggttggttgaagcaagggtagggagaataacaacaagggtgtgcaacggcaggagatgggatggacgtttgtgtattatgtaccaggcttgctaggttacataattcattagctcctctggatggcctgtgaagtgggttatagtatctctgtttcgtaggtgagaaaacaagattggagaggttaaatggcttacctaagttacagtgtgctggtaagtggcagagccactatttgaacccagatctctatgacgacagctcttttgcccatatgttttgatgcctcaaagatccaggcctaaagtatacctgtgtaccattttctttgttttgacatcagaaacttgaactttacctgatttctgtatgttgtcatcttgcgtacgcccagtccccacgacagtccggtttgtagattccctgatctgcaattcttcccgttccttcatggatttgaaggctctcctttcttccttgaatgactttgcatccctctcgtttgctgagagttgggacaatgttggattactggtggaaccaagcccaccacatactgtaaatacactcttcctgaccaatgacctgactgaggaagtgatggaggaggtgctgcaaaagaaggcagacctcattctctcctaccatccgcctatcttccgacccatgaagcgcataacctggaacacatggaaggagcgcctggtgatccgggctctggagaacagagtcggtatctactctcctcatacagcctatgatgctgcgccccagggcgtcaacaactggttggctaaagggcttggagcttgtacctccaggcccatacatccttccaaagctcccaactaccctacagagggaaaccaccgagtagaattcaacgttaactacacccaagacctggacaaagtcatgtctgcagtgaaaggaattgacggtgtttctgtcacttctttttctgctaggactggtaatgaggaacaaacacggattaatctgaattgtactcagaaggctttgatgcaggtggtagattttctttcccggaacaaacaactttatcagaagacggaaattctgtcactggagaagcctttgcttctacatactggaatgggacggttatgcacactggatgaatctgtctccctggcaaccatgattgatcgaataaaaagacacctaaaactatctcatattcgcttagcccttggggtggggagaaccttagagtctcaagtcaaagtcgtggccctgtgtgctggttctgggagcagcgttctgcagggtgttgaggctgacctttacctcacaggtgagatgtcccatcatgatactttggatgctgcttcccaaggaataaatgtcatcctctgtgaacacagcaacactgaacgaggctttctttctgaccttcgagatatgctggattctcacttggagaataagataaatattatcctatcagagactgacagggaccctcttcaggtggtataattgcagaaacatcaggataacacattctacaaatcagctggatgccaacttaaatttgtaacatgagtcagtgggactggtgtgcttccagagagtgtcttcgagggtatcatcatttccggtttgttaatcttattcaccaaatgttctatcgctcgtaaggtaaaactgtaatataactaccatattaaataacaaatgttcattataaactctaggaaagattgaataaaatctgtttacttaacattcaaaaaaaaaaacacaaaaatcaagtatgcggccgagttttcctttttttttttttttcgcactaccacttcacctagtctctatcccc

SEQ ID NO: 438828 - DNA, 2469 bp, Homo sapiens
ctcccaggttcaagtgattctcctgcgtcagcctcccgagtagctgggactacaggtgcacaccaccatgcccagctaatttttgtatttttagtagagacggtttcaccacgttggccaggatagtctttatctcttgactttgtgatcctcacgaggcgccccgccacattattctgttttttggtaacgcacattgtaatgccagtatataccaccccaactccaaattctgttgcaatcaggggaggcgggcagtgtcattctatgcagtaagcatttagtgctggcttatattagtgatactgagatttattgaagttagttcctattacatagtagctttagcataatgggcacacacagaattatgagaatactgagggtagatgctggggagccttgggaaggatgctgaaaagggaggtcaagaaaagttttatttaagaagttggagggggcttgggaaaaggaaaggtaatatttagagaaatggattagggaggaggttggttgaagcaagggtagggagaataacaacaagggtgtgcaacggcaggagatgggatggacgtttgtgtattatgtaccaggcttgctaggttacataattcattagctcctctggatggcctgtgaagtgggttatagtatctctgtttcgtaggtgagaaaacaagattggagaggttaaatggcttacctaagttacagtgtgctggtaagtggcagagccactatttgaacccagatctctatgacgacagctcttttgcccatatgttttgatgcctcaaagatccaggcctaaagtatacctgtgtaccattttctttgttttgacatcagaaacttgaactttacctgatttctgtatgttgtcatcttgcgtacgcccagtccccacgacagtccggtttgtagattccctgatctgcaattcttcccgttccttcatggatttgaaggctctcctttcttccttgaatgactttgcatccctctcgtttgctgagagttgggacaatgttggattactggtggaaccaagcccaccacatactgtaaatacactcttcctgaccaatgacctgactgaggaagtgatggaggaggtgctgcaaaagaaggcagacctcattctctcctaccatccgcctatcttccgacccatgaagcgcataacctggaacacatggaaggagcgcctggtgatccgggctctggagaacagagtcggtatctactctcctcatacagcctatgatgctgcgccccagggcgtcaacaactggttggctaaagggcttggagcttgtacctccaggcccatacatccttccaaagctcccaactaccctacagagggaaaccaccgagtagaattcaacgttaactacacccaagacctggacaaagtcatgtctgcagtgaaaggaattgacggtgtttctgtcacttctttttctgctaggactggtaatgaggaacaaacacggattaatctgaattgtactcagaaggctttgatgcaggtggtagattttctttcccggaacaaacaactttatcagaagacggaaattctgtcactggagaagcctttgcttctacatactggaatgggacggttatgcacactggatgaatctgtctccctggcaaccatgattgatcgaataaaaagacacctaaaactatctcatattcgcttagcccttggggtggggagaaccttagagtctcaagtcaaagtcgtggccctgtgtgctggttctgggagcagcgttctgcagggtgttgaggctgacctttacctcacaggtgagatgtcccatcatgatactttggatgctgcttcccaaggaataaatgtcatcctctgtgaacacagcaacactgaacgaggctttctttctgaccttcgagatatgctggattctcacttggagaataagataaatattatcctatcagagactgacagggaccctcttcaggtggtataattgcagaaacatcaggataacacattctacaaatcagctggatgccaacttaaatttgtaacatgagtcagtgggactggtgtgcttccagagagtgtcttcgagggtatcatcatttccggtttgttaatcttattcaccaaatgttctatcgctcgtaaggtaaaactgtaatataactaccatattaaataacaaatgttcattataaactctaggaaagattgaataaaatctgtttacttaacattcaaacaaacacaaccaaaaactcggagggacatcaaatgcccggggtgccggcaacacagagcgctactgaacgcgggcacaggggccataagcaggttccggacccaggttcctggtacaccaggggtcagaatcgggcgggtaccccaatgggagcggtatattcgagtagccgcgtacctggtagaacacggcaaaggaacaagaa

SEQ ID NO: 438829 - DNA, 2122 bp, Homo sapiens
ctcccaggttcaagtgattctcctgcgtcagcctcccgagtagctgggactacaggtgcacaccaccatgcccagctaatttttgtatttttagtagagacggtttcaccacgttggccaggatagtctttatctcttgactttgtgatcctcacgaggcgccccgccacattattctgttttttggtaacgcacattgtaatgccagtatataccaccccaactccaaattctgttgcaatcaggggaggcgggcagtgtcattctatgcagtaagcatttagtgctggcttatattagtgatactgagatttattgaagttagttcctattacatagtagctttagcataatgggcacacacagaattatgagaatactgagggtagatgctggggagccttgggaaggatgctgaaaagggaggtcaagaaaagttttatttaagaagttggagggggcttgggaaaaggaaaggtaatatttagagaaatggattagggaggaggttggttgaagcaagggtagggagaataacaacaagggtgtgcaacggcaggagatgggatggacgtttgtgtattatgtaccaggcttgctaggttacataattcattagctcctctggatggcctgtgaagtgggttatagtatctctgtttcgtaggtgagaaaacaagattggagaggttaaatggcttacctaagttacagtgtgctggtaagtggcagagccactatttgaacccagatctctatgacgacagctcttttgcccatatgttttgatgcctcaaagatccaggcctaaagtatacctgtgtaccattttctttgttttgacatcagaaacttgaactttacctgatttctgtatgttgtcatcttgcgtacgcccagtccccacgacagtccggtttgtagattccctgatctgcaattcttcccgttccttcatggatttgaaggctctcctttcttccttgaatgactttgcatccctctcgtttgctgagagttgggacaatgttggattactggtggaaccaagcccaccacatactgtaaatacactcttcctgaccaatgacctgactgaggaagtgatggaggaggtgctgcaaaagaaggcagacctcattctctcctaccatccgcctatcttccgacccatgaagcgcataacctggaacacatggaaggagcgcctggtgatccgggctctggagaacagagtcggtatctactctcctcatacagcctatgatgctgcgccccagggcgtcaacaactggttggctaaagggcttggagcttgtacctccaggcccatacatccttccaaagctcccaactaccctacagagggaaaccaccgagtagaattcaacgttaactacacccaagacctggacaaagtcatgtctgcagtgaaaggaattgacggtgtttctgtcacttctttttctgctaggactggtaatgaggaacaaacacggattaatctgaattgtactcagaaggctttgatgcaggtggtagattttctttcccggaacaaacaactttatcagaagacggaaattctgtcactggagaagagtctcaagtcaaagtcgtggccctgtgtgctggttctgggagcagcgttctgcagggtgttgaggctgacctttacctcacaggtgagatgtcccatcatgatactttggatgctgcttcccaaggaataaatgtcatcctctgtgaacacagcaacactgaacgaggctttctttctgaccttcgagatatgctggattctcacttggagaataagataaatattatcctatcagagactgacagggaccctcttcaggtggtataattgcagaaacatcaggataacacattctacaaatcagctggatgccaacttaaatttgtaacatgagtcagtgggactggtgtgcttccagagagtgtcttcgagggtatcatcatttccggtttgttaatcttattcaccaaatgttctatcgctcgtaaggtaaaactgtaatataactaccatattaaataacaaatgttcattataaactctaggaaagattgaataaaatctgtttacttaacattc

SEQ ID NO: 438830 - DNA, 1392 bp, Homo sapiens
ttttagctttattttagtaagtctttagtttactcattttgggctaaagcttttatgatgatatctggattaatgtggtcaaataaagtatgagcatttgcaacctgaatgatggtttacatggctagatttaccaagcagtagaccattctgtgtattatctgaaaatgtatgaatcagtctttcttgtccaagtttttcagagatttaagaatcttttggaaaataattctgaaaataatttgattttgtatgtccatgccaaagccctagattatggggactggtgatgtatatctaagggatgtgtgtatgttatgtaagcatgagaatgaatctttttaaaaagtcatttcttagaaattttgcctataatagtttacttttaaatcttaatctctcaccccccaaaactcccattttcccacaatattttctctaggagcttgtacctccaggcccatacatccttccaaagctcccaactaccctacagagggaaaccaccgagtagaattcaacgttaactacacccaagacctggacaaagtcatgtctgcagtgaaaggaattgacggtgtttctgtcacttctttttctgctaggactggtaatgaggaacaaacacggattaatctgaattgtactcagaaggctttgatgcaggtggtagattttctttcccggaacaaacaactttatcagaagacggaaattctgtcactggagaagcctttgcttctacatactggaatgggacggttatgcacactggatgaatctgtctccctggcaaccatgattgatcgaataaaaagacacctaaaactatctcatattcgcttagcccttggggtggggagaaccttagagtctcaagtcaaagtcgtggccctgtgtgctggttctgggagcagcgttctgcagggtgttgaggctgacctttacctcacaggtgagatgtcccatcatgatactttggatgctgcttcccaaggaataaatgtcatcctctgtgaacacagcaacactgaacgaggctttctttctgaccttcgagatatgctggattctcacttggagaataagataaatattatcctatcagagactgacagggaccctcttcaggtggtataattgcagaaacatcaggataacacattctacaaatcagctggatgccaacttaaatttgtaacatgagtcagtgggactggtgtgcttccagagagtgtcttcgagggtatcatcatttccggtttgttaatcttattcaccaaatgttctatcgctcgtaaggtaaaactgtaatataactaccatattaaataacaaatgttcattataaactctaggaaagattgaataaaatctgtttacttaacattc

SEQ ID NO: 438831 - DNA, 2162 bp, Homo sapiens
ctcccaggttcaagtgattctcctgcgtcagcctcccgagtagctgggactacaggtgcacaccaccatgcccagctaatttttgtatttttagtagagacggtttcaccacgttggccaggatagtctttatctcttgactttgtgatcctcacgaggcgccccgccacattattctgttttttggtaacgcacattgtaatgccagtatataccaccccaactccaaattctgttgcaatcaggggaggcgggcagtgtcattctatgcagtaagcatttagtgctggcttatattagtgatactgagatttattgaagttagttcctattacatagtagctttagcataatgggcacacacagaattatgagaatactgagggtagatgctggggagccttgggaaggatgctgaaaagggaggtcaagaaaagttttatttaagaagttggagggggcttgggaaaaggaaaggtaatatttagagaaatggattagggaggaggttggttgaagcaagggtagggagaataacaacaagggtgtgcaacggcaggagatgggatggacgtttgtgtattatgtaccaggcttgctaggttacataattcattagctcctctggatggcctgtgaagtgggttatagtatctctgtttcgtaggtgagaaaacaagattggagaggttaaatggcttacctaagttacagtgtgctggtaagtggcagagccactatttgaacccagatctctatgacgacagctcttttgcccatatgttttgatgcctcaaagatccaggcctaaagtatacctgtgtaccattttctttgttttgacatcagaaacttgaactttacctgatttctgtatgttgtcatcttgcgtacgcccagtccccacgacagtccggtttgtagattccctgatctgcaattcttcccgttccttcatggatttgaaggctctcctttcttccttgaatgactttgcatccctctcgtttgctgagagttgggacaatgttggattactggtggaaccaagcccaccacatactgtaaatacactcttcctgaccaatgacctgactgaggaagtgatggaggaggtgctgcaaaagaaggcagacctcattctctcctaccatccgcctatcttccgacccatgaagcgcataacctggaacacatggaaggagcgcctggtgatccgggctctggagaacagagtcggtatctactctcctcatacagcctatgatgctgcgccccagggcgtcaacaactggttggctaaagggcttggagcttgtacctccaggcccatacatccttccaaagctcccaactaccctacagagggaaaccaccgagtagaattcaacgttaactacacccaagacctggacaaagtcatgtctgcagtgaaaggaattgacggtgtttctgtcacttctttttctgctaggactggtaatgaggaacaaacacggattaatctgaattgtactcagaaggctttgatgcaggtggtagattttctttcccggaacaaacaactttatcagaagacggaaattctgtcactggagaagcctttgcttctacatactggaatgggacggttatgcacactggatgaatctgtctccctggcaaccatgattgatcgaatatatctcatattcgcttagcccttggggtggggagaaccttagagtctcaagtcaaagtcgtggccctgtgtgctggttctgggagcagcgtgagatgtcccatcatgatactttggatgctgcttcccaaggaataaatgtcatcctctgtgaacacagcattctgaccttcgagatatgctggattctcacttggagaataagataaatattatcctatcagagactgacagggaccctcttcaggtggtattctacaaatcagctggatgccaacttaaatttgtaacatgagtcagtgggactggtgtgcttccagagagtgtcttcgagggtatcatcatttccggtttgttaatcttattcaccaaatgttctatcgctcgtaaggtaaaactgtaatataactaccatattaaataacaaatgttcattataaactctaggaaagattgaataaaatctgtttacttaacattc

SEQ ID NO: 438832 - DNA, 478 bp, Homo sapiens
cggtaggtgccggttggggccggctgtgattgttatcttggtgctgcagaggacagcagaagaggagattgggtcagaaaactgccctgccgcaccagagcacagcgcactagtgggacaggggtcctgactcagacttaactggctgtgtctcgtggtttttcactgtcctggaaaaggcctgaagtggcactgaaatgaggcatagatgaggtaacgtcgagggagcggtttgcaggttgcaaaggggccctactgatgctgcttaatagtaaacagtgcttactctaggacgggagttgtttccagctttacgtgtaaatctcgcgatattgtggcctgggcactatttccattaaggaggaaactgcacaggataagtcatttacctgctgttgcacagctctggctctaggattcaggctggcttcagagtcggtgctcttaaccgccatactatgttgccttctgttgtcgt

SEQ ID NO: 438833 - DNA, 1634 bp, Homo sapiens
ttccggggactggtgagtagtgggcgatttaaaaacccgcgagtgtagttgtgaccttcgcggtaggtgccggttggggccggctgtgattgttatcttggtgctgcagaggacagcagaagaggagattgggtcagaaaactgccctgccgcaccagagcacagcgcactagtgggacaggggtcctgactcagacttaactggctgtgtctcgtggtttttcactgtcctggaaaaggcctgaagtggcactgaaatgaggcatagatgagtccccacgacagtccggtttgtagattccctgatctgcaattcttcccgttccttcatggatttgaaggctctcctttcttccttgaatgactttgcatccctctcgtttgctgagagttgggacaatgttggattactggtggaaccaagcccaccacatactgtaaatacactcttcctgaccaatgacctgactgaggaagtgatggaggaggtgctgcaaaagaaggcagacctcattctctcctaccatccgcctatcttccgacccatgaagcgcataacctggaacacatggaaggagcgcctggtgatccgggctctggagaacagagtcggtatctactctcctcatacagcctatgatgctgcgccccagggcgtcaacaactggttggctaaagggcttggagcttgtacctccaggcccatacatccttccaaagctcccaactaccctacagagggaaaccaccgagtagaattcaacgttaactacacccaagacctggacaaagtcatgtctgcagtgaaaggaattgacggtgtttctgtcacttctttttctgctaggactggtaatgaggaacaaacacggattaatctgaattgtactcagaaggctttgatgcaggtggtagattttctttcccggaacaaacaactttatcagaagacggaaattctgtcactggagaagcctttgcttctacatactggaatgggacggttatgcacactggatgaatctgtctccctggcaaccatgattgatcgaataaaaagacacctaaaactatctcatattcgcttagcccttggggtggggagaaccttagagtctcaagtcaaagtcgtggccctgtgtgctggttctgggagcagcgttctgcagggtgttgaggctgacctttacctcacaggtgagatgtcccatcatgatactttggatgctgcttcccaaggaataaatgtcatcctctgtgaacacagcaacactgaacgaggctttctttctgaccttcgagatatgctggattctcacttggagaataagataaatattatcctatcagagactgacagggaccctcttcaggtggtataattgcagaaacatcaggataacacattctacaaatcagctggatgccaacttaaatttgtaacatgagtcagtgggactggtgtgcttccagagagtgtcttcgagggtatcatcatttccggtttgttaatcttattcaccaaatgttctatcgctcgtaaggtaaaactgtaatataactaccatattaaataacaaatgttcattataaactctaggaaagattgaataaaatctgtttacttaacattc

SEQ ID NO: 438834 - DNA, 2261 bp, Homo sapiens
ctcccaggttcaagtgattctcctgcgtcagcctcccgagtagctgggactacaggtgcacaccaccatgcccagctaatttttgtatttttagtagagacggtttcaccacgttggccaggatagtctttatctcttgactttgtgatcctcacgaggcgccccgccacattattctgttttttggtaacgcacattgtaatgccagtatataccaccccaactccaaattctgttgcaatcaggggaggcgggcagtgtcattctatgcagtaagcatttagtgctggcttatattagtgatactgagatttattgaagttagttcctattacatagtagctttagcataatgggcacacacagaattatgagaatactgagggtagatgctggggagccttgggaaggatgctgaaaagggaggtcaagaaaagttttatttaagaagttggagggggcttgggaaaaggaaaggtaatatttagagaaatggattagggaggaggttggttgaagcaagggtagggagaataacaacaagggtgtgcaacggcaggagatgggatggacgtttgtgtattatgtaccaggcttgctaggttacataattcattagctcctctggatggcctgtgaagtgggttatagtatctctgtttcgtaggtgagaaaacaagattggagaggttaaatggcttacctaagttacagtgtgctggtaagtggcagagccactatttgaacccagatctctatgacgacagctcttttgcccatatgttttgatgcctcaaagatccaggcctaaagtatacctgtgtaccattttctttgttttgacatcagaaacttgaactttacctgatttctgtatgttgtcatcttgcgtacgcccagtccccacgacagtccggtttgtagattccctgatctgcaattcttcccgttccttcatggatttgaaggctctcctttcttccttgaatgactttgcatccctctcgtttgctgagagttgggacaatgttggattactggtggaaccaagcccaccacatactgtaaatacactcttcctgaccaatgacctgactgaggaagtgatggaggaggtgctgcaaaagaaggcagacctcattctctcctaccatccgcctatcttccgacccatgaagcgcataacctggaacacatggaaggagcgcctggtgatccgggctctggagaacagagtcggtatctactctcctcatacagcctatgatgctgcgccccagggcgtcaacaactggttggctaaagggcttggagcttgtacctccaggcccatacatccttccaaagctcccaactaccctacagagggaaaccaccgagtagaattcaacgttaactacacccaagacctggacaaagtcatgtctgcagtgaaaggaattgacggtgtttctgtcacttctttttctgctaggactggtaatgaggaacaaacacggattaatctgaattgtactcagaaggctttgatgcaggtggtagattttctttcccggaacaaacaactttatcagaagacggaaattctgtcactggagaagcctttgcttctacatactggaatgggacggttatgcacactggatgaatctgtctccctggcaaccatgattgatcgaataaaaagacacctaaaactatctcatattcgcttagcccttggggtggggagaaccttagagtctcaagtcaaagtcgtggccctgtgtgctggttctgggagcagcgttctgcagggtgttgaggctgacctttacctcacaggtgagatgtcccatcatgatactttggatgctgcttcccaaggaataaatgtcatcctctgtgaacacagcaacactgaacgaggctttctttctgaccttcgagatatgctggattctcacttggagaataagataaatattatcctatcagagactgacagggaccctcttcaggtggtataattgcagaaacatcaggataacacattctacaaatcagctggatgccaacttaaatttgtaacatgagtcagtgggactggtgtgcttccagagagtgtcttcgagggtatcatcatttccggtttgttaatcttattcaccaaatgttctatcgctcgtaaggtaaaactgtaatataactaccatattaaataacaaatgttcattataaactctaggaaagattgaataaaatctgtttacttaacattc

SEQ ID NO: 438835 - DNA, 1697 bp, Homo sapiens
ttccggggactggtgagtagtgggcgatttaaaaacccgcgagtgtagttgtgaccttcgcggtaggtgccggttggggccggctgtgattgttatcttggtgctgcagaggacagcagaagaggagattgggtcagaaaactgccctgccgcaccagagcacagcgcactagtgggacaggggtcctgactcagacttaactggctgtgtctcgtggtttttcactgtcctggaaaaggcctgaagtggcactgaaatgaggcatagatgagttggctatgctttcttattgtgcatactatgaaatgtttttcttcaaaaagtgtttataagtgtccccacgacagtccggtttgtagattccctgatctgcaattcttcccgttccttcatggatttgaaggctctcctttcttccttgaatgactttgcatccctctcgtttgctgagagttgggacaatgttggattactggtggaaccaagcccaccacatactgtaaatacactcttcctgaccaatgacctgactgaggaagtgatggaggaggtgctgcaaaagaaggcagacctcattctctcctaccatccgcctatcttccgacccatgaagcgcataacctggaacacatggaaggagcgcctggtgatccgggctctggagaacagagtcggtatctactctcctcatacagcctatgatgctgcgccccagggcgtcaacaactggttggctaaagggcttggagcttgtacctccaggcccatacatccttccaaagctcccaactaccctacagagggaaaccaccgagtagaattcaacgttaactacacccaagacctggacaaagtcatgtctgcagtgaaaggaattgacggtgtttctgtcacttctttttctgctaggactggtaatgaggaacaaacacggattaatctgaattgtactcagaaggctttgatgcaggtggtagattttctttcccggaacaaacaactttatcagaagacggaaattctgtcactggagaagcctttgcttctacatactggaatgggacggttatgcacactggatgaatctgtctccctggcaaccatgattgatcgaataaaaagacacctaaaactatctcatattcgcttagcccttggggtggggagaaccttagagtctcaagtcaaagtcgtggccctgtgtgctggttctgggagcagcgttctgcagggtgttgaggctgacctttacctcacaggtgagatgtcccatcatgatactttggatgctgcttcccaaggaataaatgtcatcctctgtgaacacagcaacactgaacgaggctttctttctgaccttcgagatatgctggattctcacttggagaataagataaatattatcctatcagagactgacagggaccctcttcaggtggtataattgcagaaacatcaggataacacattctacaaatcagctggatgccaacttaaatttgtaacatgagtcagtgggactggtgtgcttccagagagtgtcttcgagggtatcatcatttccggtttgttaatcttattcaccaaatgttctatcgctcgtaaggtaaaactgtaatataactaccatattaaataacaaatgttcattataaactctaggaaagattgaataaaatctgtttacttaacattc

SEQ ID NO: 438836 - DNA, 2301 bp, Homo sapiens
ctcccaggttcaagtgattctcctgcgtcagcctcccgagtagctgggactacaggtgcacaccaccatgcccagctaatttttgtatttttagtagagacggtttcaccacgttggccaggatagtctttatctcttgactttgtgatcctcacgaggcgccccgccacattattctgttttttggtaacgcacattgtaatgccagtatataccaccccaactccaaattctgttgcaatcaggggaggcgggcagtgtcattctatgcagtaagcatttagtgctggcttatattagtgatactgagatttattgaagttagttcctattacatagtagctttagcataatgggcacacacagaattatgagaatactgagggtagatgctggggagccttgggaaggatgctgaaaagggaggtcaagaaaagttttatttaagaagttggagggggcttgggaaaaggaaaggtaatatttagagaaatggattagggaggaggttggttgaagcaagggtagggagaataacaacaagggtgtgcaacggcaggagatgggatggacgtttgtgtattatgtaccaggcttgctaggttacataattcattagctcctctggatggcctgtgaagtgggttatagtatctctgtttcgtaggtgagaaaacaagattggagaggttaaatggcttacctaagttacagtgtgctggtaagtggcagagccactatttgaacccagatctctatgacgacagctcttttgcccatatgttttgatgcctcaaagatccaggcctaaagtatacctgtgtaccattttctttgttttgacatcagaaacttgaactttacctgatttctgtatgttgtcatcttgcgtacgcccagtccccacgacagtccggtttgtagattccctgatctgcaattcttcccgttccttcatggatttgaaggctctcctttcttccttgaatgactttgcatccctctcgtttgctgagagttgggacaatgttggattactggtggaaccaagcccaccacatactgtaaatacactcttcctgaccaatgacctgactgaggaagtgatggaggaggtgctgcaaaagaaggcagacctcattctctcctaccatccgcctatcttccgacccatgaagcgcataacctggaacacatggaaggagcgcctggtgatccgggctctggagaacagagtcggtatctactctcctcatacagcctatgatgctgcgccccagggcgtcaacaactggttggctaaagggcttggagcttgtacctccaggcccatacatccttccaaagctcccaactaccctacagagggaaaccaccgagtagaattcaacgttaactacacccaagacctggacaaagtcatgtctgcagtgaaaggaattgacggtgtttctgtcacttctttttctgctaggtacaatttatttttctcttttttttgtgtgtatttattggactggtaatgaggaacaaacacggattaatctgaattgtactcagaaggctttgatgcaggtggtagattttctttcccggaacaaacaactttatcagaagacggaaattctgtcactggagaagcctttgcttctacatactggaatgggacggttatgcacactggatgaatctgtctccctggcaaccatgattgatcgaataaaaagacacctaaaactatctcatattcgcttagcccttggggtggggagaaccttagagtctcaagtcaaagtcgtggccctgtgtgctggttctgggagcagcgttctgcagggtgttgaggctgacctttacctcacaggtgagatgtcccatcatgatactttggatgctgcttcccaaggaataaatgtcatcctctgtgaacacagcaacactgaacgaggctttctttctgaccttcgagatatgctggattctcacttggagaataagataaatattatcctatcagagactgacagggaccctcttcaggtggtataattgcagaaacatcaggataacacattctacaaatcagctggatgccaacttaaatttgtaacatgagtcagtgggactggtgtgcttccagagagtgtcttcgagggtatcatcatttccggtttgttaatcttattcaccaaatgttctatcgctcgtaaggtaaaactgtaatataactaccatattaaataacaaatgttcattataaactctaggaaagattgaataaaatctgtttacttaacattc

SEQ ID NO: 438837 - DNA, 2080 bp, Homo sapiens
ctcccaggttcaagtgattctcctgcgtcagcctcccgagtagctgggactacaggtgcacaccaccatgcccagctaatttttgtatttttagtagagacggtttcaccacgttggccaggatagtctttatctcttgactttgtgatcctcacgaggcgccccgccacattattctgttttttggtaacgcacattgtaatgccagtatataccaccccaactccaaattctgttgcaatcaggggaggcgggcagtgtcattctatgcagtaagcatttagtgctggcttatattagtgatactgagatttattgaagttagttcctattacatagtagctttagcataatgggcacacacagaattatgagaatactgagggtagatgctggggagccttgggaaggatgctgaaaagggaggtcaagaaaagttttatttaagaagttggagggggcttgggaaaaggaaaggtaatatttagagaaatggattagggaggaggttggttgaagcaagggtagggagaataacaacaagggtgtgcaacggcaggagatgggatggacgtttgtgtattatgtaccaggcttgctaggttacataattcattagctcctctggatggcctgtgaagtgggttatagtatctctgtttcgtaggtgagaaaacaagattggagaggttaaatggcttacctaagttacagtgtgctggtaagtggcagagccactatttgaacccagatctctatgacgacagctcttttgcccatatgttttgatgcctcaaagatccaggcctaaagtatacctgtgtaccattttctttgttttgacatcagaaacttgaactttacctgatttctgtatgttgtcatcttgcgtacgcccagtccccacgacagtccggtttgtagattccctgatctgcaattcttcccgttccttcatggatttgaaggctctcctttcttccttgaatgactttgcatccctctcgtttgctgagagttgggacaatgttggattactggtggaaccaagcccaccacatactgtaaatacactcttcctgaccaatgacctgactgaggaagtgatggaggaggtgctgcaaaagaaggcagacctcattctctcctaccatccgcctatcttccgacccatgaagcgcataacctggaacacatggaaggagcgcctggtgatccgggctctggagaacagagtcggtatctactctcctcatacagcctatgatgctgcgccccagggcgtcaacaactggttggctaaagggcttggagcttgtacctccaggcccatacatccttccaaagctcccaactaccctacagagggaaaccaccgagtagaattcaacgttaactacacccaagacctggacaaagtcatgtctgcagtgaaaggaattgacggtgtttctgtcacttctttttctgctaggactggtaatgaggaacaaacacggattaatctgaattgtactcagaaggctttgatgcaggtggtagattttctttcccggaacaaacaactttatcagaagacggaaattctgtcactggagaagcctttgcttctacatactggaatgggacggttatgcacactggatgaatctgtctccctggcaaccatgattgatcgaataaaaagacacctaaaactatctcatattcgcttagcccttggggtggggagaaccttagagtctcaagtcaaagtcgtggccctgtgtgctggttctgggagcagcgttctgcagggtgttgaggctgacctttacctcacagataattgcagaaacatcaggataacacattctacaaatcagctggatgccaacttaaatttgtaacatgagtcagtgggactggtgtgcttccagagagtgtcttcgagggtatcatcatttccggtttgttaatcttattcaccaaatgttctatcgctcgtaaggtaaaactgtaatataactaccatattaaataacaaatgttcattataaactctaggaaagattgaataaaatctgtttacttaacattc

SEQ ID NO: 438838 - DNA, 2490 bp, Homo sapiens
ctcccaggttcaagtgattctcctgcgtcagcctcccgagtagctgggactacaggtgcacaccaccatgcccagctaatttttgtatttttagtagagacggtttcaccacgttggccaggatagtctttatctcttgactttgtgatcctcacgaggcgccccgccacattattctgttttttggtaacgcacattgtaatgccagtatataccaccccaactccaaattctgttgcaatcaggggaggcgggcagtgtcattctatgcagtaagcatttagtgctggcttatattagtgatactgagatttattgaagttagttcctattacatagtagctttagcataatgggcacacacagaattatgagaatactgagggtagatgctggggagccttgggaaggatgctgaaaagggaggtcaagaaaagttttatttaagaagttggagggggcttgggaaaaggaaaggtaatatttagagaaatggattagggaggaggttggttgaagcaagggtagggagaataacaacaagggtgtgcaacggcaggagatgggatggacgtttgtgtattatgtaccaggcttgctaggttacataattcattagctcctctggatggcctgtgaagtgggttatagtatctctgtttcgtaggtgagaaaacaagattggagaggttaaatggcttacctaagttacagtgtgctggtaagtggcagagccactatttgaacccagatctctatgacgacagctcttttgcccatatgttttgatgcctcaaagatccaggcctaaagtatacctgtgtaccattttctttgttttgacatcagaaacttgaactttacctgatttctgtatgttgtcatcttgcgtacgcccagtccccacgacagtccggtttgtagattccctgatctgcaattcttcccgttccttcatggatttgaaggctctcctttcttccttgaatgactttgcatccctctcgtttgctgagagttgggacaatgttggattactggtggaaccaagcccaccacatactgtaaatacactcttcctgaccaatgacctgactgaggaagtgatggaggaggtgctgcaaaagaaggcagacctcattctctcctaccatccgcctatcttccgacccatgaagcgcataacctggaacacatggaaggagcgcctggtgatccgggctctggagaacagagtcggtatctactctcctcatacagcctatgatgctgcgccccagggcgtcaacaactggttggctaaagggcttggagcttgtacctccaggcccatacatccttccaaagctcccaactaccctacagagggaaaccaccgagtagaattcaacgttaactacacccaagacctggacaaagtcatgtctgcagtgaaaggaattgacggtgtttctgtcacttctttttctgctaggactggtaatgaggaacaaacacggattaatctgaattgtactcagaaggctttgatgcaggtggtagattttctttcccggaacaaacaactttatcagaagacggaaattctgtcactggagaaggaaggtaataagaatattttgtatttgatcttaaaatactgtgcacacattttctaacagtataattgaggtataattgatatacttaggtatattgaggtatgccttattgaggtataattgatatactaagaattgtacatatttgatgtgtacaatttgatgaatatcattactttgcatttttcttcagcaaattcatttgtaaattattagatcaacaggccattcactgttatctaaagtacaaaatggcaatgagagcataatattctctaggaagtaattgagaaagggagacattccaggaacaggaaaatattggtacgtcttcagggttacagatttggttacaggtttgctgtctccttattttacacgctctgcctggaccatgtcattcacttctttaacttgatagccatttgtatgatgatttctatctttactttttggcttagaatgctttcttaagggaaaaaatgacaagaacccatattttcatctactttctggatgttttgcacttacagagcccacaagtatttcaaattcagtatatccaaatactttatccgtttgccacccccgcttttttttttttccatatttcatatttcagtatcattatctactttagtttccaagttttcacattcctccttgactccaggccctgctgagtctggcctcatatctatacagtgtttctcctctgtattggctctgccaccacagtagttgaaactctcattttctgcgatgagagtagtctcaccgagcacctaggaggcagtccaggctctttagcatggtgttggaagcccttaatgatctgctacagcctgggcctccagcctcctctccttccacagcatgtactctgcac

SEQ ID NO: 438839 - DNA, 2190 bp, Homo sapiens
gatctggagtaggaggtgtgaccggagggcgaaattggggcttcctctgctctggtgacccagaaccgtcaactgaaatgaccctgtctgtgtagtactccggcaggatgggcctcggagcgtaaaggcggcaaaaacaaaaatattaaaaaaaaggagagagggacaaaaaaaagaaaacccgaaagtttcagctgcattgctgcggaacgttttttagccagaaggcgaaagaagaaatcggaagtgacgtcgcggccaaaacaagcccgggcttggaggcctgtactgaagctggcctcagatgggaaggcccgactcgctgtctgctgtcgtcggtggtcgcgagaccttgcactctcaccgggtcggcctccagcccctgtgcccgggatccgctcgccgcggatgagcgagagtttcttcctgggacttttcgggcacagctggccggtggcgacagaacggactttctttcctgcaagagtctcccctccagcgggagacagcgggctcctgtctcgggacgctgggacacctgtcgcctatttttaaatatccagattccaagaacacactggatactgctcttacaaaaccaagaggaaatcatgaagaaatgttttagttattgaaactacagttgaaatcatggatacatcaacaaatctggatattggagcccagcttatcgtggaagagtgtcccagcacttatagcctaactggcatgccagacattaaaatagaacatccactggacccaaattcagaagaagggtcagctcagggtgttgccatgggaatgaaattcatattgcctaaccgatttgatatgaatgtgtgttctcgatttgtgaagtccttaaatgaagaagatagtaaaaatattcaagatcaggttaactctgacctggaggtggcatctgtcctatttaaagctgaatgcaatatccatacatctccttctccgggaattcaagtaaggcatgtctacaccccctctacaacaaagcatttctcacccataaaacagtcaaccactttaaccaacaaacacagaggaaatgaggtctctaccacacctctgttagcaaattctttgtctgttcaccagttggctgctcagggagagatgctctatctggctactcgtatcgaacaagaaaatgttatcaatcacacggatgaagaaggatttactcctctgatgtgggctgcagcacacgggcaaatagctgtggtagagttcctacttcagaatggtgctgatccccaacttttaggaaaaggtcgagaaagtgcactgtcgttggcctgtagtaaaggctacacagatattgtcaaaatgctgcttgattgtggagttgatgtaaatgaatatgattggaatggaggaacacctctgctttatgctgtacatggaaatcatgtgaaatgtgtaaagatgctcttagaaagtggggctgatccaacaattgaaactgactctggatataattctatggatctagctgtagccctaggctatagaagtgttcaacaggttattgagtcacatttgttgaagctgcttcaaaatatcaaggagtagacacagtcatcagaaaatgtctgcccttttgtttacttcttggtccttataaatgatagttttgtttacttataaatttttacctcagttgcaatatttactggtttttagtaggttttaataaatatttctctgagtaattcactggtttataataaatgtaatactctttttataactatgttttactgtatatttaaaattataaattaatgttttcgtggcatgtaaatttttatggtacagatagttatcatcagtctttgtatcaagtgctgtaatttgacattttcagaaattattctaccctagtcatcttcactcgtgtattaagtcattcactttatatagggtttgctataaatccctagaaaaaaattgttcttattgttgaattaaaaagtgcacagtgtgattgtttacaaaatgatattataaataaataaaatacttcttctgtcaaaaaaaaaaatacttttttaagtatataagattattaaagatttctttcagatttttaatttcacccttctgtcctgccgtaacacttcattagatcaaacaatatatgtaattaaaataaactgaatctaagtc

SEQ ID NO: 438840 - DNA, 1309 bp, Homo sapiens
gatctggagtaggaggtgtgaccggagggcgaaattggggcttcctctgctctggtgacccagaaccgtcaactgaaatgaccctgtctgtgtagtactccggcaggatgggcctcggagcgtaaaggcggcaaaaacaaaaatattaaaaaaaaggagagagggacaaaaaaaagaaaacccgaaagtttcagctgcattgctgcggaacgttttttagccagaaggcgaaagaagaaatcggaagtgacgtcgcggccaaaacaagcccgggcttggaggcctgtactgaagctggcctcagatgggaaggcccgactcgctgtctgctgtcgtcggtggtcgcgagaccttgcactctcaccgggtcggcctccagcccctgtgcccgggatccgctcgccgcggatgagcgagagtttcttcctgggacttttcgggcacagctggccggtggcgacagaacggactttctttcctgcaagagtctcccctccagcgggagacagcgggctcctgtctcgggacgctgggacacctgtcgcctatttttaaatatccagattccaagaacacactggatactgctcttacaaaaccaagaggaaatcatgaagaaatgttttagttattgaaactacagttgaaatcatggatacatcaacaaatctggatattggagcccagcttatcgtggaagagtgtcccagcacttatagcctaactggcatgccagacattaaaatagaacatccactggacccaaattcagaagaagggtcagctcagggtgttgccatgggaatgaaattcatattgcctaaccgatttgatatgaatgtgtgttctcgatttgtgaagtccttaaatgaagaagatagtaaaaatattcaagatcaggttaactctgacctggaggtggcatctgtcctatttaaagctgaatgcaatatccatacatctccttctccgggaattcaagtaaggcatgtctacaccccctctacaacaaagcatttctcacccataaaacagtcaaccactttaaccaacaaacacagaggaaatgaggtctctaccacacctctgttagcaaattctttgtctgttcaccagttggctgctcagggagagatgctctatctggctactcgtatcgaacaaggtaatagcctatttaaaaatatttaaacaaattcaataggatttattagatttgttattgttttattttaatataagaaagtcctaaagacaaaaacaaatagttacataaactcaccaggcagataacccaatggatagtaaa

SEQ ID NO: 438841 - DNA, 1138 bp, Homo sapiens
aaggcaagactaatcatacatgcaacagtgagaaataatttaacgcccagacccctctacatcccacgggaacagaagtactgtcagctttgaaggagaaggcttcatggaggagctgtgacttgactccagagtgaaaggataattaggattgatacaggacggaggaaggaaggcatccaggcaatctcaataaaagcatccatgagtaaaagtttccattatttctttattaagcccagaacattaccaggcctagtgttgaactataattattgttgacaggaataacaatattcttgtttaaactaattgagaagtcttttatctctacttcccataccagggtgctgatccccaacttttaggaaaaggtcgagaaagtgcactgtcgttggcctgtagtaaaggctacacagatattgtcaaaatgctgcttgattgtggagttgatgtaaatgaatatgattggaatggaggaacacctctgctttatgctgtacatggaaatcatgtgaaatgtgtaaagatgctcttagaaagtggggctgatccaacaattgaaactgactctggatataattctatggatctagctgtagccctaggctatagaagtgttcaacaggttattgagtcacatttgttgaagctgcttcaaaatatcaaggagtagacacagtcatcagaaaatgtctgcccttttgtttacttcttggtccttataaatgatagttttgtttacttataaatttttacctcagttgcaatatttactggtttttagtaggttttaataaatatttctctgagtaattcactggtttataataaatgtaatactctttttataactatgttttactgtatatttaaaattataaattaatgttttcgtggcatgtaaatttttatggtacagatagttatcatcagtctttgtatcaagtgctgtaatttgacattttcagaaattattctaccctagtcatcttcactcgtgtattaagtcattcactttatatagggtttgctataaatccctagaaaaaaattgttcttattgttgaattaaaaagtgcacagtgtgattgtttacaaaatgatattataaataaataaaatacttcttctgtca

SEQ ID NO: 438842 - DNA, 920 bp, Homo sapiens
cctataaagtctagaaatgagtttgttactatacttttcaccaacccaaataattggttactggaggataagtgcatacctgtttataagatttatttcatattttgatagcaaactatttatagggcaaccttaggataaccttgtattctggactctccttgagtttcaaaaataaagaaacaaagacacaacgtccagtaacttggacagttactcagtgacagactaagtttcaagttttttaaagtattgcattgtattattgccctcaggctatgtatgtatcctgcttagaaataactttattttaggaaaatattggggataagttaaatttgatagttttaaaagaaattttatagtcactgtgctgtaatcttgattacctatctgttctagttcaacaggttattgagtcacatttgttgaagctgcttcaaaatatcaaggagtagacacagtcatcagaaaatgtctgcccttttgtttacttcttggtccttataaatgatagttttgtttacttataaatttttacctcagttgcaatatttactggtttttagtaggttttaataaatatttctctgagtaattcactggtttataataaatgtaatactctttttataactatgttttactgtatatttaaaattataaattaatgttttcgtggcatgtaaatttttatggtacagatagttatcatcagtctttgtatcaagtgctgtaatttgacattttcagaaattattctaccctagtcatcttcactcgtgtattaagtcattcactttatatagggtttgctataaatccctagaaaaaaattgttcttattgttgaattaaaaagtgcacagtgtgattgtttacaaaatgatattataaataaataaaatacttcttctgtca

SEQ ID NO: 438843 - DNA, 639 bp, Homo sapiens
ccagaaccgtcaactgaaatgaccctgtctgtgtagtactccggcaggatgggcctcggagcgtaaaggcggcaaaaacaaaaatattaaaaaaaaggagagagggacaaaaaaaagaaaacccgaaagtttcagctgcattgctgcggaacgttttttagccagaaggcgaaagaagaaatcggaagtgacgtcgcggccaaaacaagcccgggcttggaggcctgtactgaagctggcctcagatgggaaggcccgactcgctgtctgctgtcgtcggtggtcgcgagaccttgcactctcaccgggtcggcctccagcccctgtgcccgggatccgctcgccgcggatgagcgagagtttcttcctgggacttttcgggcacagctggccggtggcgacagaacggactttctttcctgcaagagtctcccctccagcgggagacagcgggctcctgtctcgggacgctgggacacctgtcgcctgtgaggcatcatttattttcatagcaccttcctctccttgtagaataattccaggatcaggaagaaacgaggggctcctgttattagcatccacaggaactagcatagctgcccactttatctccgtagactctctatcccttcatccctg

SEQ ID NO: 438844 - DNA, 2055 bp, Homo sapiens
gatctggagtaggaggtgtgaccggagggcgaaattggggcttcctctgctctggtgacccagaaccgtcaactgaaatgaccctgtctgtgtagtactccggcaggatgggcctcggagcgtaaaggcggcaaaaacaaaaatattaaaaaaaaggagagagggacaaaaaaaagaaaacccgaaagtttcagctgcattgctgcggaacgttttttagccagaaggcgaaagaagaaatcggaagtgacgtcgcggccaaaacaagcccgggcttggaggcctgtactgaagctggcctcagatgggaaggcccgactcgctgtctgctgtcgtcggtggtcgcgagaccttgcactctcaccgggtcggcctccagcccctgtgcccgggatccgctcgccgcggatgagcgagagtttcttcctgggacttttcgggcacagctggccggtggcgacagaacggactttctttcctgcaagagtctcccctccagcgggagacagcgggctcctgtctcgggacgctgggacacctgtcgcctatttttaaatatccagattccaagaacacactggatactgctcttacaaaaccaagaggaaatcatgaagaaatgttttagttattgaaactacagttgaaatcatggatacatcaacaaatctggatattggagcccagcttatcgtggaagagtgtcccagcacttatagcctaactggcatgccagacattaaaatagaacatccactggacccaaattcagaagaagggtcagctcagggtgttgccatgggaatgaaattcatattgcctaaccgatttgatatgaatgtgtgttctcgatttgtgaagtccttaaatgaagaagatagtaaaaatattcaagatcaggttaactctgacctggaggtggcatctgtcctatttaaagctgaatgcaatatccatacatctccttctccgggaattcaagtaaggcatgtctacaccccctctacaacaaagcatttctcacccataaaacagtcaaccactttaaccaacaaacacagaggaaatgaggtctctaccacacctctgttagcaaattctttgtctgttcaccagttggctgctcagggagagatgctctatctggctactcgtatcgaacaagaaaatgttatcaatcacacggatgaagaaggatttactcctctgatgtgggctgcagcacacgggcaaatagctgtggtagagttcctacttcagaatggtgctgatccccaacttttaggaaaaggtcgagaaagtgcactgtcgttggcctgtagtaaaggctacacagatattgtcaaaatgctgcttgattgtggagttgatgtaaatgaatatgattggaatggaggaacacctctgctttatgctgtacatggaaatcatgtgaaatgtgtaaagatgctcttagaaagtggggctgatccaacaattgaaactgactctggatataattctatggatctagctgtagccctaggctatagaagtgttcaacaggttattgagtcacatttgttgaagctgcttcaaaatatcaaggagtagacacagtcatcagaaaatgtctgcccttttgtttacttcttggtccttataaatgatagttttgtttacttataaatttttacctcagttgcaatatttactggtttttagtaggttttaataaatatttctctgagtaattcactggtttataataaatgtaatactctttttataactatgttttactgtatatttaaaattataaattaatgttttcgtggcatgtaaatttttatggtacagatagttatcatcagtctttgtatcaagtgctgtaatttgacattttcagaaattattctaccctagtcatcttcactcgtgtattaagtcattcactttatatagggtttgctataaatccctagaaaaaaattgttcttattgttgaattaaaaagtgcacagtgtgattgtttacaaaatgatattataaataaataaaatacttcttctgtca

SEQ ID NO: 438845 - DNA, 2293 bp, Homo sapiens
gatctggagtaggaggtgtgaccggagggcgaaattggggcttcctctgctctggtgacccagaaccgtcaactgaaatgaccctgtctgtgtagtactccggcaggatgggcctcggagcgtaaaggcggcaaaaacaaaaatattaaaaaaaaggagagagggacaaaaaaaagaaaacccgaaagtttcagctgcattgctgcggaacgttttttagccagaaggcgaaagaagaaatcggaagtgacgtcgcggccaaaacaagcccgggcttggaggcctgtactgaagctggcctcagatgggaaggcccgactcgctgtctgctgtcgtcggtggtcgcgagaccttgcactctcaccgggtcggcctccagcccctgtgcccgggatccgctcgccgcggatgagcgagagtttcttcctgggacttttcgggcacagctggccggtggcgacagaacggactttctttcctgcaagagtctcccctccagcgggagacagcgggctcctgtctcgggacgctgggacacctgtcgcctatttttaaatatccagattccaagaacacactggatactgctcttacaaaaccaagaggaaatcatgaagaaatgttttagttattgaaactacagttgaaatcatggatacatcaacaaatctggatattggagcccagcttatcgtggaagagtgtcccagcacttatagcctaactggcatgccagacattaaaatagaacatccactggacccaaattcagaagaagggtcagctcagggtgttgccatgggaatgaaattcatattgcctaaccgatttgatatgaatgtgtgttctcgatttgtgaagtccttaaatgaagaagatagtaaaaatattcaagatcatcttgaactcctgacctcaggtgatccacctgccttggcctcccaaagtgctggggttacaggcgtgagcaccatgcccagcctagactttttttttttttgactaaccattatgcaaacaaggaagtatggactttaatgataaaaacaatttagtatcacttgataaatagtttaattgaagctattacacctcatgtatttcttttcaaatgtagacattgacatagaactcttactgaaatgcttttaatgtgtttacatttgtttttcacttagctgaatgcaatatccatacatctccttctccgggaattcaagtaaggcatgtctacaccccctctacaacaaagcatttctcacccataaaacagtcaaccactttaaccaacaaacacagaggaaatgaggtctctaccacacctctgttagcaaattctttgtctgttcaccagttggctgctcagggagagatgctctatctggctactcgtatcgaacaagaaaatgttatcaatcacacggatgaagaaggatttactcctctgatgtgggctgcagcacacgggcaaatagctgtggtagagttcctacttcagaatggtgctgatccccaacttttaggaaaaggtcgagaaagtgcactgtcgttggcctgtagtaaaggctacacagatattgtcaaaatgctgcttgattgtggagttgatgtaaatgaatatgattggaatggaggaacacctctgctttatgctgtacatggaaatcatgtgaaatgtgtaaagatgctcttagaaagtggggctgatccaacaattgaaactgactctggatataattctatggatctagctgtagccctaggctatagaagtgttcaacaggttattgagtcacatttgttgaagctgcttcaaaatatcaaggagtagacacagtcatcagaaaatgtctgcccttttgtttacttcttggtccttataaatgatagttttgtttacttataaatttttacctcagttgcaatatttactggtttttagtaggttttaataaatatttctctgagtaattcactggtttataataaatgtaatactctttttataactatgttttactgtatatttaaaattataaattaatgttttcgtggcatgtaaatttttatggtacagatagttatcatcagtctttgtatcaagtgctgtaatttgacattttcagaaattattctaccctagtcatcttcactcgtgtattaagtcattcactttatatagggtttgctataaatccctagaaaaaaattgttcttattgttgaattaaaaagtgcacagtgtgattgtttacaaaatgatattataaataaataaaatacttcttctgtca

SEQ ID NO: 438846 - DNA, 1547 bp, Homo sapiens
gatctggagtaggaggtgtgaccggagggcgaaattggggcttcctctgctctggtgacccagaaccgtcaactgaaatgaccctgtctgtgtagtactccggcaggatgggcctcggagcgtaaaggcggcaaaaacaaaaatattaaaaaaaaggagagagggacaaaaaaaagaaaacccgaaagtttcagctgcattgctgcggaacgttttttagccagaaggcgaaagaagaaatcggaagtgacgtcgcggccaaaacaagcccgggcttggaggcctgtactgaagctggcctcagatgggaaggcccgactcgctgtctgctgtcgtcggtggtcgcgagaccttgcactctcaccgggtcggcctccagcccctgtgcccgggatccgctcgccgcggatgagcgagagtttcttcctgggacttttcgggcacagctggccggtggcgacagaacggactttctttcctgcaagagtctcccctccagcgggagacagcgggctcctgtctcgggacgctgggacacctgtcgcctatttttaaatatccagattccaagaacacactggatactgctcttacaaaaccaagaggaaatcatgaagaaatgttttagttattgaaactacagttgaaatcatggatacatcaacaaatctggatattggagcccagcttatcgtggaagagtgtcccagcacttatagcctaactggcatgccagacattaaaatagaacatccactggacccaaattcagaagaagggtcagctcagggtgttgccatgggaatgaaattcatattgcctaaccgatttgatatgaatgtgtgttctcgatttgtgaagtccttaaatgaagaagatagtaaaaatattcaagatcatcttgaactcctgacctcaggtgatccacctgccttggcctcccaaagtgctggggttacaggcgtgagcaccatgcccagcctagactttttttttttttgactaaccattatgcaaacaaggaagtatggactttaatgataaaaacaatttagtatcacttgataaatagtttaattgaagctattacacctcatgtatttcttttcaaatgtagacattgacatagaactcttactgaaatgcttttaatgtgtttacatttgtttttcacttagctgaatgcaatatccatacatctccttctccgggaattcaagtaaggcatgtctacaccccctctacaacaaagcatttctcacccataaaacagtcaaccactttaaccaacaaacacagaggaaatgaggtctctaccacacctctgttagcaaattctttgtctgttcaccagttggctgctcagggagagatgctctatctggctactcgtatcgaacaaggtaatagcctatttaaaaatatttaaacaaattcaataggatttattagatttgttattgttttattttaatataagaaagtcctaaagacaaaaacaaatagttacataaactcaccaggcagataacccaatggatagtaaa

SEQ ID NO: 438847 - DNA, 5257 bp, Homo sapiens
gaattccttttttttttgagctttaaataaagcatttattcatgagcggaagcttacagtttgcatagattcttcataccttatctggaagggcgatggaaaccccaaggcactagagagcatcagaagaaatcagtgacatgatttgagtagggctgggggactgggtccctgcaccccagccacatcctatgggccttaggcccatactcggagaacgagtccattggacaaagaacatggctgagagaccttctgggggccttgaagaggccgcctccttggtctcctcaaccccagtgtaagtctggggaggcccaaggtgagggtcatgtatcgggatgaatgtaagaagcacttggcaggcttgggggctttggggctgggcagcctgatcactgaactcacggcaaatgaagaattgaccgggactgacggtgccttggtaaatgatgaagggtgggttaggagtacagaagatgctgtggactattcagacatcaatgaggtggcagaagatgaaagccgaagataccagcagacgatggggagcttgcagcccctttgccactcagattatgatgaagatgactatgatgctgattgtgaagacattgattgcaagttgatgcctcctccacctccacccccgggaccaatgaagaaggataaggaccaggattctattactggtgagaaagtggacttcagtagttcctctgactcagaatctgagatgggacctcaggaagcaacacaggcagaatctgaagatggaaagctgacccttccattggctgggattatgcagcatgatgccaccaagctgttgccaagtgtcacagaactttttccagaatttcgacctggaaaggtgttacgttttctacgtctttttggaccagggaagaatgtcccatctgtttggcggagtgctcggagaaagaggaagaagaagcaccgtgagctgatacaggaagagcagatccaggaggtggagtgctcagtagaatcagaagtcagccagaagtctttgtggaactacgactacgctccaccaccacctccagagcagtgtctctctgatgatgaaatcacgatgatggctcctgtggagtccaaattttcccaatcaactggagatatagataaagtgacagataccaaaccaagagtggctgagtggcgttatgggcctgcccgactgtggtatgatatgctgggtgtccctgaagatggcagtgggtttgactatggcttcaaactgagaaagacagaacatgaacctgtgataaaatctagaatgatagaggaatttaggaaacttgaggaaaacaatggcactgatcttctggctgatgaaaacttcctgatggtgacacagctgcattgggaggatgatatcatctgggatggggaggatgtcaaacacaaagggacaaaacctcagcgtgcaagcctggcaggctggcttccttctagcatgactaggaatgcgatggcttacaatgttcagcaaggttttgcagccactcttgatgatgacaaaccttggtactccatttttcccattgacaatgaggatctggtatatggacgctgggaggacaatatcatttgggatgctcaggccatgccccggctgttggaacctcctgttttgacacttgatcccaatgatgagaacctcattttggaaattcctgatgagaaggaagaggccacctctaactccccctccaaggagagtaagaaggaatcatctctgaagaagagtcgaattctcttagggaaaacaggagtcatcaaggaggaaccacagcagaacatgtctcagccagaagtgaaagatccatggaatctctccaatgatgagtattattatcccaagcaacagggtcttcgaggcacctttggagggaatattatccagcattcaattcctgctgtggaattacggcagcccttctttcccacccacatggggcccatcaaactccggcagttccatcgcccacctctgaaaaagtactcatttggtgcactttctcagccaggtccccactcagtccaacctttgctaaagcacatcaaaaaaaaggccaagatgagagaacaagagaggcaagcttcaggtggtggagagatgttttttatgcgcacacctcaggacctcacaggcaaagatggtgatcttattcttgcagaatatagtgaggaaaatggacccttaatgatgcaggttggcatggcaaccaagataaagaactattataaacggaaacctggaaaagatcctggagcaccagattgtaaatatggggaaactgtttactgccatacatctcctttcctgggttctctccatcctggccaattgctgcaagcatttgagaacaacctttttcgtgctccaatttatcttcataagatgccagaaactgatttcttgatcattcggacaagacagggttactatattcgggaattagtggatatttttgtggttggccagcagtgtcccttgtttgaagttcctgggcctaactccaaaagggccaatacgcatattcgagactttctacaggtttttatttaccgccttttctggaaaagtaaagatcggccacggaggatacgaatggaagatataaaaaaagcctttccttcccattcagaaagcagcatccggaagaggctaaagctctgcgctgacttcaaacgcacagggatggactcaaactggtgggtgcttaagtctgattttcgtttaccaacggaagaagagatcagagctatggtgtcaccagagcagtgctgtgcttattatagcatgatagctgcagagcaacgactgaaggatgctggctatggtgagaaatccttttttgctccagaagaagaaaatgaggaagatttccagatgaagattgatgatgaagttcgcactgccccttggaacaccacaagggccttcattgctgccatgaagggcaagtgtctgctagaggtgactggggtggcagatcccacggggtgtggtgaaggattctcctatgtgaagattccaaacaaaccaacacagcagaaggatgataaagaaccgcagccagtgaagaagacagtgacaggaacagatgcagaccttcgtcgcctttccctgaaaaatgccaagcaacttctacgtaaatttggtgtgcctgaggaagagattaaaaagttgtcccgctgggaagtgattgatgtggtgcgcacaatgtcaacagaacaggctcgttctggagaggggcccatgagtaaatttgcccgtggatcaaggttttctgtggctgagcatcaagagcgttacaaagaggaatgtcagcgcatctttgacctacagaacaaggttctgtcatcaactgaagtcttatcaactgacacagacagcagctcagctgaagatagtgactttgaagaaatgggaaagaacattgagaacatgttgcagaacaagaaaaccagctctcagctttcacgtgaacgggaggaacaggagcggaaggaactacagcgaatgctactggcagcaggctcagcagcatccggaaacaatcacagagatgatgacacagcttccgtgactagccttaactcttctgccactggacgctgtctcaagatttatcgcacgtttcgagatgaagaggggaaagagtatgttcgctgtgagacagtccgaaaaccagctgtcattgatgcctatgtgcgcatacggactacaaaagatgaggaattcattcgaaaatttgccctttttgatgaacaacatcgggaagagatgcgaaaagaacggcggaggattcaagagcaactgaggcggcttaagaggaaccaggaaaaggagaagcttaagggtcctcctgagaagaagcccaagaaaatgaaggagcgtcctgacctaaaactgaaatgtggggcatgtggtgccattggacacatgaggactaacaaattctgccccctctattatcaaacaaatgcgccaccttccaaccctgttgccatgacagaagaacaggaggaggagttggaaaagacagtcattcataatgataatgaagaacttatcaaggttgaagggaccaaaattgtcttggggaaacagctaattgagagtgcggatgaggttcgcagaaaatctctggttctcaagtttcctaaacagcagcttcctccaaagaagaaacggcgagttggaaccactgttcactgtgactatttgaatagacctcataagtccatccaccggcgccgcacagaccctatggtgacgctgtcgtccatcttggagtctatcatcaatgacatgagagatcttccaaatacataccctttccacactccagtcaatgcaaaggttgtaaaggactactacaaaatcatcactcggccaatggacctacaaacactccgcgaaaacgtgcgtaaacgcctctacccatctcgggaagagttcagagagcatctggagctaattgtgaaaaatagtgcaacctacaatgggccaaaacactcattgactcagatctctcaatccatgctggatctctgtgatgaaaaactcaaagagaaagaagacaaattagctcgcttagagaaagctatcaaccccttgctggatgatgatgaccaagtggcgttttctttcattctggacaacattgtcacccagaaaatgatggcagttccagattcttggccatttcatcacccagttaataagaaatttgttccagattattacaaagtgattgtcaatccaatggatttagagaccatacgtaagaacatctccaagcacaagtatcagagtcgggagagctttctggatgatgtaaaccttattctggccaacagtgttaagtataatgacaatgagtgttcatctaaagcaaatgacatagtttgcctaatccagtactgtagttcacagatagaagaattaagattttaatgggacggtgatttgccagcagtccctactgaatttcttaattaagatttgtgcccaactgtcctggtctctaaactggtgtcatgtttcctccttattccatcatgtccctgatcatagcctgccaatctggatgtagaactctctgctgctctcctggaatgatgtctacctgcatgctgccatgcctcccaccatgacaataattgactgaagctctgaactgtaaggcagccccaattaaatgctttcctttatagg

SEQ ID NO: 438848 - DNA, 435 bp, Homo sapiens
aacttagcagctggggtttcttggccagtcatgccaactgtggctaggcctgttacagttttggtttgctgtccctgttgctgtcaataaatatcagggcctttggaattcagaatggtctcattctctatgtatatgtcttttccagggatggactcaaactggtgggtgcttaagtctgattttcgtttaccaacggaagaagagatcagagctatggtgtcaccagagcagtgctgtgcttattatagcatgatagctgcagagcaacgactgaaggatgctggctatggtgagaaatccttttttgctccagaagaagaaacgcaactacctgagaagaaacgcaactacctgagaagaaacgcaactactgagaagaaacgcaactacctgagaagaaacgcaactactgagaagaaacgcaactacctg

SEQ ID NO: 438849 - DNA, 8054 bp, Homo sapiens
aagggagctcagtaagtcacttctgggcgactgttgttttatttccggtctatgggacccggctgcgatttgctgctgcggacagcagctaccatcactgctgccgccatcatgtcagacacggacagcgacgaagattccgctggaggcggcccattttctttagcgggtttccttttcggcaacatcaatggagccgggcagctggagggggaaagcgtcttggatgatgaatgtaagaagcacttggcaggcttgggggctttggggctgggcagcctgatcactgaactcacggcaaatgaagaattgaccgggactgacggtgccttggtaaatgatgaagggtgggttaggagtacagaagatgctgtggactattcagacatcaatgaggtggcagaagatgaaagccgaagataccagcagacgatggggagcttgcagcccctttgccactcagattatgatgaagatgactatgatgctgattgtgaagacattgattgcaagttgatgcctcctccacctccacccccgggaccaatgaagaaggataaggaccaggattctattactggtgtgtctgaaaatggagaaggcatcatcttgccctccatcattgccccttcctctttggcctcagagaaagtggacttcagtagttcctctgactcagaatctgagatgggacctcaggaagcaacacaggcagaatctgaagatggaaagctgacccttccattggctgggattatgcagcatgatgccaccaagctgttgccaagtgtcacagaactttttccagaatttcgacctggaaaggtgttacgttttctacgtctttttggaccagggaagaatgtcccatctgtttggcggagtgctcggagaaagaggaagaagaagcaccgtgagctgatacaggaagagcagatccaggaggtggagtgctcagtagaatcagaagtcagccagaagtctttgtggaactacgactacgctccaccaccacctccagagcagtgtctctctgatgatgaagtaggcaaaatagagacctgagattaaggcctatgagaggaacaaatgaattcaatgagttctccctaatttatgtctaaattgtaaataataccatagcagatagaatctgtgctaattttcaatgagtaatcatgggttcaatctcagtggctgccccttccctattgtaaaagaaaaatgtttggtggggtaggcggggatgagaggggtagatggtgatatgctgctgaataagaaggtttgattgataggtggaatgtgctatgatacatctccattgtttacattctaactccaggtaaatcatcctcagtttctctaagttcccctcctgactgttaactctctatagccttaggacatctgggatcaggaaattctccctgctctacttctttcttctgttacagatcacgatgatggctcctgtggagtccaaattttcccaatcaactggagatatagataaagtgacagataccaaaccaagagtggctgagtggcgttatgggcctgcccgactgtggtatgatatgctgggtgtccctgaagatggcagtgggtttgactatggcttcaaactgagaaagacagaacatgaacctgtgataaaatctagaatgatagaggaatttaggaaacttgaggaaaacaatggcactgatcttctggctgatgaaaacttcctgatggtgacacagctgcattgggaggatgatatcatctgggatggggaggatgtcaaacacaaagggacaaaacctcagcgtgcaagcctggcaggctggcttccttctagcatgactaggaatgcgatggcttacaatgttcagcaaggttttgcagccactcttgatgatgacaaaccttggtactccatttttcccattgacaatgaggatctggtatatggacgctgggaggacaatatcatttgggatgctcaggccatgccccggctgttggaacctcctgttttgacacttgatcccaatgatgagaacctcattttggaaattcctgatgagaaggaagaggccacctctaactccccctccaaggagagtaagaaggaatcatctctgaagaagagtcgaattctcttagggaaaacaggagtcatcaaggaggaaccacagcagaacatgtctcagccagaagtgaaagatccatggaatctctccaatgatgagtattattatcccaagcaacagggtcttcgaggcacctttggagggaatattatccagcattcaattcctgctgtggaattacggcagcccttctttcccacccacatggggcccatcaaactccggcagttccatcgcccacctctgaaaaagtactcatttggtgcactttctcagccaggtccccactcagtccaacctttgctaaagcacatcaaaaaaaaggccaagatgagagaacaagagaggcaagcttcaggtggtggagagatgttttttatgcgcacacctcaggacctcacaggcaaagatggtgatcttattcttgcagaatatagtgaggaaaatggacccttaatgatgcaggttggcatggcaaccaagataaagaactattataaacggaaacctggaaaagatcctggagcaccagattgtaaatatggggaaactgtttactgccatacatctcctttcctgggttctctccatcctggccaattgctgcaagcatttgagaacaacctttttcgtgctccaatttatcttcataagatgccagaaactgatttcttgatcattcggacaagacagggttactatattcgggaattagtggatatttttgtggttggccagcagtgtcccttgtttgaagttcctgggcctaactccaaaagggccaatacgcatattcgagactttctacaggtttttatttaccgccttttctggaaaagtaaagatcggccacggaggatacgaatggaagatataaaaaaagcctttccttcccattcagaaagcagcatccggaagaggctaaagctctgcgctgacttcaaacgcacagggatggactcaaactggtgggtgcttaagtctgattttcgtttaccaacggaagaagagatcagagctatggtgtcaccagagcagtgctgtgcttattatagcatgatagctgcagagcaacgactgaaggatgctggctatggtgagaaatccttttttgctccagaagaagaaaatgaggaagatttccagatgaagattgatgatgaagttcgcactgccccttggaacaccacaagggccttcattgctgccatgaagggcaagtgtctgctagaggtgactggggtggcagatcccacggggtgtggtgaaggattctcctatgtgaagattccaaacaaaccaacacagcagaaggatgataaagaaccgcagccagtgaagaagacagtgacaggaacagatgcagaccttcgtcgcctttccctgaaaaatgccaagcaacttctacgtaaatttggtgtgcctgaggaagagattaaaaagttgtcccgctgggaagtgattgatgtggtgcgcacaatgtcaacagaacaggctcgttctggagaggggcccatgagtaaatttgcccgtggatcaaggttttctgtggctgagcatcaagagcgttacaaagaggaatgtcagcgcatctttgacctacagaacaaggttctgtcatcaactgaagtcttatcaactgacacagacagcagctcagctgaagatagtgactttgaagaaatgggaaagaacattgagaacatgttgcagaacaagaaaaccagctctcagctttcacgtgaacgggaggaacaggagcggaaggaactacagcgaatgctactggcagcaggctcagcagcatccggaaacaatcacagagatgatgacacagcttccgtgactagccttaactcttctgccactggacgctgtctcaagatttatcgcacgtttcgagatgaagaggggaaagagtatgttcgctgtgagacagtccgaaaaccagctgtcattgatgcctatgtgcgcatacggactacaaaagatgaggaattcattcgaaaatttgccctttttgatgaacaacatcgggaagagatgcgaaaagaacggcggaggattcaagagcaactgaggcggcttaagaggaaccaggaaaaggagaagcttaagggtcctcctgagaagaagcccaagaaaatgaaggagcgtcctgacctaaaactgaaatgtggggcatgtggtgccattggacacatgaggactaacaaattctgccccctctattatcaaacaaatgcgccaccttccaaccctgttgccatgacagaagaacaggaggaggagttggaaaagacagtcattcataatgataatgaagaacttatcaaggttgaagggaccaaaattgtcttggggaaacagctaattgagagtgcggatgaggttcgcagaaaatctctggttctcaagtttcctaaacagcagcttcctccaaagaagaaacggcgagttggaaccactgttcactgtgactatttgaatagacctcataagtccatccaccggcgccgcacagaccctatggtgacgctgtcgtccatcttggagtctatcatcaatgacatgagagatcttccaaatacataccctttccacactccagtcaatgcaaaggttgtaaaggactactacaaaatcatcactcggccaatggacctacaaacactccgcgaaaacgtgcgtaaacgcctctacccatctcgggaagagttcagagagcatctggagctaattgtgaaaaatagtgcaacctacaatgggccaaaacactcattgactcagatctctcaatccatgctggatctctgtgatgaaaaactcaaagagaaagaagacaaattagctcgcttagagaaagctatcaaccccttgctggatgatgatgaccaagtggcgttttctttcattctggacaacattgtcacccagaaaatgatggcagttccagattcttggccatttcatcacccagttaataagaaatttgttccagattattacaaagtgattgtcaatccaatggatttagagaccatacgtaagaacatctccaagcacaagtatcagagtcgggagagctttctggatgatgtaaaccttattctggccaacagtgttaagtataatggacctgagagtcagtatactaagactgcccaggagattgtgaacgtctgttaccagacattgactgagtatgatgaacatttgactcaacttgagaaggatatttgtactgctaaagaagcagctttggaggaagcagaattagaaagcctggacccaatgaccccagggccctacacgcctcagcctcctgatttgtatgataccaacacatccctcagtatgtctcgagatgcctctgtatttcaagatgagagcaatatgtctgtcttggatattcccagtgccactccagaaaagcaggtaacacaggaaggtgaagatggagatggtgatcttgcagatgaagaggaaggaactgtacaacagcctcaagccagtgtcctgtatgaggatttgcttatgtctgaaggagaagatgatgaggaagatgctgggagtgatgaagaaggagacaatcctttctctgctatccagctgagtgaaagtggaagtgactctgatgtgggatctggtggaataagacccaaacaaccccgcatgcttcaggagaacacaaggatggacatggaaaatgaagaaagcatgatgtcctatgagggagacggtggggaggcttcccatggtttggaggatagcaacatcagttatgggagctatgaggagcctgatcccaagtcgaacacccaagacacaagcttcagcagcatcggtgggtatgaggtatcagaggaggaagaagatgaggaggaggaagagcagcgctctgggccgagcgtactaagccaggtccacctgtcagaggacgaggaggacagtgaggatttccactccattgctggggacagtgacttggactctgatgaatgaggcttcctttgggcctccttggtcagctatctgatcctgaaatcatgaaattaactaacaccttagcctttttaaaagtagtaagtaaatgataataaatcacctctcctaatcttcctggggcaatgtcaccctttgatttaaaacaaagcaaccccctttcccctaccactacggaaaagagcaagctcatttttccgtgtcctcctttatttaactccatttattgcttttggtataatttttccctggggaaggaggggaaattatgaaagaactagtaactttatgtcctcttgatgtattaggaaatttccggccaggcgtggtggctcacacctgtaatctcagcactctgggaggccgaggcgggcagatcacctgaggtcagaagttcgagaccagcttggccaacatggcgaaaccgcatctctactaaaaatacaaaaattagccaggtgtggtggcgtatgcctgttaatcctagctactcgggaggctgaggcaggagaattacttgaacccgggaggcagaggttgcagtgagtggaggtcacgccactgcactccagcctgggcgaaagagtgagattcagtctcaaaaaaaaaaaaaatttccaagcatggtatcatctcacttttctaatttacaggctggagcagatgagagccctcctgctgggacagagaattgggttctagtggactctgtgctacacttaaacctgtgagacaaaccgcccattattttattatttaattatgcaatgcctagttcctaaatggattggaggcaaattaccgtaaattttgaaacagcctatatgtcagaaatgataatgttgccacctaaatgttttctgtcccccccaccctccccaggggaaatggtaggaaaatggtaagtttcttagggcaaagactgtgtcttctgtttcttttcatgcttaggatatggttctgtgcatagtaggtactcagtaaatgttcctagaatcataaaatcctcaacagatatgttactgagcatctgcttttcatgataagcactctatcagatccttgggatgcaaaggtaaataagacaaatcccttttacccaaagagctcaccatcaagttgggggagggaaagtggaattcaaaacatgttaataaatcatcatagtactgtgagataagtgcaattaagaagctagttataaagtataggggaaatagaggagtaatcatgtctgaaaagtcaggaaagtcttcctagaggtaatttttaagctgattgttttagaattagtagaagcttgccagatggaaaagtccaggcaaagtgtaacatgaatgggaaaggccacagtctagaaatggcagagtgtgttcctagtttgtttgtttgtttgtttgtacctgccttgttccaggaaggatttaatgtggtttatattccagtcctttaatgctggaagggctgagatgagactgaaagatgggcaggaagtatatcatcacaagctttgtgtttgatgttaatgtgtatgatttttatattatgggaaataagctcttagaggagtgatataatcaggtttgtgttttagaaatctgtgtaatgaatgaatgaagaaagaaattgaagaatcatgtaacatatgtgatcgcatttttgtaaaagaaccatgtgtgtttatatgtgtttatatatatacttgtgtatgcaaaggtaaaagtctgaaaggatatatgctaactgttcacaatgataaccccccaggaatgggattggaggggagggggcttctgtgtttgttatgtatgctgggtgggatattgtgcttttatttctatattgtttgaatttttttacagtatgtattatttttgtaataaaaattttaaaaaattccaaaagtag

SEQ ID NO: 438850 - DNA, 5779 bp, Homo sapiens
taataatttattcaacaaatgttgctctcacacgttgtgtgttgggctacactggggtctagggtagtagtatagtacttggtacattatgaagtgattttcatatgtaatcttcatagcagtcctgtgaggtataggcatttttaagtatctctgttttgtagatgaggaaaactaaacttagacatgttaaatagcttaaatagacatgttaaatcatagaggtaatggcagagctagcatcatctgaattcacatcctgtattttctcccctactgactctgaaagatagtggatgaaaaattgtttagtcacatttgataatctatattttaatttatttgtattactggatagaccctagatggccgtaattaagatggagagcaataagcttggtatttctttctcagcagttgactgaatttcctagggctactctgtatataatttttgtgtttttacttttgttaggcatttgagaacaacctttttcgtgctccaatttatcttcataagatgccagaaactgatttcttgatcattcggacaagacagggttactatattcgggaattagtggatatttttgtggttggccagcagtgtcccttgtttgaagttcctgggcctaactccaaaagggccaatacgcatattcgagactttctacaggtttttatttaccgccttttctggaaaagtaaagatcggccacggaggatacgaatggaagatataaaaaaagcctttccttcccattcagaaagcagcatccggaagaggctaaagctctgcgctgacttcaaacgcacagggatggactcaaactggtgggtgcttaagtctgattttcgtttaccaacggaagaagagatcagagctatggtgtcaccagagcagtgctgtgcttattatagcatgatagctgcagagcaacgactgaaggatgctggctatggtgagaaatccttttttgctccagaagaagaaaatgaggaagatttccagatgaagattgatgatgaagttcgcactgccccttggaacaccacaagggccttcattgctgccatgaagggcaagtgtctgctagaggtgactggggtggcagatcccacggggtgtggtgaaggattctcctatgtgaagattccaaacaaaccaacacagcagaaggatgataaagaaccgcagccagtgaagaagacagtgacaggaacagatgcagaccttcgtcgcctttccctgaaaaatgccaagcaacttctacgtaaatttggtgtgcctgaggaagagattaaaaagttgtcccgctgggaagtgattgatgtggtgcgcacaatgtcaacagaacaggctcgttctggagaggggcccatgagtaaatttgcccgtggatcaaggttttctgtggctgagcatcaagagcgttacaaagaggaatgtcagcgcatctttgacctacagaacaaggttctgtcatcaactgaagtcttatcaactgacacagacagcagctcagctgaagatagtgactttgaagaaatgggaaagaacattgagaacatgttgcagaacaagaaaaccagctctcagctttcacgtgaacgggaggaacaggagcggaaggaactacagcgaatgctactggcagcaggctcagcagcatccggaaacaatcacagagatgatgacacagcttccgtgactagccttaactcttctgccactggacgctgtctcaagatttatcgcacgtttcgagatgaagaggggaaagagtatgttcgctgtgagacagtccgaaaaccagctgtcattgatgcctatgtgcgcatacggactacaaaagatgaggaattcattcgaaaatttgccctttttgatgaacaacatcgggaagagatgcgaaaagaacggcggaggattcaagagcaactgaggcggcttaagaggaaccaggaaaaggagaagcttaagggtcctcctgagaagaagcccaagaaaatgaaggagcgtcctgacctaaaactgaaatgtggggcatgtggtgccattggacacatgaggactaacaaattctgccccctctattatcaaacaaatgcgccaccttccaaccctgttgccatgacagaagaacaggaggaggagttggaaaagacagtcattcataatgataatgaagaacttatcaaggttgaagggaccaaaattgtcttggggaaacagctaattgagagtgcggatgaggttcgcagaaaatctctggttctcaagtttcctaaacagcagcttcctccaaagaagaaacggcgagttggaaccactgttcactgtgactatttgaatagacctcataagtccatccaccggcgccgcacagaccctatggtgacgctgtcgtccatcttggagtctatcatcaatgacatgagagatcttccaaatacataccctttccacactccagtcaatgcaaaggttgtaaaggactactacaaaatcatcactcggccaatggacctacaaacactccgcgaaaacgtgcgtaaacgcctctacccatctcgggaagagttcagagagcatctggagctaattgtgaaaaatagtgcaacctacaatgggccaaaacactcattgactcagatctctcaatccatgctggatctctgtgatgaaaaactcaaagagaaagaagacaaattagctcgcttagagaaagctatcaaccccttgctggatgatgatgaccaagtggcgttttctttcattctggacaacattgtcacccagaaaatgatggcagttccagattcttggccatttcatcacccagttaataagaaatttgttccagattattacaaagtgattgtcaatccaatggatttagagaccatacgtaagaacatctccaagcacaagtatcagagtcgggagagctttctggatgatgtaaaccttattctggccaacagtgttaagtataatggacctgagagtcagtatactaagactgcccaggagattgtgaacgtctgttaccagacattgactgagtatgatgaacatttgactcaacttgagaaggatatttgtactgctaaagaagcagctttggaggaagcagaattagaaagcctggacccaatgaccccagggccctacacgcctcagcctcctgatttgtatgataccaacacatccctcagtatgtctcgagatgcctctgtatttcaagatgagagcaatatgtctgtcttggatattcccagtgccactccagaaaagcaggtaacacaggaaggtgaagatggagatggtgatcttgcagatgaagaggaaggaactgtacaacagcctcaagccagtgtcctgtatgaggatttgcttatgtctgaaggagaagatgatgaggaagatgctgggagtgatgaagaaggagacaatcctttctctgctatccagctgagtgaaagtggaagtgactctgatgtgggatctggtggaataagacccaaacaaccccgcatgcttcaggagaacacaaggatggacatggaaaatgaagaaagcatgatgtcctatgagggagacggtggggaggcttcccatggtttggaggatagcaacatcagttatgggagctatgaggagcctgatcccaagtcgaacacccaagacacaagcttcagcagcatcggtgggtatgaggtatcagaggaggaagaagatgaggaggaggaagagcagcgctctgggccgagcgtactaagccaggtccacctgtcagaggacgaggaggacagtgaggatttccactccattgctggggacagtgacttggactctgatgaatgaggcttcctttgggcctccttggtcagctatctgatcctgaaatcatgaaattaactaacaccttagcctttttaaaagtagtaagtaaatgataataaatcacctctcctaatcttcctggggcaatgtcaccctttgatttaaaacaaagcaaccccctttcccctaccactacggaaaagagcaagctcatttttccgtgtcctcctttatttaactccatttattgcttttggtataatttttccctggggaaggaggggaaattatgaaagaactagtaactttatgtcctcttgatgtattaggaaatttccggccaggcgtggtggctcacacctgtaatctcagcactctgggaggccgaggcgggcagatcacctgaggtcagaagttcgagaccagcttggccaacatggcgaaaccgcatctctactaaaaatacaaaaattagccaggtgtggtggcgtatgcctgttaatcctagctactcgggaggctgaggcaggagaattacttgaacccgggaggcagaggttgcagtgagtggaggtcacgccactgcactccagcctgggcgaaagagtgagattcagtctcaaaaaaaaaaaaaatttccaagcatggtatcatctcacttttctaatttacaggctggagcagatgagagccctcctgctgggacagagaattgggttctagtggactctgtgctacacttaaacctgtgagacaaaccgcccattattttattatttaattatgcaatgcctagttcctaaatggattggaggcaaattaccgtaaattttgaaacagcctatatgtcagaaatgataatgttgccacctaaatgttttctgtcccccccaccctccccaggggaaatggtaggaaaatggtaagtttcttagggcaaagactgtgtcttctgtttcttttcatgcttaggatatggttctgtgcatagtaggtactcagtaaatgttcctagaatcataaaatcctcaacagatatgttactgagcatctgcttttcatgataagcactctatcagatccttgggatgcaaaggtaaataagacaaatcccttttacccaaagagctcaccatcaagttgggggagggaaagtggaattcaaaacatgttaataaatcatcatagtactgtgagataagtgcaattaagaagctagttataaagtataggggaaatagaggagtaatcatgtctgaaaagtcaggaaagtcttcctagaggtaatttttaagctgattgttttagaattagtagaagcttgccagatggaaaagtccaggcaaagtgtaacatgaatgggaaaggccacagtctagaaatggcagagtgtgttcctagtttgtttgtttgtttgtttgtacctgccttgttccaggaaggatttaatgtggtttatattccagtcctttaatgctggaagggctgagatgagactgaaagatgggcaggaagtatatcatcacaagctttgtgtttgatgttaatgtgtatgatttttatattatgggaaataagctcttagaggagtgatataatcaggtttgtgttttagaaatctgtgtaatgaatgaatgaagaaagaaattgaagaatcatgtaacatatgtgatcgcatttttgtaaaagaaccatgtgtgtttatatgtgtttatatatatacttgtgtatgcaaaggtaaaagtctgaaaggatatatgctaactgttcacaatgataaccccccaggaatgggattggaggggagggggcttctgtgtttgttatgtatgctgggtgggatattgtgcttttatttctatattgtttgaatttttttacagtatgtattatttttgtaataaaaattttaaaaaattccaaaagtag

SEQ ID NO: 438851 - DNA, 1917 bp, Homo sapiens
agaagggggcacggcgggggtttaaaaccccccctttccctccagcctttctgtcgatgatctccacagcccacccatcccctgagcacactaaccacctcatgcaggccccacctgccaatagtaataacgcaatgtcaccctttgatttaaaacaaagcaaccccctttcccctaccactacggaaaagagcaagctcatttttccgtgtcctcctttatttaactccatttattgcttttggtataatttttccctggggaaggaggggaaattatgaaagaactagtaactttatgtcctcttgatgtattaggaaatttccggccaggcgtggtggctcacacctgtaatctcagcactctgggaggccgaggcgggcagatcacctgaggtcagaagttcgagaccagcttggccaacatggcgaaaccgcatctctactaaaaatacaaaaattagccaggtgtggtggcgtatgcctgttaatcctagctactcgggaggctgaggcaggagaattacttgaacccgggaggcagaggttgcagtgagtggaggtcacgccactgcactccagcctgggcgaaagagtgagattcagtctcaaaaaaaaaaaaaatttccaagcatggtatcatctcacttttctaatttacaggctggagcagatgagagccctcctgctgggacagagaattgggttctagtggactctgtgctacacttaaacctgtgagacaaaccgcccattattttattatttaattatgcaatgcctagttcctaaatggattggaggcaaattaccgtaaattttgaaacagcctatatgtcagaaatgataatgttgccacctaaatgttttctgtcccccccaccctccccaggggaaatggtaggaaaatggtaagtttcttagggcaaagactgtgtcttctgtttcttttcatgcttaggatatggttctgtgcatagtaggtactcagtaaatgttcctagaatcataaaatcctcaacagatatgttactgagcatctgcttttcatgataagcactctatcagatccttgggatgcaaaggtaaataagacaaatcccttttacccaaagagctcaccatcaagttgggggagggaaagtggaattcaaaacatgttaataaatcatcatagtactgtgagataagtgcaattaagaagctagttataaagtataggggaaatagaggagtaatcatgtctgaaaagtcaggaaagtcttcctagaggtaatttttaagctgattgttttagaattagtagaagcttgccagatggaaaagtccaggcaaagtgtaacatgaatgggaaaggccacagtctagaaatggcagagtgtgttcctagtttgtttgtttgtttgtttgtacctgccttgttccaggaaggatttaatgtggtttatattccagtcctttaatgctggaagggctgagatgagactgaaagatgggcaggaagtatatcatcacaagctttgtgtttgatgttaatgtgtatgatttttatattatgggaaataagctcttagaggagtgatataatcaggtttgtgttttagaaatctgtgtaatgaatgaatgaagaaagaaattgaagaatcatgtaacatatgtgatcgcatttttgtaaaagaaccatgtgtgtttatatgtgtttatatatatacttgtgtatgcaaaggtaaaagtctgaaaggatatatgctaactgttcacaatgataaccccccaggaatgggattggaggggagggggcttctgtgtttgttatgtatgctgggtgggatattgtgcttttatttctatattgtttgaatttttttacagtatgtattatttttgtaataaaaattttaaaaaattccaaaagtag

SEQ ID NO: 438852 - DNA, 6087 bp, Homo sapiens
aagggagctcagtaagtcacttctgggcgactgttgttttatttccggtctatgggacccggctgcgatttgctgctgcggacagcagctaccatcactgctgccgccatcatgtcagacacggacagcgacgaagattccgctggaggcggcccattttctttagcgggtttccttttcggcaacatcaatggagccgggcagctggagggggaaagcgtcttggatgatgaatgtaagaagcacttggcaggcttgggggctttggggctgggcagcctgatcactgaactcacggcaaatgaagaattgaccgggactgacggtgccttggtaaatgatgaagggtgggttaggagtacagaagatgctgtggactattcagacatcaatgaggtggcagaagatgaaagccgaagataccagcagacgatggggagcttgcagcccctttgccactcagattatgatgaagatgactatgatgctgattgtgaagacattgattgcaagttgatgcctcctccacctccacccccgggaccaatgaagaaggataaggaccaggattctattactggtgtgtctgaaaatggagaaggcatcatcttgccctccatcattgccccttcctctttggcctcagagaaagtggacttcagtagttcctctgactcagaatctgagatgggacctcaggaagcaacacaggcagaatctgaagatggaaagctgacccttccattggctgggattatgcagcatgatgccaccaagctgttgccaagtgtcacagaactttttccagaatttcgacctggaaaggtgttacgttttctacgtctttttggaccagggaagaatgtcccatctgtttggcggagtgctcggagaaagaggaagaagaagcaccgtgagctgatacaggaagagcagatccaggaggtggagtgctcagtagaatcagaagtcagccagaagtctttgtggaactacgactacgctccaccaccacctccagagcagtgtctctctgatgatgaagtaggcaaaatagagacctgagattaaggcctatgagaggaacaaatgaattcaatgagttctccctaatttatgtctaaattgtaaataataccatagcagatagaatctgtgctaattttcaatgagtaatcatgggttcaatctcagtggctgccccttccctattgtaaaagaaaaatgtttggtggggtaggcggggatgagaggggtagatggtgatatgctgctgaataagaaggtttgattgataggtggaatgtgctatgatacatctccattgtttacattctaactccaggtaaatcatcctcagtttctctaagttcccctcctgactgttaactctctatagccttaggacatctgggatcaggaaattctccctgctctacttctttcttctgttacagatcacgatgatggctcctgtggagtccaaattttcccaatcaactggagatatagataaagtgacagataccaaaccaagagtggctgagtggcgttatgggcctgcccgactgtggtatgatatgctgggtgtccctgaagatggcagtgggtttgactatggcttcaaactgagaaagacagaacatgaacctgtgataaaatctagaatgatagaggaatttaggaaacttgaggaaaacaatggcactgatcttctggctgatgaaaacttcctgatggtgacacagctgcattgggaggatgatatcatctgggatggggaggatgtcaaacacaaagggacaaaacctcagcgtgcaagcctggcaggctggcttccttctagcatgactaggaatgcgatggcttacaatgttcagcaaggttttgcagccactcttgatgatgacaaaccttggtactccatttttcccattgacaatgaggatctggtatatggacgctgggaggacaatatcatttgggatgctcaggccatgccccggctgttggaacctcctgttttgacacttgatcccaatgatgagaacctcattttggaaattcctgatgagaaggaagaggccacctctaactccccctccaaggagagtaagaaggaatcatctctgaagaagagtcgaattctcttagggaaaacaggagtcatcaaggaggaaccacagcagaacatgtctcagccagaagtgaaagatccatggaatctctccaatgatgagtattattatcccaagcaacagggtcttcgaggcacctttggagggaatattatccagcattcaattcctgctgtggaattacggcagcccttctttcccacccacatggggcccatcaaactccggcagttccatcgcccacctctgaaaaagtactcatttggtgcactttctcagccaggtccccactcagtccaacctttgctaaagcacatcaaaaaaaaggccaagatgagagaacaagagaggcaagcttcaggtggtggagagatgttttttatgcgcacacctcaggacctcacaggcaaagatggtgatcttattcttgcagaatatagtgaggaaaatggacccttaatgatgcaggttggcatggcaaccaagataaagaactattataaacggaaacctggaaaagatcctggagcaccagattgtaaatatggggaaactgtttactgccatacatctcctttcctgggttctctccatcctggccaattgctgcaagcatttgagaacaacctttttcgtgctccaatttatcttcataagatgccagaaactgatttcttgatcattcggacaagacagggttactatattcgggaattagtggatatttttgtggttggccagcagtgtcccttgtttgaagttcctgggcctaactccaaaagggccaatacgcatattcgagactttctacaggtttttatttaccgccttttctggaaaagtaaagatcggccacggaggatacgaatggaagatataaaaaaagcctttccttcccattcagaaagcagcatccggaagaggctaaagctctgcgctgacttcaaacgcacagggatggactcaaactggtgggtgcttaagtctgattttcgtttaccaacggaagaagagatcagagctatggtgtcaccagagcagtgctgtgcttattatagcatgatagctgcagagcaacgactgaaggatgctggctatggtgagaaatccttttttgctccagaagaagaaaatgaggaagatttccagatgaagattgatgatgaagttcgcactgccccttggaacaccacaagggccttcattgctgccatgaagggcaagtgtctgctagaggtgactggggtggcagatcccacggggtgtggtgaaggattctcctatgtgaagattccaaacaaaccaacacagcagaaggatgataaagaaccgcagccagtgaagaagacagtgacaggaacagatgcagaccttcgtcgcctttccctgaaaaatgccaagcaacttctacgtaaatttggtgtgcctgaggaagagattaaaaagttgtcccgctgggaagtgattgatgtggtgcgcacaatgtcaacagaacaggctcgttctggagaggggcccatgagtaaatttgcccgtggatcaaggttttctgtggctgagcatcaagagcgttacaaagaggaatgtcagcgcatctttgacctacagaacaaggttctgtcatcaactgaagtcttatcaactgacacagacagcagctcagctgaagatagtgactttgaagaaatgggaaagaacattgagaacatgttgcagaacaagaaaaccagctctcagctttcacgtgaacgggaggaacaggagcggaaggaactacagcgaatgctactggcagcaggctcagcagcatccggaaacaatcacagagatgatgacacagcttccgtgactagccttaactcttctgccactggacgctgtctcaagatttatcgcacgtttcgagatgaagaggggaaagagtatgttcgctgtgagacagtccgaaaaccagctgtcattgatgcctatgtgcgcatacggactacaaaagatgaggaattcattcgaaaatttgccctttttgatgaacaacatcgggaagagatgcgaaaagaacggcggaggattcaagagcaactgaggcggcttaagaggaaccaggaaaaggagaagcttaagggtcctcctgagaagaagcccaagaaaatgaaggagcgtcctgacctaaaactgaaatgtggggcatgtggtgccattggacacatgaggactaacaaattctgccccctctattatcaaacaaatgcgccaccttccaaccctgttgccatgacagaagaacaggaggaggagttggaaaagacagtcattcataatgataatgaagaacttatcaaggttgaagggaccaaaattgtcttggggaaacagctaattgagagtgcggatgaggttcgcagaaaatctctggttctcaagtttcctaaacagcagcttcctccaaagaagaaacggcgagttggaaccactgttcactgtgactatttgaatagacctcataagtccatccaccggcgccgcacagaccctatggtgacgctgtcgtccatcttggagtctatcatcaatgacatgagagatcttccaaatacataccctttccacactccagtcaatgcaaaggttgtaaaggactactacaaaatcatcactcggccaatggacctacaaacactccgcgaaaacgtgcgtaaacgcctctacccatctcgggaagagttcagagagcatctggagctaattgtgaaaaatagtgcaacctacaatgggccaaaacactcattgactcagatctctcaatccatgctggatctctgtgatgaaaaactcaaagagaaagaagacaaattagctcgcttagagaaagctatcaaccccttgctggatgatgatgaccaagtggcgttttctttcattctggacaacattgtcacccagaaaatgatggcagttccagattcttggccatttcatcacccagttaataagaaatttgttccagattattacaaagtgattgtcaatccaatggatttagagaccatacgtaagaacatctccaagcacaagtatcagagtcgggagagctttctggatgatgtaaaccttattctggccaacagtgttaagtataatggacctgagagtcagtatactaagactgcccaggagattgtgaacgtctgttaccagacattgactgagtatgatgaacatttgactcaacttgagaaggatatttgtactgctaaagaagcagctttggaggaagcagaattagaaagcctggacccaatgaccccagggccctacacgcctcagcctcctgatttgtatgataccaacacatccctcagtatgtctcgagatgcctctgtatttcaagatgagagcaatatgtctgtcttggatattcccagtgccactccagaaaagcaggtaacacaggaaggtgaagatggagatggtgatcttgcagatgaagaggaaggaactgtacaacagcctcaagccagtgtcctgtatgaggatttgcttatgtctgaaggagaagatgatgaggaagatgctgggagtgatgaagaaggagacaatcctttctctgctatccagctgagtgaaagtggaagtgactctgatgtgggatctggtggaataagacccaaacaaccccgcatgcttcaggagaacacaaggatggacatggaaaatgaagaaagcatgatgtcctatgagggagacggtggggaggcttcccatggtttggaggatagcaacatcaggtaatcgacagcaacatgctacagggctgtggcatcagtgcccagctatgatgttgaggggcccaacatcagattacttttcatccatcaaacatttcctgggcacctactagggccaggcactgtgctaggctctggggatacacagaggagcaaaacatatc

SEQ ID NO: 438853 - DNA, 6274 bp, Homo sapiens
aagggagctcagtaagtcacttctgggcgactgttgttttatttccggtctatgggacccggctgcgatttgctgctgcggacagcagctaccatcactgctgccgccatcatgtcagacacggacagcgacgaagattccgctggaggcggcccattttctttagcgggtttccttttcggcaacatcaatggagccgggcagctggagggggaaagcgtcttggatgatgaatgtaagaagcacttggcaggcttgggggctttggggctgggcagcctgatcactgaactcacggcaaatgaagaattgaccgggactgacggtgccttggtaaatgatgaagggtgggttaggagtacagaagatgctgtggactattcagacatcaatgaggtggcagaagatgaaagccgaagataccagcagacgatggggagcttgcagcccctttgccactcagattatgatgaagatgactatgatgctgattgtgaagacattgattgcaagttgatgcctcctccacctccacccccgggaccaatgaagaaggataaggaccaggattctattactggtgtgtctgaaaatggagaaggcatcatcttgccctccatcattgccccttcctctttggcctcagagaaagtggacttcagtagttcctctgactcagaatctgagatgggacctcaggaagcaacacaggcagaatctgaagatggaaagctgacccttccattggctgggattatgcagcatgatgccaccaagctgttgccaagtgtcacagaactttttccagaatttcgacctggaaaggtgttacgttttctacgtctttttggaccagggaagaatgtcccatctgtttggcggagtgctcggagaaagaggaagaagaagcaccgtgagctgatacaggaagagcagatccaggaggtggagtgctcagtagaatcagaagtcagccagaagtctttgtggaactacgactacgctccaccaccacctccagagcagtgtctctctgatgatgaagtaggcaaaatagagacctgagattaaggcctatgagaggaacaaatgaattcaatgagttctccctaatttatgtctaaattgtaaataataccatagcagatagaatctgtgctaattttcaatgagtaatcatgggttcaatctcagtggctgccccttccctattgtaaaagaaaaatgtttggtggggtaggcggggatgagaggggtagatggtgatatgctgctgaataagaaggtttgattgataggtggaatgtgctatgatacatctccattgtttacattctaactccaggtaaatcatcctcagtttctctaagttcccctcctgactgttaactctctatagccttaggacatctgggatcaggaaattctccctgctctacttctttcttctgttacagatcacgatgatggctcctgtggagtccaaattttcccaatcaactggagatatagataaagtgacagataccaaaccaagagtggctgagtggcgttatgggcctgcccgactgtggtatgatatgctgggtgtccctgaagatggcagtgggtttgactatggcttcaaactgagaaagacagaacatgaacctgtgataaaatctagaatgatagaggaatttaggaaacttgaggaaaacaatggcactgatcttctggctgatgaaaacttcctgatggtgacacagctgcattgggaggatgatatcatctgggatggggaggatgtcaaacacaaagggacaaaacctcagcgtgcaagcctggcaggctggcttccttctagcatgactaggaatgcgatggcttacaatgttcagcaaggttttgcagccactcttgatgatgacaaaccttggtactccatttttcccattgacaatgaggatctggtatatggacgctgggaggacaatatcatttgggatgctcaggccatgccccggctgttggaacctcctgttttgacacttgatcccaatgatgagaacctcattttggaaattcctgatgagaaggaagaggccacctctaactccccctccaaggagagtaagaaggaatcatctctgaagaagagtcgaattctcttagggaaaacaggagtcatcaaggaggaaccacagcagaacatgtctcagccagaagtgaaagatccatggaatctctccaatgatgagtattattatcccaagcaacagggtcttcgaggcacctttggagggaatattatccagcattcaattcctgctgtggaattacggcagcccttctttcccacccacatggggcccatcaaactccggcagttccatcgcccacctctgaaaaagtactcatttggtgcactttctcagccaggtccccactcagtccaacctttgctaaagcacatcaaaaaaaaggccaagatgagagaacaagagaggcaagcttcaggtggtggagagatgttttttatgcgcacacctcaggacctcacaggcaaagatggtgatcttattcttgcagaatatagtgaggaaaatggacccttaatgatgcaggttggcatggcaaccaagataaagaactattataaacggaaacctggaaaagatcctggagcaccagattgtaaatatggggaaactgtttactgccatacatctcctttcctgggttctctccatcctggccaattgctgcaagcatttgagaacaacctttttcgtgctccaatttatcttcataagatgccagaaactgatttcttgatcattcggacaagacagggttactatattcgggaattagtggatatttttgtggttggccagcagtgtcccttgtttgaagttcctgggcctaactccaaaagggccaatacgcatattcgagactttctacaggtttttatttaccgccttttctggaaaagtaaagatcggccacggaggatacgaatggaagatataaaaaaagcctttccttcccattcagaaagcagcatccggaagaggctaaagctctgcgctgacttcaaacgcacagggatggactcaaactggtgggtgcttaagtctgattttcgtttaccaacggaagaagagatcagagctatggtgtcaccagagcagtgctgtgcttattatagcatgatagctgcagagcaacgactgaaggatgctggctatggtgagaaatccttttttgctccagaagaagaaaatgaggaagatttccagatgaagattgatgatgaagttcgcactgccccttggaacaccacaagggccttcattgctgccatgaagggcaagtgtctgctagaggtgactggggtggcagatcccacggggtgtggtgaaggattctcctatgtgaagattccaaacaaaccaacacagcagaaggatgataaagaaccgcagccagtgaagaagacagtgacaggaacagatgcagaccttcgtcgcctttccctgaaaaatgccaagcaacttctacgtaaatttggtgtgcctgaggaagagattaaaaagttgtcccgctgggaagtgattgatgtggtgcgcacaatgtcaacagaacaggctcgttctggagaggggcccatgagtaaatttgcccgtggatcaaggttttctgtggctgagcatcaagagcgttacaaagaggaatgtcagcgcatctttgacctacagaacaaggttctgtcatcaactgaagtcttatcaactgacacagacagcagctcagctgaagatagtgactttgaagaaatgggaaagaacattgagaacatgttgcagaacaagaaaaccagctctcagctttcacgtgaacgggaggaacaggagcggaaggaactacagcgaatgctactggcagcaggctcagcagcatccggaaacaatcacagagatgatgacacagcttccgtgactagccttaactcttctgccactggacgctgtctcaagatttatcgcacgtttcgagatgaagaggggaaagagtatgttcgctgtgagacagtccgaaaaccagctgtcattgatgcctatgtgcgcatacggactacaaaagatgaggaattcattcgaaaatttgccctttttgatgaacaacatcgggaagagatgcgaaaagaacggcggaggattcaagagcaactgaggcggcttaagaggaaccaggaaaaggagaagcttaagggtcctcctgagaagaagcccaagaaaatgaaggagcgtcctgacctaaaactgaaatgtggggcatgtggtgccattggacacatgaggactaacaaattctgccccctctattatcaaacaaatgcgccaccttccaaccctgttgccatgacagaagaacaggaggaggagttggaaaagacagtcattcataatgataatgaagaacttatcaaggttgaagggaccaaaattgtcttggggaaacagctaattgagagtgcggatgaggttcgcagaaaatctctggttctcaagtttcctaaacagcagcttcctccaaagaagaaacggcgagttggaaccactgttcactgtgactatttgaatagacctcataagtccatccaccggcgccgcacagaccctatggtgacgctgtcgtccatcttggagtctatcatcaatgacatgagagatcttccaaatacataccctttccacactccagtcaatgcaaaggttgtaaaggactactacaaaatcatcactcggccaatggacctacaaacactccgcgaaaacgtgcgtaaacgcctctacccatctcgggaagagttcagagagcatctggagctaattgtgaaaaatagtgcaacctacaatgggccaaaacactcattgactcagatctctcaatccatgctggatctctgtgatgaaaaactcaaagagaaagaagacaaattagctcgcttagagaaagctatcaaccccttgctggatgatgatgaccaagtggcgttttctttcattctggacaacattgtcacccagaaaatgatggcagttccagattcttggccatttcatcacccagttaataagaaatttgttccagattattacaaagtgattgtcaatccaatggatttagagaccatacgtaagaacatctccaagcacaagtatcagagtcgggagagctttctggatgatgtaaaccttattctggccaacagtgttaagtataatggacctgagagtcagtatactaagactgcccaggagattgtgaacgtctgttaccagacattgactgagtatgatgaacatttgactcaacttgagaaggatatttgtactgctaaagaagcagctttggaggaagcagaattagaaagcctggacccaatgaccccagggccctacacgcctcagcctcctgatttgtatgataccaacacatccctcagtatgtctcgagatgcctctgtatttcaagatgagagcaatatgtctgtcttggatattcccagtgccactccagaaaagcaggtaacacagatgcgccagggccgaggtaggctgggcgaggaagactctgatgtagatattgaagggtatgatgatgaggaggaggatgggaaacctaagactccagccccagaaggtgaagatggagatggtgatcttgcagatgaagaggaaggaactgtacaacagcctcaagccagtgtcctgtatgaggatttgcttatgtctgaaggagaagatgatgaggaagatgctgggagtgatgaagaaggagacaatcctttctctgctatccagctgagtgaaagtggaagtgactctgatgtgggatctggtggaataagacccaaacaaccccgcatgcttcaggagaacacaaggatggacatggaaaatgaagaaagcatgatgtcctatgagggagacggtggggaggcttcccatggtttggaggatagcaacatcagatggagtctccctctgttgcccaggctagagtgcagtggtgtgatctcggctcactgcaacctccacctcccgggttcaagcgattttcctgcttcagcctcctgagtaactgggattacaggcacgcatcaccacaccgggctgatttttgtaggctggagtgcagtggtacgatctcagctcactgcaacatccgcctcccgggttcaagcgattcttgtgcctcagcctcctcagtagctgggatt

SEQ ID NO: 438854 - DNA, 3416 bp, Homo sapiens
aagggagctcagtaagtcacttctgggcgactgttgttttatttccggtctatgggacccggctgcgatttgctgctgcggacagcagctaccatcactgctgccgccatcatgtcagacacggacagcgacgaagattccgctggaggcggcccattttctttagcgggtttccttttcggcaacatcaatggagccgggcagctggagggggaaagcgtcttggatgatgaatgtaagaagcacttggcaggcttgggggctttggggctgggcagcctgatcactgaactcacggcaaatgaagaattgaccgggactgacggtgccttggtaaatgatgaagggtgggttaggagtacagaagatgctgtggactattcagacatcaatgaggtggcagaagatgaaagccgaagataccagcagacgatggggagcttgcagcccctttgccactcagattatgatgaagatgactatgatgctgattgtgaagacattgattgcaagttgatgcctcctccacctccacccccgggaccaatgaagaaggataaggaccaggattctattactggtgtgtctgaaaatggagaaggcatcatcttgccctccatcattgccccttcctctttggcctcagagaaagtggacttcagtagttcctctgactcagaatctgagatgggacctcaggaagcaacacaggcagaatctgaagatggaaagctgacccttccattggctgggattatgcagcatgatgccaccaagctgttgccaagtgtcacagaactttttccagaatttcgacctggaaaggtgttacgttttctacgtctttttggaccagggaagaatgtcccatctgtttggcggagtgctcggagaaagaggaagaagaagcaccgtgagctgatacaggaagagcagatccaggaggtggagtgctcagtagaatcagaagtcagccagaagtctttgtggaactacgactacgctccaccaccacctccagagcagtgtctctctgatgatgaagtaggcaaaatagagacctgagattaaggcctatgagaggaacaaatgaattcaatgagttctccctaatttatgtctaaattgtaaataataccatagcagatagaatctgtgctaattttcaatgagtaatcatgggttcaatctcagtggctgccccttccctattgtaaaagaaaaatgtttggtggggtaggcggggatgagaggggtagatggtgatatgctgctgaataagaaggtttgattgataggtggaatgtgctatgatacatctccattgtttacattctaactccaggtaaatcatcctcagtttctctaagttcccctcctgactgttaactctctatagccttaggacatctgggatcaggaaattctccctgctctacttctttcttctgttacagatcacgatgatggctcctgtggagtccaaattttcccaatcaactggagatatagataaagtgacagataccaaaccaagagtggctgagtggcgttatgggcctgcccgactgtggtatgatatgctgggtgtccctgaagatggcagtgggtttgactatggcttcaaactgagaaagacagaacatgaacctgtgataaaatctagaatgatagaggaatttaggaaacttgaggaaaacaatggcactgatcttctggctgatgaaaacttcctgatggtgacacagctgcattgggaggatgatatcatctgggatggggaggatgtcaaacacaaagggacaaaacctcagcgtgcaagcctggcaggctggcttccttctagcatgactaggaatgcgatggcttacaatgttcagcaaggttttgcagccactcttgatgatgacaaaccttggtactccatttttcccattgacaatgaggatctggtatatggacgctgggaggacaatatcatttgggatgctcaggccatgccccggctgttggaacctcctgttttgacacttgatcccaatgatgagaacctcattttggaaattcctgatgagaaggaagaggccacctctaactccccctccaaggagagtaagaaggaatcatctctgaagaagagtcgaattctcttagggaaaacaggagtcatcaaggaggaaccacagcagaacatgtctcagccagaagtgaaagatccatggaatctctccaatgatgagtattattatcccaagcaacagggtcttcgaggcacctttggagggaatattatccagcattcaattcctgctgtggaattacggcagcccttctttcccacccacatggggcccatcaaactccggcagttccatcgcccacctctgaaaaagtactcatttggtgcactttctcagccaggtccccactcagtccaacctttgctaaagcacatcaaaaaaaaggccaagatgagagaacaagagaggcaagcttcaggtggtggagagatgttttttatgcgcacacctcaggacctcacaggcaaagatggtgatcttattcttgcagaatatagtgaggaaaatggacccttaatgatgcaggttggcatggcaaccaagataaagaactattataaacggaaacctggaaaagatcctggagcaccagattgtaaatatggggaaactgtttactgccatacatctcctttcctgggttctctccatcctggccaattgctgcaagcatttgagaacaacctttttcgtgctccaatttatcttcataagatgccagaaactgatttcttgatcattcggacaagacagggttactatattcgggaattagtggatatttttgtggttggccagcagtgtcccttgtttgaagttcctgggcctaactccaaaagggccaatacgcatattcgagactttctacaggtttttatttaccgccttttctggaaaagtaaagatcggccacggaggatacgaatggaagatataaaaaaagcctttccttcccattcagaaagcagcatccggaagaggctaaagctctgcgctgacttcaaacgcacagggatggactcaaactggtgggtgcttaagtctgattttcgtttaccaacggaagaagagatcagagctatggtgtcaccagagcagtgctgtgcttattatagcatgatagctgcagagcaacgactgaaggatgctggctatggtgagaaatccttttttgctccagaagaagaaaatgaggaagatttccagatgaagattgatgatgaagtaaggctttatactagtttgtattagtcattaatacatctcatttatccttttaaaagagacagctttattgagataacataaaataaactgtacacatttaaagtatac

SEQ ID NO: 438855 - DNA, 1742 bp, Homo sapiens
aagggagctcagtaagtcacttctgggcgactgttgttttatttccggtctatgggacccggctgcgatttgctgctgcggacagcagctaccatcactgctgccgccatcatgtcagacacggacagcgacgaagattccgctggaggcggcccattttctttagcgggtttccttttcggcaacatcaatggagccgggcagctggagggggaaagcgtcttggatgatgaatgtaagaagcacttggcaggcttgggggctttggggctgggcagcctgatcactgaactcacggcaaatgaagaattgaccgggactgacggtgccttggtaaatgatgaagggtgggttaggagtacagaagatgctgtggactattcagacatcaatgaggtggcagaagatgaaagccgaagataccagcagacgatggggagcttgcagcccctttgccactcagattatgatgaagatgactatgatgctgattgtgaagacattgattgcaagttgatgcctcctccacctccacccccgggaccaatgaagaaggataaggaccaggattctattactggtgtgtctgaaaatggagaaggcatcatcttgccctccatcattgccccttcctctttggcctcagagaaagtggacttcagtagttcctctgactcagaatctgagatgggacctcaggaagcaacacaggcagaatctgaagatggaaagctgacccttccattggctgggattatgcagcatgatgccaccaagctgttgccaagtgtcacagaactttttccagaatttcgacctggaaaggtgttacgttttctacgtctttttggaccagggaagaatgtcccatctgtttggcggagtgctcggagaaagaggaagaagaagcaccgtgagctgatacaggaagagcagatccaggaggtggagtgctcagtagaatcagaagtcagccagaagtctttgtggaactacgactacgctccaccaccacctccagagcagtgtctctctgatgatgaagtaggcaaaatagagacctgagattaaggcctatgagaggaacaaatgaattcaatgagttctccctaatttatgtctaaattgtaaataataccatagcagatagaatctgtgctaattttcaatgagtaatcatgggttcaatctcagtggctgccccttccctattgtaaaagaaaaatgtttggtggggtaggcggggatgagaggggtagatggtgatatgctgctgaataagaaggtttgattgataggtggaatgtgctatgatacatctccattgtttacattctaactccaggtaaatcatcctcagtttctctaagttcccctcctgactgttaactctctatagccttaggacatctgggatcaggaaattctccctgctctacttctttcttctgttacagatcacgatgatggctcctgtggagtccaaattttcccaatcaactggagatatagataaagtgacagataccaaaccaagagtggctgagtggcgttatgggcctgcccgactgtggtatgatatgctgggtgtccctgaagatggcagtgggtttgactatggcttcaaactgagaaagacagaacatgaacctgtgataaaatctagaatgatagaggaatttagaactgaaatgcactgatcttctggctgatgaaatgtggagatgatatcatcttatacg

SEQ ID NO: 438856 - DNA, 454 bp, Homo sapiens
gagcaatatgtctgtcttggatattcccagtgccactccagaaaagcaggtaacacaggtaggatgttctttttctctttataagattgttattgtgcctgcaagtggggctaggggaatggtgatggtgatggtgatatgtgacatatgtcaagaatgactgggccctttggccctgggaatgaaagcttagaaatgggatttcaagttgggatggcagcaggtcgtgtgactggtgttatattctctctgtccccatgggtagagtcaggcacagcagaacttcagggaagacacaagtatgaaaaaagggtgtgaagcatcagagtagcctgacgggtgactagagcgaccaactgcactcagacagttcaaaataattggcctactttatgtgtattataatttaaattaaaattatttataaaattaaattttaaaaattggccttttc

SEQ ID NO: 438857 - DNA, 337 bp, Homo sapiens
cagtgcctaaaatgaagtcaggaaaggacaaatcagcatattcttggggctgatgatgactttgatgctttttgtagaaccatagttttgtggcatgttgaactttgatagctccactcaatcccaagaaaatgatcatttgggagataaggggaacgtttggaaatcttttctacctaccttgcagcagcaggctcagcagcatccggaaacaatcacagagatgatgacacagcttccgtgactagccttaactcttctgccactggacgctgtctcaagatttatcgcacgtttcgagatgaagaggggaaagagtatgttcgctgtgagacag

SEQ ID NO: 438858 - DNA, 398 bp, Homo sapiens
atagaacaaatgtttcccactgccctgagaatctttttctttatctcaggttcgcactgccccttggaacaccacaagggccttcattgctgccatgaagggcaagtgtctgctagaggtgactggggtggcagatcccacggggtgtggtgaaggattctcctatgtgaagattccaaacaaaccaacacagcagaaggtgagattgtgtttatttctagaatgaaaaagtcaagggagaaagaaatgggtgagtggaggacttggaatgtagttaaggtagcagaatgacttagatgcctacttaaaaggaattcaggtttttaggagtctcacttttttttgtttgaggtaggatgataaagaaccgcagccagtgaagaagacagtgacaggaa

SEQ ID NO: 438859 - DNA, 350 bp, Homo sapiens
tgctgggattacaggcgtgagccaccacgcccggcaaattgtccttaacttttctatggtgatcacaccttagggaaacctctgtcttggctttgctttgtttaatttcagaaagaagacaaattagctcgcttagagaaagctatcaaccccttgctggatgatgatgaccaagtggcgttttctttcattctggacaacattgtcacccagaaaatgatggcagttccagatgtaagctgtctctgtgccaaatactgtgaggatcgtgcaggggaaaggaaaaatgtttagggtgtacacgtgtgtgtattttggagagtctgagtggtggtgtatgtcagttgtga

SEQ ID NO: 438860 - DNA, 7637 bp, Homo sapiens
aagggagctcagtaagtcacttctgggcgactgttgttttatttccggtctatgggacccggctgcgatttgctgctgcggacagcagctaccatcactgctgccgccatcatgtcagacacggacagcgacgaagattccgctggaggcggcccattttctttagcgggtttccttttcggcaacatcaatggagccgggcagctggagggggaaagcgtcttggatgatgaatgtaagaagcacttggcaggcttgggggctttggggctgggcagcctgatcactgaactcacggcaaatgaagaattgaccgggactgacggtgccttggtaaatgatgaagggtgggttaggagtacagaagatgctgtggactattcagacatcaatgaggtggcagaagatgaaagccgaagataccagcagacgatggggagcttgcagcccctttgccactcagattatgatgaagatgactatgatgctgattgtgaagacattgattgcaagttgatgcctcctccacctccacccccgggaccaatgaagaaggataaggaccaggattctattactggtgagaaagtggacttcagtagttcctctgactcagaatctgagatgggacctcaggaagcaacacaggcagaatctgaagatggaaagctgacccttccattggctgggattatgcagcatgatgccaccaagctgttgccaagtgtcacagaactttttccagaatttcgacctggaaaggtgttacgttttctacgtctttttggaccagggaagaatgtcccatctgtttggcggagtgctcggagaaagaggaagaagaagcaccgtgagctgatacaggaagagcagatccaggaggtggagtgctcagtagaatcagaagtcagccagaagtctttgtggaactacgactacgctccaccaccacctccagagcagtgtctctctgatgatgaaatcacgatgatggctcctgtggagtccaaattttcccaatcaactggagatatagataaagtgacagataccaaaccaagagtggctgagtggcgttatgggcctgcccgactgtggtatgatatgctgggtgtccctgaagatggcagtgggtttgactatggcttcaaactgagaaagacagaacatgaacctgtgataaaatctagaatgatagaggaatttaggaaacttgaggaaaacaatggcactgatcttctggctgatgaaaacttcctgatggtgacacagctgcattgggaggatgatatcatctgggatggggaggatgtcaaacacaaagggacaaaacctcagcgtgcaagcctggcaggctggcttccttctagcatgactaggaatgcgatggcttacaatgttcagcaaggttttgcagccactcttgatgatgacaaaccttggtactccatttttcccattgacaatgaggatctggtatatggacgctgggaggacaatatcatttgggatgctcaggccatgccccggctgttggaacctcctgttttgacacttgatcccaatgatgagaacctcattttggaaattcctgatgagaaggaagaggccacctctaactccccctccaaggagagtaagaaggaatcatctctgaagaagagtcgaattctcttagggaaaacaggagtcatcaaggaggaaccacagcagaacatgtctcagccagaagtgaaagatccatggaatctctccaatgatgagtattattatcccaagcaacagggtcttcgaggcacctttggagggaatattatccagcattcaattcctgctgtggaattacggcagcccttctttcccacccacatggggcccatcaaactccggcagttccatcgcccacctctgaaaaagtactcatttggtgcactttctcagccaggtccccactcagtccaacctttgctaaagcacatcaaaaaaaaggccaagatgagagaacaagagaggcaagcttcaggtggtggagagatgttttttatgcgcacacctcaggacctcacaggcaaagatggtgatcttattcttgcagaatatagtgaggaaaatggacccttaatgatgcaggttggcatggcaaccaagataaagaactattataaacggaaacctggaaaagatcctggagcaccagattgtaaatatggggaaactgtttactgccatacatctcctttcctgggttctctccatcctggccaattgctgcaagcatttgagaacaacctttttcgtgctccaatttatcttcataagatgccagaaactgatttcttgatcattcggacaagacagggttactatattcgggaattagtggatatttttgtggttggccagcagtgtcccttgtttgaagttcctgggcctaactccaaaagggccaatacgcatattcgagactttctacaggtttttatttaccgccttttctggaaaagtaaagatcggccacggaggatacgaatggaagatataaaaaaagcctttccttcccattcagaaagcagcatccggaagaggctaaagctctgcgctgacttcaaacgcacagggatggactcaaactggtgggtgcttaagtctgattttcgtttaccaacggaagaagagatcagagctatggtgtcaccagagcagtgctgtgcttattatagcatgatagctgcagagcaacgactgaaggatgctggctatggtgagaaatccttttttgctccagaagaagaaaatgaggaagatttccagatgaagattgatgatgaagttcgcactgccccttggaacaccacaagggccttcattgctgccatgaagggcaagtgtctgctagaggtgactggggtggcagatcccacggggtgtggtgaaggattctcctatgtgaagattccaaacaaaccaacacagcagaaggatgataaagaaccgcagccagtgaagaagacagtgacaggaacagatgcagaccttcgtcgcctttccctgaaaaatgccaagcaacttctacgtaaatttggtgtgcctgaggaagagattaaaaagttgtcccgctgggaagtgattgatgtggtgcgcacaatgtcaacagaacaggctcgttctggagaggggcccatgagtaaatttgcccgtggatcaaggttttctgtggctgagcatcaagagcgttacaaagaggaatgtcagcgcatctttgacctacagaacaaggttctgtcatcaactgaagtcttatcaactgacacagacagcagctcagctgaagatagtgactttgaagaaatgggaaagaacattgagaacatgttgcagaacaagaaaaccagctctcagctttcacgtgaacgggaggaacaggagcggaaggaactacagcgaatgctactggcagcaggctcagcagcatccggaaacaatcacagagatgatgacacagcttccgtgactagccttaactcttctgccactggacgctgtctcaagatttatcgcacgtttcgagatgaagaggggaaagagtatgttcgctgtgagacagtccgaaaaccagctgtcattgatgcctatgtgcgcatacggactacaaaagatgaggaattcattcgaaaatttgccctttttgatgaacaacatcgggaagagatgcgaaaagaacggcggaggattcaagagcaactgaggcggcttaagaggaaccaggaaaaggagaagcttaagggtcctcctgagaagaagcccaagaaaatgaaggagcgtcctgacctaaaactgaaatgtggggcatgtggtgccattggacacatgaggactaacaaattctgccccctctattatcaaacaaatgcgccaccttccaaccctgttgccatgacagaagaacaggaggaggagttggaaaagacagtcattcataatgataatgaagaacttatcaaggttgaagggaccaaaattgtcttggggaaacagctaattgagagtgcggatgaggttcgcagaaaatctctggttctcaagtttcctaaacagcagcttcctccaaagaagaaacggcgagttggaaccactgttcactgtgactatttgaatagacctcataagtccatccaccggcgccgcacagaccctatggtgacgctgtcgtccatcttggagtctatcatcaatgacatgagagatcttccaaatacataccctttccacactccagtcaatgcaaaggttgtaaaggactactacaaaatcatcactcggccaatggacctacaaacactccgcgaaaacgtgcgtaaacgcctctacccatctcgggaagagttcagagagcatctggagctaattgtgaaaaatagtgcaacctacaatgggccaaaacactcattgactcagatctctcaatccatgctggatctctgtgatgaaaaactcaaagagaaagaagacaaattagctcgcttagagaaagctatcaaccccttgctggatgatgatgaccaagtggcgttttctttcattctggacaacattgtcacccagaaaatgatggcagttccagattcttggccatttcatcacccagttaataagaaatttgttccagattattacaaagtgattgtcaatccaatggatttagagaccatacgtaagaacatctccaagcacaagtatcagagtcgggagagctttctggatgatgtaaaccttattctggccaacagtgttaagtataatggacctgagagtcagtatactaagactgcccaggagattgtgaacgtctgttaccagacattgactgagtatgatgaacatttgactcaacttgagaaggatatttgtactgctaaagaagcagctttggaggaagcagaattagaaagcctggacccaatgaccccagggccctacacgcctcagcctcctgatttgtatgataccaacacatccctcagtatgtctcgagatgcctctgtatttcaagatgagagcaatatgtctgtcttggatattcccagtgccactccagaaaagcaggtaacacaggaaggtgaagatggagatggtgatcttgcagatgaagaggaaggaactgtacaacagcctcaagccagtgtcctgtatgaggatttgcttatgtctgaaggagaagatgatgaggaagatgctgggagtgatgaagaaggagacaatcctttctctgctatccagctgagtgaaagtggaagtgactctgatgtgggatctggtggaataagacccaaacaaccccgcatgcttcaggagaacacaaggatggacatggaaaatgaagaaagcatgatgtcctatgagggagacggtggggaggcttcccatggtttggaggatagcaacatcagttatgggagctatgaggagcctgatcccaagtcgaacacccaagacacaagcttcagcagcatcggtgggtatgaggtatcagaggaggaagaagatgaggaggaggaagagcagcgctctgggccgagcgtactaagccaggtccacctgtcagaggacgaggaggacagtgaggatttccactccattgctggggacagtgacttggactctgatgaatgaggcttcctttgggcctccttggtcagccttccctgttctccagcctaggtggttcacctttccccaatttgttcatatttgtacagtatctgatcctgaaatcatgaaattaactaacaccttagcctttttaaaagtagtaagtaaatgataataaatcacctctcctaatcttcctggggcaatgtcaccctttgatttaaaacaaagcaaccccctttcccctaccactacggaaaagagcaagctcatttttccgtgtcctcctttatttaactccatttattgcttttggtataatttttccctggggaaggaggggaaattatgaaagaactagtaactttatgtcctcttgatgtattaggaaatttccggccaggcgtggtggctcacacctgtaatctcagcactctgggaggccgaggcgggcagatcacctgaggtcagaagttcgagaccagcttggccaacatggcgaaaccgcatctctactaaaaatacaaaaattagccaggtgtggtggcgtatgcctgttaatcctagctactcgggaggctgaggcaggagaattacttgaacccgggaggcagaggttgcagtgagtggaggtcacgccactgcactccagcctgggcgaaagagtgagattcagtctcaaaaaaaaaaaaaatttccaagcatggtatcatctcacttttctaatttacaggctggagcagatgagagccctcctgctgggacagagaattgggttctagtggactctgtgctacacttaaacctgtgagacaaaccgcccattattttattatttaattatgcaatgcctagttcctaaatggattggaggcaaattaccgtaaattttgaaacagcctatatgtcagaaatgataatgttgccacctaaatgttttctgtcccccccaccctccccaggggaaatggtaggaaaatggtaagtttcttagggcaaagactgtgtcttctgtttcttttcatgcttaggatatggttctgtgcatagtaggtactcagtaaatgttcctagaatcataaaatcctcaacagatatgttactgagcatctgcttttcatgataagcactctatcagatccttgggatgcaaaggtaaataagacaaatcccttttacccaaagagctcaccatcaagttgggggagggaaagtggaattcaaaacatgttaataaatcatcatagtactgtgagataagtgcaattaagaagctagttataaagtataggggaaatagaggagtaatcatgtctgaaaagtcaggaaagtcttcctagaggtaatttttaagctgattgttttagaattagtagaagcttgccagatggaaaagtccaggcaaagtgtaacatgaatgggaaaggccacagtctagaaatggcagagtgtgttcctagtttgtttgtttgtttgtttgtacctgccttgttccaggaaggatttaatgtggtttatattccagtcctttaatgctggaagggctgagatgagactgaaagatgggcaggaagtatatcatcacaagctttgtgtttgatgttaatgtgtatgatttttatattatgggaaataagctcttagaggagtgatataatcaggtttgtgttttagaaatctgtgtaatgaatgaatgaagaaagaaattgaagaatcatgtaacatatgtgatcgcatttttgtaaaagaaccatgtgtgtttatatgtgtttatatatatacttgtgtatgcaaaggtaaaagtctgaaaggatatatgctaactgttcacaatgataaccccccaggaatgggattggaggggagggggcttctgtgtttgttatgtatgctgggtgggatattgtgcttttatttctatattgtttgaatttttttacagtatgtattatttttgtaataaaaattttaaaaaattccaaaagtag

SEQ ID NO: 438861 - DNA, 6352 bp, Homo sapiens
agcctgcaacattattttaaagtgagaaatacactgtgtaggttccttttcagtggacacatgaataactccactaactcgctctactaacatgagtaactctttttatctttgccagaatcttgattgaaaggggcataaatgttttctctgttactatttcctccttgcactttgactaggttttgcagccactcttgatgatgacaaaccttggtactccatttttcccattgacaatgaggatctggtatatggacgctgggaggacaatatcatttgggatgctcaggccatgccccggctgttggaacctcctgttttgacacttgatcccaatgatgagaacctcattttggaaattcctgatgagaaggaagaggccacctctaactccccctccaaggagagtaagaaggaatcatctctgaagaagagtcgaattctcttagggaaaacaggagtcatcaaggaggaaccacagcagaacatgtctcagccagaagtgaaagatccatggaatctctccaatgatgagtattattatcccaagcaacagggtcttcgaggcacctttggagggaatattatccagcattcaattcctgctgtggaattacggcagcccttctttcccacccacatggggcccatcaaactccggcagttccatcgcccacctctgaaaaagtactcatttggtgcactttctcagccaggtccccactcagtccaacctttgctaaagcacatcaaaaaaaaggccaagatgagagaacaagagaggcaagcttcaggtggtggagagatgttttttatgcgcacacctcaggacctcacaggcaaagatggtgatcttattcttgcagaatatagtgaggaaaatggacccttaatgatgcaggttggcatggcaaccaagataaagaactattataaacggaaacctggaaaagatcctggagcaccagattgtaaatatggggaaactgtttactgccatacatctcctttcctgggttctctccatcctggccaattgctgcaagcatttgagaacaacctttttcgtgctccaatttatcttcataagatgccagaaactgatttcttgatcattcggacaagacagggttactatattcgggaattagtggatatttttgtggttggccagcagtgtcccttgtttgaagttcctgggcctaactccaaaagggccaatacgcatattcgagactttctacaggtttttatttaccgccttttctggaaaagtaaagatcggccacggaggatacgaatggaagatataaaaaaagcctttccttcccattcagaaagcagcatccggaagaggctaaagctctgcgctgacttcaaacgcacagggatggactcaaactggtgggtgcttaagtctgattttcgtttaccaacggaagaagagatcagagctatggtgtcaccagagcagtgctgtgcttattatagcatgatagctgcagagcaacgactgaaggatgctggctatggtgagaaatccttttttgctccagaagaagaaaatgaggaagatttccagatgaagattgatgatgaagttcgcactgccccttggaacaccacaagggccttcattgctgccatgaagggcaagtgtctgctagaggtgactggggtggcagatcccacggggtgtggtgaaggattctcctatgtgaagattccaaacaaaccaacacagcagaaggatgataaagaaccgcagccagtgaagaagacagtgacaggaacagatgcagaccttcgtcgcctttccctgaaaaatgccaagcaacttctacgtaaatttggtgtgcctgaggaagagattaaaaagttgtcccgctgggaagtgattgatgtggtgcgcacaatgtcaacagaacaggctcgttctggagaggggcccatgagtaaatttgcccgtggatcaaggttttctgtggctgagcatcaagagcgttacaaagaggaatgtcagcgcatctttgacctacagaacaaggttctgtcatcaactgaagtcttatcaactgacacagacagcagctcagctgaagatagtgactttgaagaaatgggaaagaacattgagaacatgttgcagaacaagaaaaccagctctcagctttcacgtgaacgggaggaacaggagcggaaggaactacagcgaatgctactggcagcaggctcagcagcatccggaaacaatcacagagatgatgacacagcttccgtgactagccttaactcttctgccactggacgctgtctcaagatttatcgcacgtttcgagatgaagaggggaaagagtatgttcgctgtgagacagtccgaaaaccagctgtcattgatgcctatgtgcgcatacggactacaaaagatgaggaattcattcgaaaatttgccctttttgatgaacaacatcgggaagagatgcgaaaagaacggcggaggattcaagagcaactgaggcggcttaagaggaaccaggaaaaggagaagcttaagggtcctcctgagaagaagcccaagaaaatgaaggagcgtcctgacctaaaactgaaatgtggggcatgtggtgccattggacacatgaggactaacaaattctgccccctctattatcaaacaaatgcgccaccttccaaccctgttgccatgacagaagaacaggaggaggagttggaaaagacagtcattcataatgataatgaagaacttatcaaggttgaagggaccaaaattgtcttggggaaacagctaattgagagtgcggatgaggttcgcagaaaatctctggttctcaagtttcctaaacagcagcttcctccaaagaagaaacggcgagttggaaccactgttcactgtgactatttgaatagacctcataagtccatccaccggcgccgcacagaccctatggtgacgctgtcgtccatcttggagtctatcatcaatgacatgagagatcttccaaatacataccctttccacactccagtcaatgcaaaggttgtaaaggactactacaaaatcatcactcggccaatggacctacaaacactccgcgaaaacgtgcgtaaacgcctctacccatctcgggaagagttcagagagcatctggagctaattgtgaaaaatagtgcaacctacaatgggccaaaacactcattgactcagatctctcaatccatgctggatctctgtgatgaaaaactcaaagagaaagaagacaaattagctcgcttagagaaagctatcaaccccttgctggatgatgatgaccaagtggcgttttctttcattctggacaacattgtcacccagaaaatgatggcagttccagattcttggccatttcatcacccagttaataagaaatttgttccagattattacaaagtgattgtcaatccaatggatttagagaccatacgtaagaacatctccaagcacaagtatcagagtcgggagagctttctggatgatgtaaaccttattctggccaacagtgttaagtataatggacctgagagtcagtatactaagactgcccaggagattgtgaacgtctgttaccagacattgactgagtatgatgaacatttgactcaacttgagaaggatatttgtactgctaaagaagcagctttggaggaagcagaattagaaagcctggacccaatgaccccagggccctacacgcctcagcctcctgatttgtatgataccaacacatccctcagtatgtctcgagatgcctctgtatttcaagatgagagcaatatgtctgtcttggatattcccagtgccactccagaaaagcaggtaacacaggaaggtgaagatggagatggtgatcttgcagatgaagaggaaggaactgtacaacagcctcaagccagtgtcctgtatgaggatttgcttatgtctgaaggagaagatgatgaggaagatgctgggagtgatgaagaaggagacaatcctttctctgctatccagctgagtgaaagtggaagtgactctgatgtgggatctggtggaataagacccaaacaaccccgcatgcttcaggagaacacaaggatggacatggaaaatgaagaaagcatgatgtcctatgagggagacggtggggaggcttcccatggtttggaggatagcaacatcagttatgggagctatgaggagcctgatcccaagtcgaacacccaagacacaagcttcagcagcatcggtgggtatgaggtatcagaggaggaagaagatgaggaggaggaagagcagcgctctgggccgagcgtactaagccaggtccacctgtcagaggacgaggaggacagtgaggatttccactccattgctggggacagtgacttggactctgatgaatgaggcttcctttgggcctccttggtcagctatctgatcctgaaatcatgaaattaactaacaccttagcctttttaaaagtagtaagtaaatgataataaatcacctctcctaatcttcctggggcaatgtcaccctttgatttaaaacaaagcaaccccctttcccctaccactacggaaaagagcaagctcatttttccgtgtcctcctttatttaactccatttattgcttttggtataatttttccctggggaaggaggggaaattatgaaagaactagtaactttatgtcctcttgatgtattaggaaatttccggccaggcgtggtggctcacacctgtaatctcagcactctgggaggccgaggcgggcagatcacctgaggtcagaagttcgagaccagcttggccaacatggcgaaaccgcatctctactaaaaatacaaaaattagccaggtgtggtggcgtatgcctgttaatcctagctactcgggaggctgaggcaggagaattacttgaacccgggaggcagaggttgcagtgagtggaggtcacgccactgcactccagcctgggcgaaagagtgagattcagtctcaaaaaaaaaaaaaatttccaagcatggtatcatctcacttttctaatttacaggctggagcagatgagagccctcctgctgggacagagaattgggttctagtggactctgtgctacacttaaacctgtgagacaaaccgcccattattttattatttaattatgcaatgcctagttcctaaatggattggaggcaaattaccgtaaattttgaaacagcctatatgtcagaaatgataatgttgccacctaaatgttttctgtcccccccaccctccccaggggaaatggtaggaaaatggtaagtttcttagggcaaagactgtgtcttctgtttcttttcatgcttaggatatggttctgtgcatagtaggtactcagtaaatgttcctagaatcataaaatcctcaacagatatgttactgagcatctgcttttcatgataagcactctatcagatccttgggatgcaaaggtaaataagacaaatcccttttacccaaagagctcaccatcaagttgggggagggaaagtggaattcaaaacatgttaataaatcatcatagtactgtgagataagtgcaattaagaagctagttataaagtataggggaaatagaggagtaatcatgtctgaaaagtcaggaaagtcttcctagaggtaatttttaagctgattgttttagaattagtagaagcttgccagatggaaaagtccaggcaaagtgtaacatgaatgggaaaggccacagtctagaaatggcagagtgtgttcctagtttgtttgtttgtttgtttgtacctgccttgttccaggaaggatttaatgtggtttatattccagtcctttaatgctggaagggctgagatgagactgaaagatgggcaggaagtatatcatcacaagctttgtgtttgatgttaatgtgtatgatttttatattatgggaaataagctcttagaggagtgatataatcaggtttgtgttttagaaatctgtgtaatgaatgaatgaagaaagaaattgaagaatcatgtaacatatgtgatcgcatttttgtaaaagaaccatgtgtgtttatatgtgtttatatatatacttgtgtatgcaaaggtaaaagtctgaaaggatatatgctaactgttcacaatgataaccccccaggaatgggattggaggggagggggcttctgtgtttgttatgtatgctgggtgggatattgtgcttttatttctatattgtttgaatttttttacagtatgtattatttttgtaataaaaattttaaaaaattccaaaagtag

SEQ ID NO: 438862 - DNA, 8215 bp, Homo sapiens
aagggagctcagtaagtcacttctgggcgactgttgttttatttccggtctatgggacccggctgcgatttgctgctgcggacagcagctaccatcactgctgccgccatcatgtcagacacggacagcgacgaagattccgctggaggcggcccattttctttagcgggtttccttttcggcaacatcaatggagccgggcagctggagggggaaagcgtcttggatgatgaatgtaagaagcacttggcaggcttgggggctttggggctgggcagcctgatcactgaactcacggcaaatgaagaattgaccgggactgacggtgccttggtaaatgatgaagggtgggttaggagtacagaagatgctgtggactattcagacatcaatgaggtggcagaagatgaaagccgaagataccagcagacgatggggagcttgcagcccctttgccactcagattatgatgaagatgactatgatgctgattgtgaagacattgattgcaagttgatgcctcctccacctccacccccgggaccaatgaagaaggataaggaccaggattctattactggtgtgtctgaaaatggagaaggcatcatcttgccctccatcattgccccttcctctttggcctcagagaaagtggacttcagtagttcctctgactcagaatctgagatgggacctcaggaagcaacacaggcagaatctgaagatggaaagctgacccttccattggctgggattatgcagcatgatgccaccaagctgttgccaagtgtcacagaactttttccagaatttcgacctggaaaggtgttacgttttctacgtctttttggaccagggaagaatgtcccatctgtttggcggagtgctcggagaaagaggaagaagaagcaccgtgagctgatacaggaagagcagatccaggaggtggagtgctcagtagaatcagaagtcagccagaagtctttgtggaactacgactacgctccaccaccacctccagagcagtgtctctctgatgatgaagtaggcaaaatagagacctgagattaaggcctatgagaggaacaaatgaattcaatgagttctccctaatttatgtctaaattgtaaataataccatagcagatagaatctgtgctaattttcaatgagtaatcatgggttcaatctcagtggctgccccttccctattgtaaaagaaaaatgtttggtggggtaggcggggatgagaggggtagatggtgatatgctgctgaataagaaggtttgattgataggtggaatgtgctatgatacatctccattgtttacattctaactccaggtaaatcatcctcagtttctctaagttcccctcctgactgttaactctctatagccttaggacatctgggatcaggaaattctccctgctctacttctttcttctgttacagatcacgatgatggctcctgtggagtccaaattttcccaatcaactggagatatagataaagtgacagataccaaaccaagagtggctgagtggcgttatgggcctgcccgactgtggtatgatatgctgggtgtccctgaagatggcagtgggtttgactatggcttcaaactgagaaagacagaacatgaacctgtgataaaatctagaatgatagaggaatttaggaaacttgaggaaaacaatggcactgatcttctggctgatgaaaacttcctgatggtgacacagctgcattgggaggatgatatcatctgggatggggaggatgtcaaacacaaagggacaaaacctcagcgtgcaagcctggcaggctggcttccttctagcatgactaggaatgcgatggcttacaatgttcagcaaggttttgcagccactcttgatgatgacaaaccttggtactccatttttcccattgacaatgaggatctggtatatggacgctgggaggacaatatcatttgggatgctcaggccatgccccggctgttggaacctcctgttttgacacttgatcccaatgatgagaacctcattttggaaattcctgatgagaaggaagaggccacctctaactccccctccaaggagagtaagaaggaatcatctctgaagaagagtcgaattctcttagggaaaacaggagtcatcaaggaggaaccacagcagaacatgtctcagccagaagtgaaagatccatggaatctctccaatgatgagtattattatcccaagcaacagggtcttcgaggcacctttggagggaatattatccagcattcaattcctgctgtggaattacggcagcccttctttcccacccacatggggcccatcaaactccggcagttccatcgcccacctctgaaaaagtactcatttggtgcactttctcagccaggtccccactcagtccaacctttgctaaagcacatcaaaaaaaaggccaagatgagagaacaagagaggcaagcttcaggtggtggagagatgttttttatgcgcacacctcaggacctcacaggcaaagatggtgatcttattcttgcagaatatagtgaggaaaatggacccttaatgatgcaggttggcatggcaaccaagataaagaactattataaacggaaacctggaaaagatcctggagcaccagattgtaaatatggggaaactgtttactgccatacatctcctttcctgggttctctccatcctggccaattgctgcaagcatttgagaacaacctttttcgtgctccaatttatcttcataagatgccagaaactgatttcttgatcattcggacaagacagggttactatattcgggaattagtggatatttttgtggttggccagcagtgtcccttgtttgaagttcctgggcctaactccaaaagggccaatacgcatattcgagactttctacaggtttttatttaccgccttttctggaaaagtaaagatcggccacggaggatacgaatggaagatataaaaaaagcctttccttcccattcagaaagcagcatccggaagaggctaaagctctgcgctgacttcaaacgcacagggatggactcaaactggtgggtgcttaagtctgattttcgtttaccaacggaagaagagatcagagctatggtgtcaccagagcagtgctgtgcttattatagcatgatagctgcagagcaacgactgaaggatgctggctatggtgagaaatccttttttgctccagaagaagaaaatgaggaagatttccagatgaagattgatgatgaagttcgcactgccccttggaacaccacaagggccttcattgctgccatgaagggcaagtgtctgctagaggtgactggggtggcagatcccacggggtgtggtgaaggattctcctatgtgaagattccaaacaaaccaacacagcagaaggatgataaagaaccgcagccagtgaagaagacagtgacaggaacagatgcagaccttcgtcgcctttccctgaaaaatgccaagcaacttctacgtaaatttggtgtgcctgaggaagagattaaaaagttgtcccgctgggaagtgattgatgtggtgcgcacaatgtcaacagaacaggctcgttctggagaggggcccatgagtaaatttgcccgtggatcaaggttttctgtggctgagcatcaagagcgttacaaagaggaatgtcagcgcatctttgacctacagaacaaggttctgtcatcaactgaagtcttatcaactgacacagacagcagctcagctgaagatagtgactttgaagaaatgggaaagaacattgagaacatgttgcagaacaagaaaaccagctctcagctttcacgtgaacgggaggaacaggagcggaaggaactacagcgaatgctactggcagcaggctcagcagcatccggaaacaatcacagagatgatgacacagcttccgtgactagccttaactcttctgccactggacgctgtctcaagatttatcgcacgtttcgagatgaagaggggaaagagtatgttcgctgtgagacagtccgaaaaccagctgtcattgatgcctatgtgcgcatacggactacaaaagatgaggaattcattcgaaaatttgccctttttgatgaacaacatcgggaagagatgcgaaaagaacggcggaggattcaagagcaactgaggcggcttaagaggaaccaggaaaaggagaagcttaagggtcctcctgagaagaagcccaagaaaatgaaggagcgtcctgacctaaaactgaaatgtggggcatgtggtgccattggacacatgaggactaacaaattctgccccctctattatcaaacaaatgcgccaccttccaaccctgttgccatgacagaagaacaggaggaggagttggaaaagacagtcattcataatgataatgaagaacttatcaaggttgaagggaccaaaattgtcttggggaaacagctaattgagagtgcggatgaggttcgcagaaaatctctggttctcaagtttcctaaacagcagcttcctccaaagaagaaacggcgagttggaaccactgttcactgtgactatttgaatagacctcataagtccatccaccggcgccgcacagaccctatggtgacgctgtcgtccatcttggagtctatcatcaatgacatgagagatcttccaaatacataccctttccacactccagtcaatgcaaaggttgtaaaggactactacaaaatcatcactcggccaatggacctacaaacactccgcgaaaacgtgcgtaaacgcctctacccatctcgggaagagttcagagagcatctggagctaattgtgaaaaatagtgcaacctacaatgggccaaaacactcattgactcagatctctcaatccatgctggatctctgtgatgaaaaactcaaagagaaagaagacaaattagctcgcttagagaaagctatcaaccccttgctggatgatgatgaccaagtggcgttttctttcattctggacaacattgtcacccagaaaatgatggcagttccagattcttggccatttcatcacccagttaataagaaatttgttccagattattacaaagtgattgtcaatccaatggatttagagaccatacgtaagaacatctccaagcacaagtatcagagtcgggagagctttctggatgatgtaaaccttattctggccaacagtgttaagtataatggacctgagagtcagtatactaagactgcccaggagattgtgaacgtctgttaccagacattgactgagtatgatgaacatttgactcaacttgagaaggatatttgtactgctaaagaagcagctttggaggaagcagaattagaaagcctggacccaatgaccccagggccctacacgcctcagcctcctgatttgtatgataccaacacatccctcagtatgtctcgagatgcctctgtatttcaagatgagagcaatatgtctgtcttggatattcccagtgccactccagaaaagcaggtaacacagatgcgccagggccgaggtaggctgggcgaggaagactctgatgtagatattgaagggtatgatgatgaggaggaggatgggaaacctaagactccagccccagaaggtgaagatggagatggtgatcttgcagatgaagaggaaggaactgtacaacagcctcaagccagtgtcctgtatgaggatttgcttatgtctgaaggagaagatgatgaggaagatgctgggagtgatgaagaaggagacaatcctttctctgctatccagctgagtgaaagtggaagtgactctgatgtgggatctggtggaataagacccaaacaaccccgcatgcttcaggagaacacaaggatggacatggaaaatgaagaaagcatgatgtcctatgagggagacggtggggaggcttcccatggtttggaggatagcaacatcagttatgggagctatgaggagcctgatcccaagtcgaacacccaagacacaagcttcagcagcatcggtgggtatgaggtatcagaggaggaagaagatgaggaggaggaagagcagcgctctgggccgagcgtactaagccaggtccacctgtcagaggacgaggaggacagtgaggatttccactccattgctggggacagtgacttggactctgatgaatgaggcttcctttgggcctccttggtcagccttccctgttctccagcctaggtggttcacctttccccaatttgttcatatttgtacagtatctgatcctgaaatcatgaaattaactaacaccttagcctttttaaaagtagtaagtaaatgataataaatcacctctcctaatcttcctggggcaatgtcaccctttgatttaaaacaaagcaaccccctttcccctaccactacggaaaagagcaagctcatttttccgtgtcctcctttatttaactccatttattgcttttggtataatttttccctggggaaggaggggaaattatgaaagaactagtaactttatgtcctcttgatgtattaggaaatttccggccaggcgtggtggctcacacctgtaatctcagcactctgggaggccgaggcgggcagatcacctgaggtcagaagttcgagaccagcttggccaacatggcgaaaccgcatctctactaaaaatacaaaaattagccaggtgtggtggcgtatgcctgttaatcctagctactcgggaggctgaggcaggagaattacttgaacccgggaggcagaggttgcagtgagtggaggtcacgccactgcactccagcctgggcgaaagagtgagattcagtctcaaaaaaaaaaaaaatttccaagcatggtatcatctcacttttctaatttacaggctggagcagatgagagccctcctgctgggacagagaattgggttctagtggactctgtgctacacttaaacctgtgagacaaaccgcccattattttattatttaattatgcaatgcctagttcctaaatggattggaggcaaattaccgtaaattttgaaacagcctatatgtcagaaatgataatgttgccacctaaatgttttctgtcccccccaccctccccaggggaaatggtaggaaaatggtaagtttcttagggcaaagactgtgtcttctgtttcttttcatgcttaggatatggttctgtgcatagtaggtactcagtaaatgttcctagaatcataaaatcctcaacagatatgttactgagcatctgcttttcatgataagcactctatcagatccttgggatgcaaaggtaaataagacaaatcccttttacccaaagagctcaccatcaagttgggggagggaaagtggaattcaaaacatgttaataaatcatcatagtactgtgagataagtgcaattaagaagctagttataaagtataggggaaatagaggagtaatcatgtctgaaaagtcaggaaagtcttcctagaggtaatttttaagctgattgttttagaattagtagaagcttgccagatggaaaagtccaggcaaagtgtaacatgaatgggaaaggccacagtctagaaatggcagagtgtgttcctagtttgtttgtttgtttgtttgtacctgccttgttccaggaaggatttaatgtggtttatattccagtcctttaatgctggaagggctgagatgagactgaaagatgggcaggaagtatatcatcacaagctttgtgtttgatgttaatgtgtatgatttttatattatgggaaataagctcttagaggagtgatataatcaggtttgtgttttagaaatctgtgtaatgaatgaatgaagaaagaaattgaagaatcatgtaacatatgtgatcgcatttttgtaaaagaaccatgtgtgtttatatgtgtttatatatatacttgtgtatgcaaaggtaaaagtctgaaaggatatatgctaactgttcacaatgataaccccccaggaatgggattggaggggagggggcttctgtgtttgttatgtatgctgggtgggatattgtgcttttatttctatattgtttgaatttttttacagtatgtattatttttgtaataaaaattttaaaaaattccaaaagtag

SEQ ID NO: 438863 - DNA, 5032 bp, Homo sapiens
aagggagctcagtaagtcacttctgggcgactgttgttttatttccggtctatgggacccggctgcgatttgctgctgcggacagcagctaccatcactgctgccgccatcatgtcagacacggacagcgacgaagattccgctggaggcggcccattttctttagcgggtttccttttcggcaacatcaatggagccgggcagctggagggggaaagcgtcttggatgatgaatgtaagaagcacttggcaggcttgggggctttggggctgggcagcctgatcactgaactcacggcaaatgaagaattgaccgggactgacggtgccttggtaaatgatgaagggtgggttaggagtacagaagatgctgtggactattcagacatcaatgaggtggcagaagatgaaagccgaagataccagcagacgatggggagcttgcagcccctttgccactcagattatgatgaagatgactatgatgctgattgtgaagacattgattgcaagttgatgcctcctccacctccacccccgggaccaatgaagaaggataaggaccaggattctattactggtgtgtctgaaaatggagaaggcatcatcttgccctccatcattgccccttcctctttggcctcagagaaagtggacttcagtagttcctctgactcagaatctgagatgggacctcaggaagcaacacaggcagaatctgaagatggaaagctgacccttccattggctgggattatgcagcatgatgccaccaagctgttgccaagtgtcacagaactttttccagaatttcgacctggaaaggtgttacgttttctacgtctttttggaccagggaagaatgtcccatctgtttggcggagtgctcggagaaagaggaagaagaagcaccgtgagctgatacaggaagagcagatccaggaggtggagtgctcagtagaatcagaagtcagccagaagtctttgtggaactacgactacgctccaccaccacctccagagcagtgtctctctgatgatgaagtaggcaaaatagagacctgagattaaggcctatgagaggaacaaatgaattcaatgagttctccctaatttatgtctaaattgtaaataataccatagcagatagaatctgtgctaattttcaatgagtaatcatgggttcaatctcagtggctgccccttccctattgtaaaagaaaaatgtttggtggggtaggcggggatgagaggggtagatggtgatatgctgctgaataagaaggtttgattgataggtggaatgtgctatgatacatctccattgtttacattctaactccaggtaaatcatcctcagtttctctaagttcccctcctgactgttaactctctatagccttaggacatctgggatcaggaaattctccctgctctacttctttcttctgttacagatcacgatgatggctcctgtggagtccaaattttcccaatcaactggagatatagataaagtgacagataccaaaccaagagtggctgagtggcgttatgggcctgcccgactgtggtatgatatgctgggtgtccctgaagatggcagtgggtttgactatggcttcaaactgagaaagacagaacatgaacctgtgataaaatctagaatgatagaggaatttaggaaacttgaggaaaacaatggcactgatcttctggctgatgaaaacttcctgatggtgacacagctgcattgggaggatgatatcatctgggatggggaggatgtcaaacacaaagggacaaaacctcagcgtgcaagcctggcaggctggcttccttctagcatgactaggaatgcgatggcttacaatgttcagcaaggttttgcagccactcttgatgatgacaaaccttggtactccatttttcccattgacaatgaggatctggtatatggacgctgggaggacaatatcatttgggatgctcaggccatgccccggctgttggaacctcctgttttgacacttgatcccaatgatgagaacctcattttggaaattcctgatgagaaggaagaggccacctctaactccccctccaaggagagtaagaaggaatcatctctgaagaagagtcgaattctcttagggaaaacaggagtcatcaaggaggaaccacagcagaacatgtctcagccagaagtgaaagatccatggaatctctccaatgatgagtattattatcccaagcaacagggtcttcgaggcacctttggagggaatattatccagcattcaattcctgctgtggaattacggcagcccttctttcccacccacatggggcccatcaaactccggcagttccatcgcccacctctgaaaaagtactcatttggtgcactttctcagccaggtccccactcagtccaacctttgctaaagcacatcaaaaaaaaggccaagatgagagaacaagagaggcaagcttcaggtggtggagagatgttttttatgcgcacacctcaggacctcacaggcaaagatggtgatcttattcttgcagaatatagtgaggaaaatggacccttaatgatgcaggttggcatggcaaccaagataaagaactattataaacggaaacctggaaaagatcctggagcaccagattgtaaatatggggaaactgtttactgccatacatctcctttcctgggttctctccatcctggccaattgctgcaagcatttgagaacaacctttttcgtgctccaatttatcttcataagatgccagaaactgatttcttgatcattcggacaagacagggttactatattcgggaattagtggatatttttgtggttggccagcagtgtcccttgtttgaagttcctgggcctaactccaaaagggccaatacgcatattcgagactttctacaggtttttatttaccgccttttctggaaaagtaaagatcggccacggaggatacgaatggaagatataaaaaaagcctttccttcccattcagaaagcagcatccggaagaggctaaagctctgcgctgacttcaaacgcacagggatggactcaaactggtgggtgcttaagtctgattttcgtttaccaacggaagaagagatcagagctatggtgtcaccagagcagtgctgtgcttattatagcatgatagctgcagagcaacgactgaaggatgctggctatggtgagaaatccttttttgctccagaagaagaaaatgaggaagatttccagatgaagattgatgatgaagttcgcactgccccttggaacaccacaagggccttcattgctgccatgaagggcaagtgtctgctagaggtgactggggtggcagatcccacggggtgtggtgaaggattctcctatgtgaagattccaaacaaaccaacacagcagaaggatgataaagaaccgcagccagtgaagaagacagtgacaggaacagatgcagaccttcgtcgcctttccctgaaaaatgccaagcaacttctacgtaaatttggtgtgcctgaggaagagattaaaaagttgtcccgctgggaagtgattgatgtggtgcgcacaatgtcaacagaacaggctcgttctggagaggggcccatgagtaaatttgcccgtggatcaaggttttctgtggctgagcatcaagagcgttacaaagaggaatgtcagcgcatctttgacctacagaacaaggttctgtcatcaactgaagtcttatcaactgacacagacagcagctcagctgaagatagtgactttgaagaaatgggaaagaacattgagaacatgttgcagaacaagaaaaccagctctcagctttcacgtgaacgggaggaacaggagcggaaggaactacagcgaatgctactggcagcaggctcagcagcatccggaaacaatcacagagatgatgacacagcttccgtgactagccttaactcttctgccactggacgctgtctcaagatttatcgcacgtttcgagatgaagaggggaaagagtatgttcgctgtgagacagtccgaaaaccagctgtcattgatgcctatgtgcgcatacggactacaaaagatgaggaattcattcgaaaatttgccctttttgatgaacaacatcgggaagagatgcgaaaagaacggcggaggattcaagagcaactgaggcggcttaagaggaaccaggaaaaggagaagcttaagggtcctcctgagaagaagcccaagaaaatgaaggagcgtcctgacctaaaactgaaatgtggggcatgtggtgccattggacacatgaggactaacaaattctgccccctctattatcaaacaaatgcgccaccttccaaccctgttgccatgacagaagaacaggaggaggagttggaaaagacagtcattcataatgataatgaagaacttatcaaggttgaagggaccaaaattgtcttggggaaacagctaattgagagtgcggatgaggttcgcagaaaatctctggttctcaagtttcctaaacagcagcttcctccaaagaagaaacggcgagttggaaccactgttcactgtgactatttgaatagacctcataagtccatccaccggcgccgcacagaccctatggtgacgctgtcgtccatcttggagtctatcatcaatgacatgagagatcttccaaatacataccctttccacactccagtcaatgcaaaggttgtaaaggactactacaaaatcatcactcggccaatggacctacaaacactccgcgaaaacgtgcgtaaacgcctctacccatctcgggaagagttcagagagcatctggagctaattgtgaaaaatagtgcaacctacaatggaataggcataaggatcaaacacacaaggtcgatagaaaaggggcacagtcatcaccaccttcctcgagaatagccttctttgactttcctgatctggataaatgtatttcccctctgaattcc

SEQ ID NO: 438864 - DNA, 2792 bp, Homo sapiens
aagggagctcagtaagtcacttctgggcgactgttgttttatttccggtctatgggacccggctgcgatttgctgctgcggacagcagctaccatcactgctgccgccatcatgtcagacacggacagcgacgaagattccgctggaggcggcccattttctttagcgggtttccttttcggcaacatcaatggagccgggcagctggagggggaaagcgtcttggatgatgaatgtaagaagcacttggcaggcttgggggctttggggctgggcagcctgatcactgaactcacggcaaatgaagaattgaccgggactgacggtgccttggtaaatgatgaagggtgggttaggagtacagaagatgctgtggactattcagacatcaatgaggtggcagaagatgaaagccgaagataccagcagacgatggggagcttgcagcccctttgccactcagattatgatgaagatgactatgatgctgattgtgaagacattgattgcaagttgatgcctcctccacctccacccccgggaccaatgaagaaggataaggaccaggattctattactggtgtgtctgaaaatggagaaggcatcatcttgccctccatcattgccccttcctctttggcctcagagaaagtggacttcagtagttcctctgactcagaatctgagatgggacctcaggaagcaacacaggcagaatctgaagatggaaagctgacccttccattggctgggattatgcagcatgatgccaccaagctgttgccaagtgtcacagaactttttccagaatttcgacctggaaaggtgttacgttttctacgtctttttggaccagggaagaatgtcccatctgtttggcggagtgctcggagaaagaggaagaagaagcaccgtgagctgatacaggaagagcagatccaggaggtggagtgctcagtagaatcagaagtcagccagaagtctttgtggaactacgactacgctccaccaccacctccagagcagtgtctctctgatgatgaagtaggcaaaatagagacctgagattaaggcctatgagaggaacaaatgaattcaatgagttctccctaatttatgtctaaattgtaaataataccatagcagatagaatctgtgctaattttcaatgagtaatcatgggttcaatctcagtggctgccccttccctattgtaaaagaaaaatgtttggtggggtaggcggggatgagaggggtagatggtgatatgctgctgaataagaaggtttgattgataggtggaatgtgctatgatacatctccattgtttacattctaactccaggtaaatcatcctcagtttctctaagttcccctcctgactgttaactctctatagccttaggacatctgggatcaggaaattctccctgctctacttctttcttctgttacagatcacgatgatggctcctgtggagtccaaattttcccaatcaactggagatatagataaagtgacagataccaaaccaagagtggctgagtggcgttatgggcctgcccgactgtggtatgatatgctgggtgtccctgaagatggcagtgggtttgactatggcttcaaactgagaaagacagaacatgaacctgtgataaaatctagaatgatagaggaatttaggaaacttgaggaaaacaatggcactgatcttctggctgatgaaaacttcctgatggtgacacagctgcattgggaggatgatatcatctgggatggggaggatgtcaaacacaaagggacaaaacctcagcgtgcaagcctggcaggctggcttccttctagcatgactaggaatgcgatggcttacaatgttcagcaaggttttgcagccactcttgatgatgacaaaccttggtactccatttttcccattgacaatgaggatctggtatatggacgctgggaggacaatatcatttgggatgctcaggccatgccccggctgttggaacctcctgttttgacacttgatcccaatgatgagaacctcattttggaaattcctgatgagaaggaagaggccacctctaactccccctccaaggagagtaagaaggaatcatctctgaagaagagtcgaattctcttagggaaaacaggagtcatcaaggaggaaccacagcagaacatgtctcagccagaagtgaaagatccatggaatctctccaatgatgagtattattatcccaagcaacagggtcttcgaggcacctttggagggaatattatccagcattcaattcctgctgtggaattacggcagcccttctttcccacccacatggggcccatcaaactccggcagttccatcgcccacctctgaaaaagtactcatttggtgcactttctcagccaggtccccactcagtccaacctttgctaaagcacatcaaaaaaaaggccaagatgagagaacaagagaggcaagcttcaggtggtggagagatgttttttatgcgcacacctcaggacctcacaggcaaagatggtgatcttattcttgcagaatatagtgaggaaaatggacccttaatgatgcaggttggcatggcaaccaagataaagaactattataaacggaaacctggatactctggagaatacaaatctgtgaggaataatgagttgattaatgtcgactttcccaatccagattcacccactaccataagcgtgaattcaaaacctctcttcaccgattttctgtatacttgatttgggagattg

SEQ ID NO: 438865 - DNA, 447 bp, Homo sapiens
cagggtattcactgaccatcagccggttctttttccatctaggaataggcataaggatcaaacacacaaggtcgatagaaaaggggcacagtcatcaccaccttcctcgagaatagccttctttgactttcctgatctggataaatgtatttcccctctgaattcctacaacaattactgtctgtgcaactcattttcccagcttcctctaggtatcatccagtgtccaacacctctgctcaaagtgactgcttccagaacaacagtgcaacttaggcagttgctgaaccagagtaaaactcttagggacaggccgggcacggtggctcacgcctgtaatcccagcagtttgggaagctgaggagggcagatcacttgaagtcaggagttcaagaccagcctggccaacactccaacctgagtgacagagccagaccctgtctcaaa

SEQ ID NO: 438866 - DNA, 2489 bp, Homo sapiens
  misc_feature (64)..(64): n is a, c, g, or t
  misc_feature (67)..(67): n is a, c, g, or t
acgcgtggctcggcggactcggggtatcagctgtctggctccctacgtggctggggcacgtcancgncgaatggcagcctccagaaagccaccgcgagtaagggtgaatcaccaggattttcaactgagaaatttaagaataattgaacctaacgaggtgacacactcaggagacacaggtgtggaaacagacggcagaatgcctccaaaggtgacttcagagctgcttcggcagctgagacaagccatgaggaactctgagtatgtgaccgaaccgatccaggcctacatcatcccatcgggagatgctcatcagagtgagtatattgctccatgtgactgtcggcgggcttttgtctctggattcgatggctctgcgggcacagccatcatcacagaagagcatgcagccatgtggactgacgggcgctactttctccaggctgccaagcaaatggacagcaactggacacttatgaagatgggtctgaaggacacaccaactcaggaagactggctggtgagtgtgcttcctgaaggatccagggttggtgtggaccccttgatcattcctacagattattggaagaaaatggccaaagttctgagaagtgccggccatcacctcattcctgtcaaggagaacctcgttgacaaaatctggacagaccgtcctgagcgcccttgcaagcctctcctcacactgggcctggattacacaggcatctcctggaaggacaaggttgcagaccttcggttgaaaatggctgagaggaacgtcatgtggtttgtggtcactgccttggatgagattgcgtggctatttaatctccgaggatcagatgtggagcacaatccagtatttttctcctacgcaatcataggactagagacgatcatgctcttcattgatggtgaccgcatagacgcccccagtgtgaaggagcacctgcttcttgacttgggtctggaagccgaatacaggatccaggtgcatccctacaagtccatcctgagcgagctcaaggccctgtgtgctgacctctccccaagggagaaggtgtgggtcagtgacaaggccagctatgctgtgagcgagaccatccccaaggaccaccgctgctgtatgccttacacccccatctgcatcgccaaagctgtgaagaattcagctgagtcagaaggcatgaggcgggctcacattaaagatgctgttgctctctgtgaactctttaactggctggagaaagaggttcccaaaggtggtgtgacagagatctcagctgctgacaaagctgaggagtttcgcaggcaacaggcagactttgtggacctgagcttcccaacaatttccagtacgggacccaacggcgccatcattcactacgcgccagtccctgagacgaataggaccttgtccctggatgaggtgtaccttattgactcgggtgctcaatacaaggatggcaccacagatgtgacgcggacaatgcattttgggacccctacagcctacgagaaggaatgcttcacatatgtcctcaagggccacatagctgtgagtgcagccgttttcccgactggaaccaaaggtcaccttcttgactcctttgcccgttcagctttatgggattcaggcctagattacttgcacgggactggacatggtgttgggtcttttttgaatgtccatgagggtccttgcggcatcagttacaaaacattctctgatgagcccttggaggcaggcatgattgtcactgatgagcccgggtactatgaagatggggcttttggaattcgcattgagaatgttgtccttgtggttcctgtgaagaccaagtataattttaataaccggggaagcctgacctttgaacctctaacattggttccaattcagaccaaaatgatagatgtggattctcttacagacaaagagtgcgactggctcaacaattaccacctgacctgcagggatgtgattgggaaggaattgcagaaacagggccgccaggaagctctcgagtggctcatcagagagacgcaacccatctccaaacagcattaataaatacctccccggttttgtttttgtaaaatgctctggaggaaggaagaaacgtggcagatccctgacatctttcccctttcctttccttcttccctacctcccctttttactttagactttaagaagaacagaaaatcttcttatcctctttgatattttattgcaaacactcagtcttttatgattttttaattgttgagaacaagccaagaataaaattgctgcaccagaaggagggtccctccaaagttgaacacttggtgaaaggaagatgccccgacttctttggccagtgatggggaatcagtgagtgctccatgatggtcatgttccaggtgctagtacatcattcatgatcaccttaatgctcatgagactatatttatgatcagtgaataaaaatgtcagaactgtg

SEQ ID NO: 438867 - DNA, 639 bp, Homo sapiens
ctctcgcgactccttcgcgccggcccttccgcgggtgatcagctggtctgcgctcccctgacgtgggctggggcacgtcaccgccgaatggcagcctccagaaagccaccgcgagtaagggtgaatcaccaggattttcaactgagaaatttaagaataattgaacctaacgaggtgacacactcaggagacacaggtgtggaaacagacggcagaatgcctccaaaggtgacttcagagctgcttcggcagctgagacaagccatgaggaactctgagtatgtgaccgaaccgatccaggcctacatcatcccatcgggagatgctcatcagagtgagtatattgctccatgtgactgtcggcgggcttttgtctctggattcgatggctctgcgggcacagccatcatcacagaagagcatgcagccatgtggactgacgggcgctactttctccaggctgccaagcaaatggacagcaactggacacttatgaagatgggtgggtacaggcatggctagcccaaacttagttggcctgatctgggcagggatcctagaggtcctcaggactcctggatcttaatccttttatgcagtcatggacccttttgagaatccaaggaaaactgagaaaaa

SEQ ID NO: 438868 - DNA, 2506 bp, Homo sapiens
ctctcgcgactccttcgcgccggcccttccgcgggtgatcagctggtctgcgctcccctgacgtgggctggggcacgtcaccgccgaatggcagcctccagaaagccaccgcgagtaagggtgaatcaccaggattttcaactgagaaatttaagaataattgaacctaacgaggtgacacactcaggagacacaggtgtggaaacagacggcagaatgcctccaaaggtgacttcagagctgcttcggcagctgagacaagccatgaggaactctgagtatgtgaccgaaccgatccaggcctacatcatcccatcgggagatgctcatcagagtgagtatattgctccatgtgactgtcggcgggcttttgtctctggattcgatggctctgcgggcacagccatcatcacagaagagcatgcagccatgtggactgacgggcgctactttctccaggctgccaagcaaatggacagcaactggacacttatgaagatgggtctgaaggacacaccaactcaggaagactggctggtgagtgtgcttcctgaaggatccagggttggtgtggaccccttgatcattcctacagattattggaagaaaatggccaaagttctgagaagtgccggccatcacctcattcctgtcaaggagaacctcgttgacaaaatctggacagaccgtcctgagcgcccttgcaagcctctcctcacactgggcctggattacacaggcatctcctggaaggacaaggttgcagaccttcggttgaaaatggctgagaggaacgtcatgtggtttgtggtcactgccttggatgagattgcgtggctatttaatctccgaggatcagatgtggagcacaatccagtatttttctcctacgcaatcataggactagagacgatcatgctcttcattgatggtgaccgcatagacgcccccagtgtgaaggagcacctgcttcttgacttgggtctggaagccgaatacaggatccaggtgcatccctacaagtccatcctgagcgagctcaaggccctgtgtgctgacctctccccaagggagaaggtgtgggtcagtgacaaggccagctatgctgtgagcgagaccatccccaaggaccaccgctgctgtatgccttacacccccatctgcatcgccaaagctgtgaagaattcagctgagtcagaaggcatgaggcgggctcacattaaagatgctgttgctctctgtgaactctttaactggctggagaaagaggttcccaaaggtggtgtgacagagatctcagctgctgacaaagctgaggagtttcgcaggcaacaggcagactttgtggacctgagcttcccaacaatttccagtacgggacccaacggcgccatcattcactacgcgccagtccctgagacgaataggaccttgtccctggatgaggtgtaccttattgactcgggtgctcaatacaaggatggcaccacagatgtgacgcggacaatgcattttgggacccctacagcctacgagaaggaatgcttcacatatgtcctcaagggccacatagctgtgagtgcagccgttttcccgactggaaccaaaggtcaccttcttgactcctttgcccgttcagctttatgggattcaggcctagattacttgcacgggactggacatggtgttgggtcttttttgaatgtccatgagggtccttgcggcatcagttacaaaacattctctgatgagcccttggaggcaggcatgattgtcactgatgagcccgggtactatgaagatggggcttttggaattcgcattgagaatgttgtccttgtggttcctgtgaagaccaagtataattttaataaccggggaagcctgacctttgaacctctaacattggttccaattcagaccaaaatgatagatgtggattctcttacagacaaagagtgcgactggctcaacaattaccacctgacctgcagggatgtgattgggaaggaattgcagaaacagggccgccaggaagctctcgagtggctcatcagagagacgcaacccatctccaaacagcattaataaatacctccccggttttgtttttgtaaaatgctctggaggaaggaagaaacgtggcagatccctgacatctttcccctttcctttccttcttccctacctcccctttttactttagactttaagaagaacagaaaatcttcttatcctctttgatattttattgcaaacactcagtcttttatgattttttaattgttgagaacaagccaagaataaaattgctgcaccagaaggagggtccctccaaagttgaacacttggtgaaaggaagatgccccgacttctttggccagtgatggggaatcagtgagtgctccatgatggtcatgttccaggtgctagtacatcattcatgatcaccttaatgctcatgagactatatttatgatcagtgaataaaaatgtcagaactgtg

SEQ ID NO: 438869 - DNA, 2442 bp, Homo sapiens
ccccgcacacctgcagctaacgccccctcgcccacgcaaagccaccgcgagtaagggtgaatcaccaggattttcaactgagaaatttaagaataattgaacctaacgaggtgacacactcaggagacacaggtgtggaaacagacggcagaatgcctccaaaggtgacttcagagctgcttcggcagctgagacaagccatgaggaactctgagtatgtgaccgaaccgatccaggcctacatcatcccatcgggagatgctcatcagagtgagtatattgctccatgtgactgtcggcgggcttttgtctctggattcgatggctctgcgggcacagccatcatcacagaagagcatgcagccatgtggactgacgggcgctactttctccaggctgccaagcaaatggacagcaactggacacttatgaagatgggtctgaaggacacaccaactcaggaagactggctggtgagtgtgcttcctgaaggatccagggttggtgtggaccccttgatcattcctacagattattggaagaaaatggccaaagttctgagaagtgccggccatcacctcattcctgtcaaggagaacctcgttgacaaaatctggacagaccgtcctgagcgcccttgcaagcctctcctcacactgggcctggattacacaggcatctcctggaaggacaaggttgcagaccttcggttgaaaatggctgagaggaacgtcatgtggtttgtggtcactgccttggatgagattgcgtggctatttaatctccgaggatcagatgtggagcacaatccagtatttttctcctacgcaatcataggactagagacgatcatgctcttcattgatggtgaccgcatagacgcccccagtgtgaaggagcacctgcttcttgacttgggtctggaagccgaatacaggatccaggtgcatccctacaagtccatcctgagcgagctcaaggccctgtgtgctgacctctccccaagggagaaggtgtgggtcagtgacaaggccagctatgctgtgagcgagaccatccccaaggaccaccgctgctgtatgccttacacccccatctgcatcgccaaagctgtgaagaattcagctgagtcagaaggcatgaggcgggctcacattaaagatgctgttgctctctgtgaactctttaactggctggagaaagaggttcccaaaggtggtgtgacagagatctcagctgctgacaaagctgaggagtttcgcaggcaacaggcagactttgtggacctgagcttcccaacaatttccagtacgggacccaacggcgccatcattcactacgcgccagtccctgagacgaataggaccttgtccctggatgaggtgtaccttattgactcgggtgctcaatacaaggatggcaccacagatgtgacgcggacaatgcattttgggacccctacagcctacgagaaggaatgcttcacatatgtcctcaagggccacatagctgtgagtgcagccgttttcccgactggaaccaaaggtcaccttcttgactcctttgcccgttcagctttatgggattcaggcctagattacttgcacgggactggacatggtgttgggtcttttttgaatgtccatgagggtccttgcggcatcagttacaaaacattctctgatgagcccttggaggcaggcatgattgtcactgatgagcccgggtactatgaagatggggcttttggaattcgcattgagaatgttgtccttgtggttcctgtgaagaccaagtataattttaataaccggggaagcctgacctttgaacctctaacattggttccaattcagaccaaaatgatagatgtggattctcttacagacaaagagtgcgactggctcaacaattaccacctgacctgcagggatgtgattgggaaggaattgcagaaacagggccgccaggaagctctcgagtggctcatcagagagacgcaacccatctccaaacagcattaataaatacctccccggttttgtttttgtaaaatgctctggaggaaggaagaaacgtggcagatccctgacatctttcccctttcctttccttcttccctacctcccctttttactttagactttaagaagaacagaaaatcttcttatcctctttgatattttattgcaaacactcagtcttttatgattttttaattgttgagaacaagccaagaataaaattgctgcaccagaaggagggtccctccaaagttgaacacttggtgaaaggaagatgccccgacttctttggccagtgatggggaatcagtgagtgctccatgatggtcatgttccaggtgctagtacatcattcatgatcaccttaatgctcatgagactatatttatgatcagtgaataaaaatgtcagaactgtg

SEQ ID NO: 438870 - DNA, 3367 bp, Homo sapiens
ctctcgcgactccttcgcgccggcccttccgcgggtgatcagctggtctgcgctcccctgacgtgggctggggcacgtcaccgccgaatggcagcctccagaaagccaccgcgagtaagggtgaatcaccaggattttcaactgagaaatttaagaataattgaacctaacgaggtgacacactcaggagacacaggtgtggaaacagacggcagaatgcctccaaaggtgacttcagagctgcttcggcagctgagacaagccatgaggaactctgagtatgtgaccgaaccgatccaggcctacatcatcccatcgggagatgctcatcagagtgagtatattgctccatgtgactgtcggcgggcttttgtctctggattcgatggctctgcgggcacagccatcatcacagaagagcatgcagccatgtggactgacgggcgctactttctccaggctgccaagcaaatggacagcaactggacacttatgaagatgggtctgaaggacacaccaactcaggaagactggctggtgagtgtgcttcctgaaggatccagggttggtgtggaccccttgatcattcctacagattattggaagaaaatggccaaagttctgagaagtgccggccatcacctcattcctgtcaaggagaacctcgttgacaaaatctggacagaccgtcctgagcgcccttgcaagcctctcctcacactgggcctggattacacaggcatctcctggaaggacaaggttgcagaccttcggttgaaaatggctgagaggaacgtcatgtggtttgtggtcactgccttggatgagattgcgtggctatttaatctccgaggatcagatgtggagcacaatccagtatttttctcctacgcaatcataggactagagacgatcatgctcttcattgatggtgaccgcatagacgcccccagtgtgaaggagcacctgcttcttgacttgggtctggaagccgaatacaggatccaggtgcatccctacaagtccatcctgagcgagctcaaggccctgtgtgctgacctctccccaagggagaaggtgtgggtcagtgacaaggccagctatgctgtgagcgagaccatccccaaggaccaccgctgctgtatgccttacacccccatctgcatcgccaaagctgtgaagaattcagctgagtcagaaggcatgaggcgggctcacattaaagatgctgttgctctctgtgaactctttaactggctggagaaagaggttcccaaaggtggtgtgacagagatctcagctgctgacaaagctgaggagtttcgcaggcaacaggcagactttgtggacctgagcttcccaacaatttccagtacgggacccaacggcgccatcattcactacgcgccagtccctgagacgaataggaccttgtccctggatgaggtgtaccttattgactcgggtgctcaatacaaggatggcaccacagatgtgacgcggacaatgcattttgggacccctacagcctacgagaaggaatgcttcacatatgtcctcaagggccacatagctgtgagtgcagccgttttcccgactggaaccaaaggtcaccttcttgactcctttgcccgttcagctttatgggattcaggcctagattacttgcacgggactggacatggtgttgggtcttttttgaatgtccatgagggtccttgcggcatcagttacaaaacattctctgatgagcccttggaggcaggcatgattgtcactgatgagcccgggtactatgaagatggggcttttggaattcgcattgagaatgttgtccttgtggttcctgtgaagaccaagtataattttaataaccggggaagcctgacctttgaacctctaacattggttccaattcagaccaaaatgatagatgtggattctcttacagacaaagagtgcgactggctcaacaattaccacctgacctgcagggatgtgattgggaaggaattgcagaaacagggccgccaggaagctctcgagtggctcatcagagagacgcaacccatctccaaacagcattaataaatacctccccggttttgtttttgtaaaatgctctggaggaaggaagaaacgtggcagatccctgacatctttcccctttcctttccttcttccctacctcccctttttactttagactttaagaagaacagaaaatcttcttatcctctttgatattttattgcaaacactcagtcttttatgattttttaattgttgagaacaagccaagaataaaattgctgcaccagaaggagggtccctccaaagttgaacacttggtgaaaggaagatgccccgacttctttggccagtgatggggaatcagtgagtgctccatgatggtcatgttccaggtgctagtacatcattcatgatcaccttaatgctcatgagactatatttatgatcagtgaataaaaatgtcagaactgtgaaaaaaaaaaaaaaaaaaaaaaaaaaaaaaaaaaaaaaaaaaaaagggggggggggggaaaaaaaaaccccgaaggggggagcccaaaaaaagagcgagcacccgagattatgctgggaaaaaggggggcccaaaaggggagagggagaaaaaaaaagaaacgagcgaagggggcgagggagacaaaaagggggaggagggaggaaaaacaggggacaagggaggaaatcttggggaaagaggcaccaaaaccggggggggggagacaaagggggacaacacacacaacaggaaaatacaaccgcccaggggacaaacaacaaaattagcacacaggcgacacaagcgcggagaaacaaaaaaaggcaacaacgcaaccacccaaacaaaaaatagcgcaaacaagaaaaaacaaagagacaaaaaaaaacccagggcacagagagtataacaaacccacacagcacagacagacaccgcacaccgagccagacagacccgcgccaaccacgaacacacacgaggcgagacgacagagcaagagcacgcaccacggacaccacagaacagcagcacgcacgagcggaccgcaccggaccacgcagccaggcgagaaagagaacacaaagccacaaatcggaaacacacgacaccaggacaggggacacgcagaaacgagagcgagagccgggccacgggcgacaacaaaggggacacaacagcagtagacacgagcggagaagaacgcagcagcgcgcaaaccgcggacgagagagcagggagagcgaggagcgagcgcgcagcggggcacagacacgggatcacaggcgaggaggggagagagcgaacggggagagagcg

SEQ ID NO: 438871 - DNA, 2417 bp, Homo sapiens
ctctcgcgactccttcgcgccggcccttccgcgggtgatcagctggtctgcgctcccctgacgtgggctggggcacgtcaccgccgaatggcagcctccagaaagccaccgcgagtaagacggcagaatgcctccaaaggtgacttcagagctgcttcggcagctgagacaagccatgaggaactctgagtatgtgaccgaaccgatccaggcctacatcatcccatcgggagatgctcatcagagtgagtatattgctccatgtgactgtcggcgggcttttgtctctggattcgatggctctgcgggcacagccatcatcacagaagagcatgcagccatgtggactgacgggcgctactttctccaggctgccaagcaaatggacagcaactggacacttatgaagatgggtctgaaggacacaccaactcaggaagactggctggtgagtgtgcttcctgaaggatccagggttggtgtggaccccttgatcattcctacagattattggaagaaaatggccaaagttctgagaagtgccggccatcacctcattcctgtcaaggagaacctcgttgacaaaatctggacagaccgtcctgagcgcccttgcaagcctctcctcacactgggcctggattacacaggcatctcctggaaggacaaggttgcagaccttcggttgaaaatggctgagaggaacgtcatgtggtttgtggtcactgccttggatgagattgcgtggctatttaatctccgaggatcagatgtggagcacaatccagtatttttctcctacgcaatcataggactagagacgatcatgctcttcattgatggtgaccgcatagacgcccccagtgtgaaggagcacctgcttcttgacttgggtctggaagccgaatacaggatccaggtgcatccctacaagtccatcctgagcgagctcaaggccctgtgtgctgacctctccccaagggagaaggtgtgggtcagtgacaaggccagctatgctgtgagcgagaccatccccaaggaccaccgctgctgtatgccttacacccccatctgcatcgccaaagctgtgaagaattcagctgagtcagaaggcatgaggcgggctcacattaaagatgctgttgctctctgtgaactctttaactggctggagaaagaggttcccaaaggtggtgtgacagagatctcagctgctgacaaagctgaggagtttcgcaggcaacaggcagactttgtggacctgagcttcccaacaatttccagtacgggacccaacggcgccatcattcactacgcgccagtccctgagacgaataggaccttgtccctggatgaggtgtaccttattgactcgggtgctcaatacaaggatggcaccacagatgtgacgcggacaatgcattttgggacccctacagcctacgagaaggaatgcttcacatatgtcctcaagggccacatagctgtgagtgcagccgttttcccgactggaaccaaaggtcaccttcttgactcctttgcccgttcagctttatgggattcaggcctagattacttgcacgggactggacatggtgttgggtcttttttgaatgtccatgagggtccttgcggcatcagttacaaaacattctctgatgagcccttggaggcaggcatgattgtcactgatgagcccgggtactatgaagatggggcttttggaattcgcattgagaatgttgtccttgtggttcctgtgaagaccaagtataattttaataaccggggaagcctgacctttgaacctctaacattggttccaattcagaccaaaatgatagatgtggattctcttacagacaaagagtgcgactggctcaacaattaccacctgacctgcagggatgtgattgggaaggaattgcagaaacagggccgccaggaagctctcgagtggctcatcagagagacgcaacccatctccaaacagcattaataaatacctccccggttttgtttttgtaaaatgctctggaggaaggaagaaacgtggcagatccctgacatctttcccctttcctttccttcttccctacctcccctttttactttagactttaagaagaacagaaaatcttcttatcctctttgatattttattgcaaacactcagtcttttatgattttttaattgttgagaacaagccaagaataaaattgctgcaccagaaggagggtccctccaaagttgaacacttggtgaaaggaagatgccccgacttctttggccagtgatggggaatcagtgagtgctccatgatggtcatgttccaggtgctagtacatcattcatgatcaccttaatgctcatgagactatatttatgatcagtgaataaaaatgtcagaactgtg
